(19) United States
(12) Patent Application Publication
(10) Pub. No.: US 2025/0297208 A1
(43) Pub. Date: Sep. 25, 2025

(54) YEAST WITH ENHANCED ASTAXANTHIN

(71) Applicant: Bioproton Pty Ltd, Brisbane (AU)

(72) Inventor: Carlos Luna-Flores, Brisbane (AU)

(21) Appl. No.: 18/848,173

(22) PCT Filed: Mar. 23, 2022
(86) PCT No.: PCT/AU2022/050258

§ 371 Date: Sep. 18, 2024

(51) Int. Cl. C12N 1/16; C12C 1/18; C12N 15/81; C12P 7/22; C12P 19/02; C12P 19/12

(52) U.S. Cl. CPC C12N 1/16; C12C 1/18; C12N 15/815; C12P 7/22; C12P 19/02; C12P 19/12; C12N 2840/102

(57) ABSTRACT

An isolated nucleic acid associated with increased accumulation of astaxanthin derived from a Xanthophyllomyces dendrorhous strain. The isolated nucleic acid comprising nucleotide sequence set forth in SEQ ID NOs: 1240-12684 or a nucleotide sequence at least 80% identical thereto, or a fragment of the isolated nucleic acid, is provided, wherein the nucleotide sequence of the isolated nucleic acid is not identical to any one of the nucleotide sequences set forth in SEQ ID NOs: 12685-19331. Associated proteins, genetic construct, cells, and methods are also provided.

### CROSS REFERENCE TO RELATED APPLICATIONS

[0001] This application is a U.S. National Stage under 35 U.S.C. § 371 of PCT/AU2022/050258 filed Mar. 23, 2022.

### REFERENCE TO SEQUENCE LISTING SUBMITTED ELECTRONICALLY

[0002] The instant application contains a Sequence Listing which has been submitted electronically in ASCII format and is hereby incorporated by reference in its entirety. Said ASCII copy, created May 16, 2025, is named “2025-05-16 Substitute Sequence Listing BPRT0001PA” and is 56,342,754 bytes in size.

### TECHNICAL FIELD

[0003] This invention relates to production of astaxanthin (AX). More particularly, the invention relates to biological production of AX such as using modified strains of Xanthophyllomyces dendrorhous.

### BACKGROUND

[0004] Astaxanthin (AX) is a carotenoid of the xanthophyll group known for its red-pinkish pigmentation. Due to its strong antioxidant properties, AX has significant application in health supplement and pharmaceutical industries. AX is also associated with desirable flesh colour in certain marine animals consumed as seafood such as shrimp, krill, crayfish, salmon, and trout. Generally, such animals cannot synthesise AX de-novo, and AX supplementation is used during production by aquaculture.

[0005] Currently, AX is synthesised primarily using petrochemical feedstock by a double Wittig reaction. AX can also be biologically synthesised, for example using the microalgae Haematococcus pluvialis, the gram-negative bacteria Paracoccus carotinifaciens, and the yeast Xanthophyllomyces dendrorhous (alternatively known as Phaffia rhodozyma). At present, the market size for pure AX is about 670 metric tonnes per annum, valued at about US$1.1 billion, with this market expected to exceed sales of US$2.25 billion by 2025. Synthetically produced AX is priced from about US$1,000 per kilogram, while biologically produced AX is priced from about US$7,000 per kilogram. Synthetic AX dominates the current global market due to its significantly lower cost, although health and safety concerns, environmental issues associated with the synthetic production process, and observed higher antioxidant activity of biologically produced AX as compared to synthetic AX, along with the trends towards use of natural products, sees significant current interest in the biological production of AX.

[0006] X. dendrorhous is a basidiomycetous yeast that produces AX as its main fermentation product using the mevalonate pathway. This yeast is typically preferred to other microbial AX producers for industrial purposes in view of superior growth rate, productivity, and robustness, and an ability to assimilate a wide diversity of carbon sources from feedstock or waste products including sucrose, glucose, fructose, xylose, glycerol, molasses, and bagasse hydrolysate (among others). Nevertheless, wild-type strains of X. dendrorhous produce relatively low yields of AX (200-400 μg/gDCW) which limits industrial efficacy. A detailed evaluation has suggested that AX yield, biomass density, and fermenter volume parameters of above 4,000 μg/gDCW, 60 g/L, and 1,500 L, respectively, could result in biological production of AX from X. dendrorhous that would be industrially competitive with existing synthetic approaches.

[0007] With the preceding in mind, new approaches for biological production of AX would be desirable. It would be particularly desirable, in at least some instances, to develop new approaches suitable for production of AX from yeast, particularly X. dendrorhous.

[0008] Reference to prior art in the background is not, and should not be taken to be, a suggestion that the prior art forms part of the common general knowledge in any jurisdiction.

### SUMMARY

[0009] A first aspect of the invention provides an isolated nucleic acid comprising a nucleotide sequence set forth in SEQ ID NOs:1240-12684 or a nucleotide sequence at least 80% identical thereto, or a fragment of the isolated nucleic acid.

[0010] Suitably, the nucleotide sequence of the isolated nucleic acid is not identical to any one of the nucleotide sequences set forth in SEQ ID NOs: 12685-19331.

[0011] In embodiments, the nucleotide sequence of the isolated nucleic acid is not identical to any one of the nucleotide sequences set forth in SEQ ID NOs:1-1239.

[0012] In embodiments, the nucleotide sequence of the isolated nucleic acid is or comprises a variant of a nucleotide sequence set forth in SEQ ID NOs:12685-19331. In embodiments, the nucleotide sequence is or comprises a variant of a nucleotide sequence set forth in SEQ ID NOs:1-1239.

[0013] The nucleotide sequence of the isolated nucleic acid may be a variant of a genic, regulatory, or intergenic region sequence as set out in Table 12. In embodiments, the variant nucleotide sequence is associated with a change in an amino acid sequence encoded by and/or expression of one or more CDS sequences set out in Table 12.

[0014] The nucleotide sequence of the isolated nucleic acid may be a variant of a genic, regulatory, or intergenic region sequence as set out in Table 13. In embodiments, the variant nucleotide sequence is associated with a change in amino acid sequence encoded by and/or expression of one or more CDS sequences set out in Table 13.

[0015] The nucleotide sequence of the isolated nucleic acid may be a variant of a genic, regulatory, or intergenic sequence as set out in Table 14. In embodiments, the variant is associated with a change in amino acid sequence encoded by and/or expression of one or more CDS sequences set out in Table 14.

[0016] The nucleotide sequence of the isolated nucleic acid may be a variant of a genic, regulatory, or intergenic sequence as set out in Table 15. In embodiments, the variant is associated with a change in amino acid sequence encoded by and/or expression of one or more CDS sequences set out in Table 15.

[0017] In embodiments, the nucleotide sequence of the isolated nucleic acid is a variant of a sequence encoding a transcript set out in Table 16.

[0018] In embodiments, the nucleotide sequence of the isolated nucleic acid is a variant of a regulatory sequence for a transcript as set out in Table 16.

[0019] In embodiments, the nucleotide sequence of the isolated nucleic acid is a variant of a sequence encoding a transcript set out in Table 17.

[0020] In embodiments, the nucleotide sequence of the isolated nucleic acid is a variant of a regulatory sequence for a transcript as set out in Table 17.

[0021] In embodiments, the nucleotide sequence of the isolated nucleic acid is a variant of a CDS sequence set forth in Table 18.

[0022] In embodiments, the nucleotide sequence of the isolated nucleic acid is a variant of a regulatory sequence for a CDS sequence set forth in Table 18.

[0023] In embodiments, the nucleotide sequence of the isolated nucleic acid is a variant of a CDS sequence set forth in Table 19.

[0024] In embodiments, the nucleotide sequence of the isolated nucleic acid is a variant of a regulatory sequence for a CDS sequence set forth in Table 19.

[0025] In embodiments, the nucleotide sequence of the isolated nucleic acid comprises a nucleotide change at a position of a variation X₂₂₃-X₈₃₉₅, as set out in Table 12. In embodiments, the nucleotide change is at a different position than any of the variations X₁-X₂₂₂, as set out in Table 12.

[0026] In embodiments, the nucleotide sequence of the isolated nucleic acid comprises a nucleotide change of a variation X₂₂₃-X₈₃₉₅, as set out in Table 12. In embodiments, the nucleotide change is different than any of the variations X₁-X₂₂₂, as set out in Table 12.

[0027] In embodiments, the nucleotide sequence of the isolated nucleic acid comprises a nucleotide change at a position of a variation Y₁-Y₃₆₈, as set out in Table 13. In embodiments, the nucleotide sequence comprises a nucleotide change of a variation Y₁-Y₃₆₈, as set out in Table 13.

[0028] In embodiments, the nucleotide sequence of the isolated nucleic acid comprises a nucleotide change at a position of a variation Z₁-Z₂₅, as set out in Table 14. In embodiments, the nucleotide sequence comprises a nucleotide change of a variation Z₁-Z₂₅, as set out in Table 14.

[0029] In embodiments, the nucleotide sequence of the isolated nucleic acid comprises a nucleotide change at a position of a V₁-V₂₆, as set out in Table 15. In embodiments, the nucleotide sequence comprises a nucleotide change of a variation V₁-V₂₆, as set out in Table 15.

[0030] In embodiments, the isolated nucleic acid comprises a nucleotide sequence set forth in SEQ ID NOs:1240-2795 or a variant thereof, wherein the nucleotide sequence or variant thereof is not identical to any one of the nucleotide sequences set forth in SEQ ID NOs:12685-19331. In embodiments, the nucleotide sequence or variant thereof is not identical to any one of the nucleotide sequences set forth in SEQ ID NOs:1-1239.

[0031] In embodiments, the isolated nucleic acid comprises a nucleotide sequence set forth in SEQ ID NOs:2796-4360 or a variant thereof, wherein the nucleotide sequence or variant thereof is not identical to any one of the nucleotide sequences set forth in SEQ ID NOs:12685-19331. In embodiments, the nucleotide sequence or variant thereof is not identical to any one of the nucleotide sequences set forth in SEQ ID NOs:1-1239.

[0032] In embodiments, the isolated nucleic acid comprises a nucleotide sequence set forth in SEQ ID NOs:4361-5500 or a variant thereof, wherein the nucleotide sequence or variant thereof is not identical to any one of the nucleotide sequences set forth in SEQ ID NOs:12685-19331. In embodiments, the nucleotide sequence or variant thereof is not identical to any one of the nucleotide sequences set forth in SEQ ID NOs:1-1239.

[0033] In embodiments, the isolated nucleic acid comprises a nucleotide sequence set forth in SEQ ID NOs:5501-6921 or a variant thereof, wherein the nucleotide sequence or variant thereof is not identical to any one of the nucleotide sequences set forth in SEQ ID NOs:12685-19331. In embodiments, the nucleotide sequence or variant thereof is not identical to any one of the nucleotide sequences set forth in SEQ ID NOs:1-1239.

[0034] In embodiments, the isolated nucleic acid comprises a nucleotide sequence set forth in SEQ ID NOs:6922-8057 or a variant thereof, wherein the nucleotide sequence or variant thereof is not identical to any one of the nucleotide sequences set forth in SEQ ID NOs:12685-19331. In embodiments, the nucleotide sequence or variant thereof is not identical to any one of the nucleotide sequences set forth in SEQ ID NOs:1-1239.

[0035] In embodiments, the isolated nucleic acid comprises a nucleotide sequence set forth in SEQ ID NOs:8058-9311 or a variant thereof, wherein the nucleotide sequence or variant thereof is not identical to any one of the nucleotide sequences set forth in SEQ ID NOs:12685-19331. In embodiments, the nucleotide sequence or variant thereof is not identical to any one of the nucleotide sequences set forth in SEQ ID NOs:1-1239.

[0036] In embodiments, the isolated nucleic acid comprises a nucleotide sequence set forth in SEQ ID NOs:9312-11033 or a variant thereof, wherein the nucleotide sequence or variant thereof is not identical to any one of the nucleotide sequences set forth in SEQ ID NOs:12685-19331. In embodiments, the nucleotide sequence or variant thereof is not identical to any one of the nucleotide sequences set forth in SEQ ID NOs:1-1239.

[0037] In embodiments, the isolated nucleic acid comprises a nucleotide sequence set forth in SEQ ID NOs:11034-12684 or a variant thereof, wherein the nucleotide sequence or variant thereof is not identical to any one of the nucleotide sequences set forth in SEQ ID NOs:12685-19331. In embodiments, the nucleotide sequence or variant thereof is not identical to any one of the nucleotide sequences set forth in SEQ ID NOs:1-1239.

[0038] A second aspect of the invention provides an isolated protein encoded by an isolated nucleic acid comprising a nucleotide sequence set forth in SEQ ID NOs:1240-12684 or a nucleotide sequence at least 80% identical thereto, or a fragment or derivative of the isolated protein. Suitably, the isolated protein of the second aspect is encoded by the isolated nucleic acid of the first aspect.

[0039] In embodiments, the isolated protein of the first aspect is of a protein classification selected from: short-chain dehydrogenase; deoxyribodipyrimidine photolyase/cryptochrome; nuclear transport factor 2; 60s ribosomal protein 132; armadillo/beta-catenin-like repeat-containing protein; 60s ribosomal protein 110a; pyridoxamine 5′-phosphate oxidase-like, FMN-binding domain; glutaredoxin-related protein; glycosyl transferase, family 8-glycogenin; mitochondrial carrier; nucleosome assembly protein; sterile alpha motif, type 2; snare protein ykt6; UDP-glucose dehydrogenase; predicted translation factor, contains W2 domain; G-protein beta subunit-like protein; heat shock protein HSS1; 40s ribosomal protein s7; ATP synthase f1 beta subunit; catalase 1; stress responsive alpha-beta barrel; cytokinin riboside 5′-monophosphate phosphoribohydrolase LOG; EF-hand domain pair; 20s proteasome subunit; ferrochelatase; glycine hydroxymethyltransferase; carboxypeptidase s; NADH-ubiquinone oxidoreductase 304 kDa subunit precursor; phytoene dehydrogenase; ribosomal protein L49/IMG2; nop10p-domain-containing protein; thioredoxin/protein disulfide isomerase; predicted dehydrogenase; 6-phosphogluconate dehydrogenase; NADH-dehydrogenase (ubiquinone); COPII vesicle protein; ornithine aminotransferase; ER-associated protein catabolism-related protein; isocitrate dehydrogenase; AAA atpase; probable NADP-dependent dehydrogenase acting on 3-hydroxy acids; CNDP dipeptidase; actin-related protein Arp2/3 complex, subunit ARPC2; branched-chain amino acid aminotransferase ii; carbon-nitrogen hydrolase; aspartate aminotransferase; NADPH oxidase; 26s proteasome subunit p45; pre-mRNA-splicing factor rsel; porphobilinogen deaminase; prolyl oligopeptidase; ABC transporter; 40s ribosomal protein s9; polyadenylate-binding protein; ATP-dependent RNA helicase dhx8; fatty acid synthase complex subunit alpha; glycosyltransferase family 35 protein; WD repeat protein; heat shock protein 60; succinate dehydrogenase; translocase of outer mitochondrial membrane complex, subunit TOM70/TOM72; nucleic acid-binding protein; nucleotide excision repair factor NEF2, RAD23 component; t-complex protein alpha subunit (tcp-1-alpha); k506-binding protein 2; aromatic amino acid aminotransferase; adenylate kinase; alpha-aminoadipate reductase lys1p; coatomer protein subunit alpha; 40s ribosomal protein s21; carbamoyl-phosphate synth; histone acetyltransferase SAGA, TRRAP/TRA1 component, PI-3 kinase superfamily; SAM-dependent RNA methyltransferase; related to 2-hydroxy-3-oxopropionate reductase; transcriptional coactivator p100; 60s ribosomal protein 113a; ornithine carbamoyltransferase; eukaryotic translation initiation factor 5b; aconitate hydratase; RNA 2-o-methyltransferase fibrillarin; t-complex protein beta subunit (tcp-1-beta); voltage-dependent ion-selective channel; coatomer beta subunit; succinate-ligase (adp-forming); carbamoyl-phosphate synthase; related to ste23-metalloprotease involved in a-factor processing; microtubule binding protein; pyridoxalphosphate-dependent enzyme/predicted threonine synthase; fact complex subunit SPT16; SLY1 vesicle trafficking secl-like protein; cytoplasm protein; NADH dehydrogenase; phosphoglycerate kinase; arm repeat-containing protein; ribonuclease III domain; GTP binding protein 4; peptidyl-prolyl cis-trans isomerase b; Translation initiation factor 4F, ribosome/mRNA-bridging subunit (eIF-4G); eukaryotic polypeptide chain release factor 3; asparagine synthase (glutamine-hydrolyzing); splicing factor U2AF, large subunit (RRM superfamily); NADH-cytochrome b5 reductase; histidine biosynthesis trifunctional-protein; Enoyl-CoA hydratase; alcohol; imidazoleglycerol phosphate synthase; thioredoxin-like fold; ef-hand; electron-transferring-flavoprotein dehydrogenase; MDF1-domain-containing protein; transcription factor IIS, N-terminal; heat shock protein 70; pyruvate carboxylase; homoaconitate hydratase; uncharacterized conserved coiled-coil protein; alternative splicing factor SRp55/B52/SRp75 (RRM superfamily); eukaryotic translation initiation factor 3 subunit 7; threonyl-trna synthetase; RmlC-like jelly roll fold; 60s ribosomal protein 120; mRNA splicing factor; pre-mrna-processing protein 45; atp-dependent rma helicase rrp3; dihydrolipoyllysine-residue acetyltransferase; Acyl-CoA synthetase; ribosomal protein S5; phenylalanyl-tRNA synthetase subunit beta; wd40 repeat-like protein; vacuolar ATP synthase subunit d; phosphatidylserine decarboxylase; vigilin; RNA recognition motif domain; plasma membrane h( )-atpase 1; RRM motif-containing protein; predicted GTPase-activating protein; F1-ATP synthase assembly protein; acetyl-hydrolase; peptidyl-prolyl cis-trans isomerase; antiviral helicase; acetyl CoA carboxylase; age pka protein kinase; ATP-dependent RNA helicase pitchoune; Microtubule-associated protein; cell-cycle nuclear protein, contains WD-40 repeats; phosphoserine aminotransferase; vacuolar protein sorting-associated protein; GMP synthase; translational regulator gcn20-like abc transporter; GDP-mannose pyrophosphorylase; acetyl CoA acyltransferase 2; phosphoketolase; delta 12 fatty acid desaturase; vacuolar protein 8; predicted haloacid-halidohydrolase and related hydrolases; class iii adh enzyme; t-complex protein 1; isocitrate lyase; atpase; 6-phosphogluconolactonase; mitochondrial inner membrane protein; t-complex protein 1 subunit delta; adaptor protein complex ap-1 gamma subunit; rRNA processing protein Rrp5; succinate:fumarate antiporter; predicted proline-serine-threonine phosphatase-interacting protein (PSTPIP); phospho-2-dehydro-3-deoxyheptonate aldolase; RNA-binding domain-containing protein; epsilon DNA polymerase; cullins; asparaginyl-tRNA synthetase; dihydroxy-acid dehydratase; SNARE protein SED5/Syntaxin 5; centromere microtubule binding protein cbf5; histidyl-trna synthetase; endoplasmic reticulum protein EP58, contains filamin rod domain and KDEL motif; 3-isopropylmalate dehydrogenase; Glycosyl transferase, family 1; eukaryotic translation initiation factor 3 subunit 6; phosphoglycerate mutase family; chromatin remodelling complex ATPase chain; predicted hydrolases or acyltransferases (alpha/beta hydrolase superfamily); NADH dehydrogenase subunits 2, 5, and related proteins; synaptobrevin-like protein; 40s ribosomal protein s6; ubiquitin C-terminal hydrolase UCHL 1; polyC-binding proteins alphaCP-1 and related KH domain proteins; nucleolar RNA-associated protein (NRAP); WD40 repeat-containing protein; pyruvate decarboxylase; RhoGEF GTPase; Ca2-dependent lipid-binding protein CLB1/vesicle protein vp115/Granuphilin A, contains C2 domain; molecular co-chaperone STI1; vacuolar H-ATPase V1 sector, subunit E; p-loop containing nucleoside triphosphate hydrolase protein; spliceosome subunit; microtubule-binding protein involved in cell cycle control; karyopherin (importin) beta 3; DNA-dependent RNA polymerase ii second largest subunit; coatomer subunit gamma; dehydrogenase kinase; mitochondrial pyruvate dehydrogenase el component beta subunit; glycoside hydrolase family 13 protein; NAD-specific glutamate dehydrogenase; mitochondrial 50s ribosomal protein 13; Ran GTPase-activating protein; FKBP-type peptidyl-prolyl cis-trans isomerase; 60s ribosomal protein 119; small nuclear ribonucleoprotein splicing factor; mannosyltransferase; dUTP pyrophosphatase; GST, gst; glutamate-trna ligase; mov34-domain-containing protein; mitochondrial nuclease; 1,4-benzoquinone reductase-like; thiamine biosynthetic bifunctional enzyme; protein of unknown function DUF3602; upf0041-domain-containing protein; 60s ribosomal protein 111; serine/threonine protein phosphatase 2A, regulatory subunit; argininosuccinate lyase; elongation factor 1 beta delta chain; bar-domain-containing protein; uridylate kinase; phosphatidylethanolamine n-methyltransferase; stomatin family protein; ubiquitin-conjugating enzyme; glycosyltransferase family 2 protein; signal recognition particle protein; B-cell receptor-associated protein and related proteins; RNA-binding S4 domain; Drebrins and related actin binding proteins; small gtpase-binding protein; gtp cyclohydrolase i; ps16 protein; predicted hydrolase related to dienelactone hydrolase; nuclear localization sequence binding protein; SWI SNF complex protein; GTP-binding protein ypt1; ATPase, F0 complex, subunit H; metal resistance protein ycf1; outer membrane protein, MIM1/TOM13, mitochondrial; ubiquitin-protein ligase molybdopterin-converting factor; GTP-binding protein; predicted mitochondrial carrier protein; 28 kda golgi snare protein; dead-domain-containing protein; trehalose-phosphate synthase (UDP-forming); ran protein binding protein; pkinase-domain-containing protein; ribosome recycling factor domain; phosphatase; nucleic acid-binding, GB-fold; ATP-dependent RNA helicase dbp5; mRNA export protein (contains WD40 repeats); protein phosphatase 2A regulatory subunit A and related proteins; glutaminyl-tRNA synthetase; prolactin regulatory element-binding protein/protein transport protein SEC12p; ribosome assembly protein; C4-type Zn-finger protein; exosomal 3′-5′ exoribonuclease complex subunit Rrp40; transcription regulator HTH, APSES-type DNA-binding domain; RIB7, arfC; 60s ribosomal protein 112; guanylate kinase; predicted membrane protein; glycerol-3-phosphate o-acyltransferase; cactin; translation initiation factor eif3 subunit; biotin holocarboxylase synthetase/biotin-protein ligase; 60s ribosomal protein 123; Inositol monophosphatase; RAS-domain-containing protein; maltase glucoamylase and related hydrolases, glycosyl hydrolase family 31; ribosomal protein S24/S35, mitochondrial, conserved domain; peptide methionine sulfoxide reductase; NAD-dependent formate dehydrogenase; molecular chaperone (DnaJ superfamily); immunoglobulin-like fold; translational repressor pumilio/PUF3 and related RNA-binding proteins (PUF superfamily); urease accessory protein; modular protein with glycoside hydrolase family 13 and glycosyltransferase family 5 domains; orotidine-5-phosphate decarboxylase; phosphoprotein/predicted coiled-coil protein; nucleosome remodeling subunit cafl nurf55 msi1; zinc finger, RING/FYVE/PHD-type; prefoldin subunit 6, KE2 family; thioredoxin h; ADF-like domain-containing protein; alcohol dehydrogenase, class V; 60s ribosomal protein 113; glycoside hydrolase family 3 protein; delta 9 fatty acid desaturase; predicted regulator of rRNA gene transcription (MYB-binding protein); regulator of ribosome synthesis; hexose transport-related protein; protein-histidine kinase; DNA-directed RNA polymerase II subunit I; inositol-3-phosphate synthase; protein transport protein sec22; taurine catabolism dioxygenase TauD/TfdA; ATPase inhibitor, IATP, mitochondria; and glycoside hydrolase family 32 protein.

[0040] In embodiments, the isolated protein of the second aspect is of a protein classification selected from: ferredoxin/adrenodoxin reductase; cytochrome; ATP synthase; NADH dehydrogenase; fatty acid desaturase; Acyl-CoA-oxidase; pantothenate kinase; polyphosphate multikinase; G protein-coupled receptor; and succinate dehydrogenase.

[0041] In embodiments, the isolated protein of the second aspect is selected from ferredoxin/adrenodoxin reductase; mitochondrial cytochrome b2; cytochrome b; cytochrome c oxidase subunit 1; ATP synthase subunit 6; NADH dehydrogenase subunit 4; cytochrome c oxidase subunit 2; cytochrome c oxidase subunit 3; NADH dehydrogenase subunit 2; NADH dehydrogenase subunit 5; NADH dehydrogenase subunit 6; cytochrome c oxidase subunit 3; delta 9 fatty acid desaturase; Acyl-CoA-oxidase; pantothenate kinase PanK; geranylgeranyl pyrophosphate synthase; fumarate reductase; sucrose transporter; inositol polyphosphate multikinase, ARGR transcription regulatory complex component; G protein-coupled receptor, rhodopsin-like; succinate dehydrogenase; and ATP synthase subunit mitochondrial.

[0042] A third aspect of the invention provides a method of modifying a nucleic acid or protein, including a step of changing one or more nucleotides or amino acids of the nucleic acid or protein, to produce:
[0043] an isolated nucleic acid comprising a nucleotide sequence set forth in SEQ ID NOs:1240-12684 or a nucleotide sequence at least 80% identical thereto, or a fragment of the isolated nucleic acid, or
[0044] an isolated protein encoded by an isolated nucleic acid comprising a nucleotide sequence set forth in SEQ ID NOs:1240-12684 or a nucleotide sequence at least 80% identical thereto, or a fragment or derivative of the isolated protein.

[0045] Suitably, the method of the third aspect is a method of producing the isolated nucleic acid of the first aspect or the isolated protein of the second aspect.

[0046] In embodiments, the method of modifying the nucleic acid or protein according to the third aspect is a method of mutagenising the nucleic acid or protein.

[0047] A fourth aspect of the invention provides a nucleic acid vector or construct comprising the isolated nucleic acid of the first aspect.

[0048] In embodiments, the vector or construct of the fourth aspect is an expression vector or construct. In embodiments, the vector or construct is adapted for protein expression in yeast.

[0049] In embodiments, the vector or construct of the fourth aspect is a silencing vector or construct. In embodiments, the vector or construct is adapted for gene silencing in yeast.

[0050] In embodiments, the vector or construct of the fourth aspect is an editing construct. In embodiments, the editing construct is adapted for gene editing in yeast.

[0051] A fifth aspect of the invention provides a cell comprising the nucleic acid of the first aspect, the protein of the second aspect, or the vector or construct of the fourth aspect.

[0052] In embodiments, the cell of the fifth aspect is a prokaryotic cell. The prokaryotic cell may be a bacterial cell. In embodiments, the bacterial cell is a Paracoccus cell. The Paracoccus cell may be Paracoccus carotinifaciens.

[0053] In embodiments, the cell is a eukaryotic cell. The eukaryotic cell may be selected from a plant cell, an animal cell, an algal cell, and a fungal cell.

[0054] In embodiments, the algal cell is a microalgae cell. The microalgae cell may be a Haematococcus cell. In embodiments, the Haematococcus cell is Haematococcus pluvialis.

[0055] In embodiments the fungal cell is a yeast cell. The yeast cell may be a Xanthophyllomyces cell. In embodiments, the Xanthophyllomyces cell is Xanthophyllomyces dendrorhous.

[0056] A sixth aspect of the invention provides an isolated organism comprising the cell of the fifth aspect. Suitably, the isolated organism is selected from a bacterial strain, algal strain, fungal strain, yeast strain, plant, or animal In embodiments, the organism of the sixth aspect is a yeast strain. In embodiments, the yeast strain is a Xanthophyllomyces dendrorhous strain.

[0057] A seventh aspect of the invention provides a method of producing astaxanthin including a step of expressing the isolated nucleic acid of the first aspect or the isolated protein of the second aspect, to thereby produce the astaxanthin.

[0058] In embodiments, the expression of the nucleic acid or protein according to the method of the seventh aspect is in vitro expression.

[0059] In embodiments, the expression of the nucleic acid or protein according to the method of the seventh aspect is in vivo expression.

[0060] An eighth aspect of the invention provides a method of producing astaxanthin including a step of performing metabolism with the cell of the fifth or the organism of the sixth aspect, to thereby produce the astaxanthin.

[0061] In embodiments, the step of performing metabolism according to the eighth aspect is a step of performing fermentation with the cell of the fifth aspect or the organism of the sixth aspect.

[0062] In embodiments, the cell according to the method of the eighth aspect is Xanthophyllomyces dendrorhous cell.

[0063] In embodiments, the method of the eighth aspect includes a step of combining the cell of the fifth aspect or the organism of the sixth aspect with one or more metabolites.

[0064] In embodiments, the one or more metabolites combined with the cell or organism comprise a nitrogen source metabolite. The nitrogen source metabolite may be selected from urea, ammonium sulphate, yeast extract, malt extract, bactopeptone, and dried corn steep liquor. In embodiments, the nitrogen source metabolite is or comprises malt extract.

[0065] In embodiments, the one or more metabolites combined with the cell or organism comprise a carbon source metabolite. The carbon source metabolite may be selected from molasses, glucose, glycerol, and sucrose. In embodiments, the carbon source metabolite is or comprises molasses.

[0066] In a ninth aspect, the invention provides astaxanthin produced according to the method of the seventh or eighth aspect.

[0067] In a tenth aspect, the invention provides a non-astaxanthin by-product of the method of the seventh or eighth aspect. In embodiments, the by-product is an invertase enzyme.

[0068] In an eleventh aspect, the invention provides a formulation comprising the cell of the fifth aspect or a part thereof, the organism of the sixth aspect or a part thereof, the astaxanthin of the ninth aspect, and/or the by-product of the tenth aspect.

[0069] In a twelfth aspect, the invention provides a method of supplementing an animal with the astaxanthin of the ninth aspect or the formulation of the eleventh aspect.

[0070] In embodiments, the animal supplemented according to the method of the twelfth aspect is a farmed animal. The farmed animal may be an aquaculture animal. In embodiments, the aquaculture animal according to the method of the ninth aspect is a crustacean or a fish. The crustacean may be selected from shrimp, krill, crab, and crayfish. The fish may be selected from salmon and trout.

[0071] In embodiments, the animal supplemented according to the method of the twelfth aspect is a domestic animal or a companion animal. The domestic animal or companion animal may be selected from a canine animal (e.g. a dog), a feline animal (e.g. a cat), and an equine animal (e.g. a horse).

[0072] In embodiments, the animal supplement according to the method of the twelfth aspect is a human.

[0073] A thirteenth aspect of the invention provides a method of treating or preventing a disease or disorder in a subject, including a step of administering the astaxanthin of the ninth aspect or the formulation of the eleventh aspect to the subject.

[0074] Suitably, the subject according to the thirteenth aspect is an animal subject. In embodiments, the subject according to the method of the thirteenth aspect is a human subject.

[0075] A fourteenth aspect of the invention provides a method of co-cultivating the cell of the fifth aspect or the organism of the sixth aspect with a further cell or organism. In embodiments of the method of the fourteenth aspect, the cell of the fifth aspect or the organism of the sixth aspect is a yeast cell or organism, and the further cell organism is an algal cell or organism. In embodiments, the cell of the fifth aspect is a Xanthophyllomyces dendrorhous cell or the organism of the sixth aspect is Xanthophyllomyces dendrorhous.

[0076] A fifteenth aspect of the invention provide a co-cultivated cell or organism produced according to the method of the fourteenth aspect. In embodiments, the co-cultivated cell or organism is a yeast cell or organism. In embodiments, the co-cultivated cell is aXanthophyllomyces dendrorhous cell or the co-cultivated organism is Xanthophyllomyces dendrorhous.

### BRIEF DESCRIPTION OF THE FIGURES

[0077] In order that the invention may be readily understood and put into practical effect, typical embodiments will now be described by way of example with reference to the accompanying figures, wherein:

[0078] FIG. 1 sets forth a schematic of methodology developed to obtain and analyse mutant strains of X. dendrorhous producing enhanced AX.

[0079] FIG. 2 sets forth relative carotenoid production (as a multiple of wild-type production) in mutant strains of X. dendrorhous identified using screening with antimycin.

[0080] FIG. 3 sets forth relative carotenoid production (as a multiple of wild-type production) in mutant strains of X. dendrorhous identified using screening with β-ionone.

[0081] FIG. 4 sets forth relative carotenoid production (as a multiple of wild-type production) in mutant strains of X. dendrorhous identified using screening with diphenyamine.

[0082] FIG. 5 sets forth relative carotenoid production (as a multiple of wild-type production) in mutant strains of X. dendrorhous identified using screening with flow cytometry and YM plates. Strains MYM0 to MYM13 and MYM18 to MYM40 screened with NTG-FACS; Strains MYM16 to MYM17 UV-FACS and MYM42-MYM55 screened with UV-FACS.

[0083] FIG. 6 sets forth relative carotenoid production (as a multiple of wild-type production) in mutant strains of X. dendrorhous identified using screening with flow cytometry and YM plates. Strains MYM56-MYM65 screened with UV-FACS; strains MYM66 to MYM89 screened with MS-FACS; strains MYM91 to MYM96 screened with NTG-FACS.

[0084] FIG. 7 sets forth relative carotenoid production in shake flask culture (as a multiple of wild-type production) in fifteen selected mutant strains of X. dendrorhous. Strains with the index MYM were isolated using FACS-YM screening; strains with the index MAMY were isolated using YM supplemented with antimycin; strains with the index MB were isolated using YM plates supplemented with β-ionone; strains with the index MDHA were isolated using YM plates supplemented with diphenylamine.

[0085] FIGS. 8 and 9 set forth kinetic model validation for fermentation using mutant X. dendrorhous strain MYM0 in batch culture. Circle=experimental biomass; square=experimental carotenoids; rhombus=experimental sugars. Smooth black line=simulated biomass; smooth light grey line=simulated carotenoids; smooth grey line=simulated sugars.

[0086] FIGS. 10 and 11 set forth kinetic model validation for fermentation using mutant X. dendrorhous strain MYM0 in fed-batch culture. Circle=experimental biomass; square=experimental carotenoids; rhombus=experimental sugars. In FIG. 10, smooth black line=simulated biomass; smooth light grey line=simulated carotenoids; smooth grey line=simulated sugars. In FIG. 11, smooth black line=simulated flow rate; smooth grey line=simulated volume.

[0087] FIG. 12 sets forth a schematic of variants detected across the genomes of the sequenced mutant strains and the re-sequenced X. dendrorhous CBS 6938 strain. Conserved mutations across the selected mutant strains, but not in the re-sequenced X. dendrorhous CBS 6938 strain, are shown as ‘Shared’.

[0088] FIG. 13 sets forth transmembrane helices (as predicted using TMHMM Server 2.0) of a mutant GPCR protein with a premature stop codon identified in all sequenced mutant strains of X. dendrorhous CBS 6938. A. Protein in wild-type X. dendrorhous CBS 6938. B. Protein in sequenced mutant strains of X. dendrorhous CBS 6938.

[0089] FIGS. 14 to 17 set forth fermentation data for the mutant X. dendrorhous strain BPAX-A1 (MYM0) and wild-type X. dendrorhous strain CBS6938. The data represent the average of three biological replicates. FIG. 14=fermentation profile for X. dendrorhous BPAX-A1; FIG. 15=specific rates for X. dendrorhous BPAX-A1; FIG. 16=fermentation profile for X. dendrorhous CBS6938; FIG. 17=specific rates for X. dendrorhous CBS6938. In FIG. 14 and FIG. 16: orange line and circle=glucose; blue line and circle=biomass; red line and circle=total carotenoids; red line and triangle=β-carotene; red line and asterisk=cantaxanthin; red line and square=astaxanthin. In FIG. 15 and FIG. 17: orange circle=glucose; blue circle=biomass; red circle=total carotenoids; red triangle=β-carotene; red asterisk=cantaxanthin; red square=astaxanthin.

[0090] FIG. 18 sets forth principal component analyses of metabolites at four growth phases of wild-type X. dendrorhous strain CBS6938 and mutant X. dendrorhous strain BPAX-A1 (MYM0).

[0091] FIG. 19 sets forth metabolite profile heat maps for X. dendrorhous BPAX-A1 (MYM0). For each metabolite, the response ratio of mutant strain to wild-type strain (X. dendrorhous CBS6938) was normalized to Log 2. Each column represents one of the growth phases studied: Phase 1, Phase 2, Phase 3, and Phase 4—these phases representing points across the kinetic of AX production. Blue colour indicates decreased expression and red colour indicates increased expression across a heat map representation as shown in FIG. 19D. Amino acid (FIG. 19A), fatty acid (FIG. 19C) and central carbon (FIG. 19B) metabolites were assessed.

[0092] FIG. 20 sets forth metabolic pathway representation of the central carbon metabolism, carotenoid biosynthesis, and electron transport chain. Bar charts represent metabolite abundance normalized to 100 across Phase 1, Phase 2, Phase 3, and Phase 4 or RNA-seq data in FPKM for Phase 3. Red bar=metabolites in the mutant strain X. dendrorhous BPAX-A1 (MYM0); Light blue bar=metabolites in the wild-type strain X. dendrorhous strain CBS6938; Dark red bar=transcripts in the mutant strain X. dendrorhous BPAX-A1 (MYM0); Green bar=transcripts in the wild-type strain X. dendrorhous strain CBS6938. An asterisk below a bar indicates statistical significance (p<0.05) for metabolites or (q<0.05) for transcripts.

[0093] FIG. 21 sets forth fatty acid profile for exemplary AX-containing formulations as described in Example 3 herein.

[0094] FIG. 22 sets forth a volcano plot of a comparison of protein expression between X. dendrorhous strain BPAX-A1 (MYM0) and wild-type X. dendrorhous strain CBS6938 during the Phase 3 growth phase. Dashed line is adjusted p-value cutoff (0.05). Blue circles are down-regulated proteins. Red circles are up-regulated proteins. A subset of CDS IDs corresponding to the differentially regulated proteins are given—the full list of CDS IDs for differentially regulated proteins is provided in Table 18.

[0095] FIG. 23 sets forth a volcano plot of a comparison of protein expression between X. dendrorhous strain BPAX-A1 (MYM0) and wild-type X. dendrorhous strain CBS6938 during the Phase 4 growth phase. Dashed line is adjusted p-value cutoff (0.05). Blue circles are down-regulated proteins. Red circles are up-regulated proteins. A subset of CDS IDs corresponding to the differentially regulated proteins are given—the full list of CDS IDs for differentially regulated proteins is provided in Table 19.

### BRIEF DESCRIPTION OF THE SEQUENCE LISTING

[0096] SEQ ID NOs:1-1239: Genomic sequence contigs from re-sequencing of a sample of X. dendrorhous CBS 6938.

[0097] SEQ ID NOs:1240-2795: Genomic sequence contigs of mutant X. dendrorhous strain MAMY3.

[0098] SEQ ID NOs:2796-4360: Genomic sequence contigs of mutant X. dendrorhous strain MAMY6.

[0099] SEQ ID NOs:4361-5500: Genomic sequence contigs of mutant X. dendrorhous strain MB18.

[0100] SEQ ID NOs:5501-6921: Genomic sequence contigs of mutant X. dendrorhous strain MB24.

[0101] SEQ ID NOs:6922-8057: Genomic sequence contigs of mutant X. dendrorhous strain MYM0.

[0102] SEQ ID NOs:8058-9311: Genomic sequence contigs of mutant X. dendrorhous strain MYM6.

[0103] SEQ ID NOs:9312-11033: Genomic sequence contigs of mutant X. dendrorhous strain MYM44.

[0104] SEQ ID NOs:11034-12684: Genomic sequence contigs of mutant X. dendrorhous strain MYM92.

[0105] SEQ ID NOs:12685-12950: Genomic sequence scaffolds of X. dendrorhous CBS 6938 (ATCC 96594) as published by Sharma et al. BMC genomics 16.1 (2015): 1-13 and publicly available via fungi.ensembl.org/info/data/ftp/index.html.

[0106] SEQ ID NOs:12951-19331: CDS sequences of X. dendrorhous CBS 6938 (ATCC 96594) as published by Sharma et al. BMC genomics 16.1 (2015): 1-13 and publicly available via fungi.ensembl.org/info/data/ftp/index.html.

### Biological Deposits

[0107] The following biological deposits are incorporated herein under the provisions of the Budapest Treaty. To avoid doubt, this incorporation is not, and is not to be interpreted as, a suggestion that the incorporated deposits are required to work the invention.

[0108] CBS 145279: Phaffia rhodozyma BPAX-A1 (alternatively referred to herein as Xanthophyllomyces dendrorhous MYM0) deposited with Westerdijk Fungalbio Diversity Institute, an International Depository Authority at Uppsalalaan 8, 3584 CT Utrecht, Netherlands, on 6 Dec. 2018.

[0109] CBS 145280: Phaffia rhodozyma BPAX-A2 (alternatively referred to herein as Xanthophyllomyces dendrorhous MYM92) deposited with Westerdijk Fungalbio Diversity Institute, an International Depository Authority at Uppsalalaan 8, 3584 CT Utrecht, Netherlands, on 6 Dec. 2018.

### DETAILED DESCRIPTION

[0110] This invention is at least partly predicated on the identification of mutations in yeast associated with increased accumulation of astaxanthin.

[0111] One aspect of the invention is directed to isolated nucleic acids. In typical embodiments, the isolated nucleic acids are associated with increased accumulation of astaxanthin, as herein described.

[0112] For the purposes of this invention, by “isolated” is meant material that has been removed from its natural state or otherwise been subjected to human manipulation. Isolated material may be substantially or essentially free from components that normally accompany it in its natural state, or may be manipulated so as to be in an artificial state together with components that normally accompany it in its natural state. Isolated material may be in native, chemical synthetic or recombinant form.

[0113] The term “nucleic acid” as used herein designates single or double-stranded DNA and RNA. DNA includes genomic DNA and cDNA. RNA includes mRNA, RNA, RNAi, siRNA, cRNA and autocatalytic RNA. Nucleic acids may also be DNA-RNA hybrids. A nucleic acid comprises a nucleotide sequence which typically includes nucleotides that comprise an A, G, C, T or U base. However, nucleotide sequences may include other bases such as inosine, methylycytosine, methylinosine, methyladenosine and/or thiouridine, although without limitation thereto.

[0114] A “polynucleotide” is a nucleic acid having eighty (80) or more contiguous nucleotides, while an “oligonucleotide” has less than eighty (80) contiguous nucleotides.

[0115] A “probe” may be a single or double-stranded oligonucleotide or polynucleotide, suitably labelled for the purpose of detecting complementary sequences in northern or Southern blotting, for example.

[0116] A “primer” is usually a single-stranded oligonucleotide, typically having 15-50 contiguous nucleotides, which is capable of annealing to a complementary nucleic acid ‘template’ and being extended in a template-dependent fashion by the action of a DNA polymerase such as Taq polymerase, RNA-dependent DNA polymerase or Sequenase™.

[0117] A typical embodiment of this aspect provides an isolated nucleic acid comprising a nucleotide sequence set forth in SEQ ID NOs:1240-12684 or a nucleotide sequence at least 80% identical thereto, or a fragment of the isolated nucleic acid.

[0118] Reference is made herein to sequence identity, in the context of comparisons of nucleotide and/or amino acid sequences. Terms used generally herein to describe sequence relationships between respective sequences of nucleic acids and proteins may include “comparison window”, “sequence identity”, “percentage of sequence identity” and “substantial identity”, and the like.

[0119] Because respective nucleic acids/proteins or sequences thereof may each comprise (1) only one or more portions that are shared, and (2) one or more portions which are divergent between the nucleic acids/proteins, sequence comparisons are typically performed by comparing sequences over a “comparison window” to identify and compare local regions of sequence similarity. A “comparison window” refers to a conceptual segment of typically 6, 9 or 12 contiguous residues that is compared to a reference sequence. The comparison window may comprise additions or deletions (i.e., gaps) of about 20% or less as compared to the reference sequence for optimal alignment of the respective sequences.

[0120] Optimal alignment of sequences for aligning a comparison window may be conducted by computerised implementations of algorithms (Geneworks program by Intelligenetics; GAP, BESTFIT, FASTA, and TFASTA in the Wisconsin Genetics Software Package Release 7.0, Genetics Computer Group, 575 Science Drive Madison, WI, USA) or by inspection, and the best alignment (i.e., resulting in the highest percentage homology over the comparison window) generated by any of the various methods selected. Reference also may be made to the BLAST family of programs as for example disclosed by Altschul et al, 1997, Nucl. Acids Res. 25 3389. A detailed discussion of sequence analysis can be found in Unit 19.3 of CURRENT PROTOCOLS IN MOLECULAR BIOLOGY Eds. Ausubel et al. (John Wiley & Sons Inc NY, 1995-1999). Other assessment of sequence alignment approaches can be found, for example, in Thompson et al, 2011, PLOS ONE. 6 (3): e18093, and Nuin et al, 2006, BMC Bioinformatics. 7: 471.

[0121] The term “sequence identity” is used herein in its broadest sense to include the number of exact nucleotide or amino acid matches having regard to an appropriate alignment using a standard algorithm, having regard to the extent that sequences are identical over a window of comparison. Thus, a “percentage of sequence identity” is calculated by comparing two optimally aligned sequences over the window of comparison, determining the number of positions at which the identical nucleic acid base (e.g., A, T, C, G, U) occurs in both sequences to yield the number of matched positions, dividing the number of matched positions by the total number of positions in the window of comparison (i.e., the window size), and multiplying the result by 100 to yield the percentage of sequence identity. For example, “sequence identity” may be understood to mean the “match percentage” calculated by the DNASIS computer program, Version 2.5 for Windows, as was made available from Hitachi Software engineering Co., Ltd., South San Francisco, California, USA.

[0122] Typically, the isolated nucleic acid according to this aspect comprises a nucleotide sequence at least about 85%, 90%, 91%, 92%, 93%, 94%, 95%, 96%, 97%, 98%, or 99% identical to a nucleotide sequence set forth in SEQ ID NOs:1240-12684.

[0123] As set out hereinabove, this aspect is also directed to fragments of the isolated nucleic acid. More generally, reference is made herein to fragments of nucleic acids and proteins. It will be understood that, as used herein, a nucleic acid or protein “fragment” includes a nucleotide sequence or amino acid sequence, respectively, of less than 100% of that of the full nucleic acid or protein, respectively.

[0124] The nucleic acid or protein fragment may comprise about, or at least about, 10, 20, 50, 100, 150, 200, 300, 400, 500, 600, 700, 800, 900, 1000, 1500, 2000, 5000, or 10000 contiguous nucleotides or amino acids of the nucleic acid or protein, respectively. In embodiments, the nucleic acid or protein fragment comprises about, or at least about, 1%, 2%, 3%, 4%, 5%, 10%, 20%, 30%, 40%, 50%, 60%, 70%, 80%, or 90-99% of the full length of the nucleic acid or protein, respectively.

[0125] Suitably, the nucleotide sequence of the isolated nucleic acid of this aspect is not identical to any one of the nucleotide sequences set forth in SEQ ID NOs:12685-12950.

[0126] The skilled person will appreciate that SEQ ID NOs:12685-12950 correspond to the published genome sequence of the sequenced wild-type yeast strain Xanthophyllomyces dendrorhous CBS 6938 as reported in Sharma et al. BMC genomics 16.1 (2015): 1-13.

[0127] Suitably, the nucleotide sequence of the isolated nucleic acid of this aspect is not identical to any one of the nucleotide sequences set forth in SEQ ID NOs:12951-19331.

[0128] The skilled person will appreciate that SEQ ID NOs:12951-19331 correspond to the published CDS annotations of the sequenced wild-type yeast strain Xanthophyllomyces dendrorhous CBS 6938 as reported in Sharma et al. BMC genomics 16.1 (2015): 1-13.

[0129] Typically, the nucleotide sequence of the isolated nucleic acid according to this aspect is not identical to any one of the nucleotide sequences set forth in SEQ ID NOs:1-1239.

[0130] As set out in Example 1, SEQ ID NOs:1-1239 correspond to the re-sequenced genome of wild-type Xanthophyllomyces dendrorhous CBS 6938.

[0131] The skilled person will appreciate that various annotations for Xanthophyllomyces dendrorhous CBS 6938 are publicly available as at the filing date, including those annotations hosted at fungi.ensembl.org/info/data/ftp/index.html. To avoid doubt, all such publicly available annotation data is incorporated herein in full, by reference.

[0132] In some typical embodiments, the nucleotide sequence of the isolated nucleic acid of this aspect is a variant of a nucleotide sequence set forth in SEQ ID NOs: 12685-19331.

[0133] As used herein, a nucleotide or amino acid sequence “variant” will be understood to have one or more nucleotides or amino acids changes, respectively, inclusive of substitutions and deletions. Said changes may be referred to as “variations” of the nucleotide or amino acid sequence.

[0134] Typically, variants of a nucleotide sequence or amino acid sequence share at least about 70% or 75%, more typically at least about 80% or 85%, and even more typically at least about 90%, 91%, 92%, 93%, 94%, 95%, 96%, 97%, 98%, or 99% sequence identity with the nucleotide sequence or amino acid sequence.

[0135] In some embodiments, a nucleic acid comprising a variant of a nucleotide sequence will hybridize to isolated nucleic acids comprising the nucleotide sequence, under at least low stringency conditions, typically under at least medium stringency conditions, more typically under high stringency conditions.

[0136] “Hybridize” and “hybridization” is used herein to denote the pairing of at least partly complementary nucleotide sequences to produce a DNA-DNA, RNA-RNA or DNA-RNA hybrid. Hybrid sequences comprising complementary nucleotide sequences occur through base-pairing between complementary purines and pyrimidines as is well known in the art. In this regard, it will be appreciated that modified purines (for example, inosine, methylinosine and methyladenosine) and modified pyrimidines (thiouridine and methylcytosine) may also engage in base pairing.

[0137] “Stringency” as used herein, refers to temperature and ionic strength conditions, and presence or absence of certain organic solvents and/or detergents during hybridisation. The higher the stringency, the higher will be the required level of complementarity between hybridizing nucleotide sequences.

[0138] In general terms, “high stringency conditions” designate those conditions under which only nucleic acid having a high frequency of complementary bases will hybridize.

[0139] Reference herein to high stringency conditions includes and encompasses:
[0140] (i) from at least about 31% v/v to at least about 50% v/v formamide and from at least about 0.01 M to at least about 0.15 M salt for hybridisation at 42° C., and at least about 0.01 M to at least about 0.15 M salt for washing at 42° C.;
[0141] (ii) 1% BSA, 1 mM EDTA, 0.5 M NaHP0 4 (pH 7.2), 7% SDS for hybridization at 65° C., and (a) 0.1×SSC, 0.1% SDS; or (b) 0.5% BSA, 1 mM EDTA, 40 mM NaHPO₄ (pH 7.2), 1% SDS for washing at a temperature in excess of 65° C. for about one hour; and
[0142] (iii) 0.2×SSC, 0.1% SDS for washing at or above 68° C. for about 20 minutes.

[0143] In general, washing is carried out at Tₘ=69.3+0.41 (G+C) %−12° C. In general, the Tₘ of a duplex DNA decreases by about 1° C. with every increase of 1% in the number of mismatched bases.

[0144] Notwithstanding the above, stringent conditions are well known in the art, such as described in Chapters 2.9 and 2.10 of Ausubel et al, supra. The skilled person will also recognize that various factors can be manipulated to optimize the specificity of the hybridization. Optimization of the stringency of the final washes can serve to ensure a high degree of hybridization.

[0145] It will be appreciated by the skilled person that isolated nucleic acids comprising a variant nucleotide sequence may be producing using a nucleic acid amplification technique. Suitable nucleic acid amplification techniques are well known to the skilled person and include polymerase chain reaction (PCR), strand displacement amplification (SDA), rolling circle replication (RCR), nucleic acid sequence-based amplification (NASBA), Q-β replicase amplification, and helicase-dependent amplification, although without limitation thereto.

[0146] As used herein, an “amplification product” refers to a nucleic acid product generated by nucleic acid amplification.

[0147] Particularly for analytical purposes, nucleic acid amplification techniques may include quantitative and semi-quantitative techniques such as qPCR, real-time PCR and competitive PCR, as are well known in the art.

[0148] Suitably, isolated nucleic acids comprising a variant of a nucleotide sequence may be produced using nucleic acid amplification techniques using one or more degenerate primers based on, or derived from, an isolated nucleic acid comprising the nucleotide sequence.

[0149] It is well understood in the art that some nucleotide changes do not change an encoded amino acid sequence (“synonymous” changes), while some nucleotide sequences change an encoded amino acid sequence (“non-synonymous” changes). In some typical embodiments, the nucleotide sequence of the isolated nucleic acid is a variant of a nucleotide sequence set forth in SEQ ID NOs: 12685-19331 comprising a non-synonymous nucleotide change.

[0150] It is well understood in the art that some amino acid changes do not substantially change affect activity (“conservative” changes), while some amino acid changes substantially affect protein activity (“non-conservative” changes). In some typical embodiments, the nucleotide sequence of the isolated nucleic acid is a variant of a nucleotide sequence set forth in SEQ ID NOs: 12685-19331 encoding a non-conservative amino acid change.

[0151] It will be further understood that nucleotide and/or amino acid variations may be more specifically characterised in a range of ways as will be known to the skilled person. For the purposes of this invention, nucleotide changes may (by way of non-limiting example) be characterised with reference to a gene or CDS region as: ‘synonymous’ (resulting in no change to an encoded amino acid sequence); ‘missense’ (resulting in a change to an encoded amino acid sequence); ‘upstream’ (occurring upstream of the gene or CDS); ‘upstream less than or equal to 100 base pairs’ (occurring within 100 base pairs of the start of the gene or CDS), ‘downstream’ (occurring downstream of the gene or CDS), ‘downstream less than or equal to 100 bp’ (occurring within 100 base pairs of the end of the gene or CDS); ‘intergenic’ (occurring in a region between respective genes or CDSs); ‘intron variant’ (occurring in an intron of the gene or unspliced sequence containing the CDS); ‘splice variant’ (causing a variation in splicing of the gene or unspliced sequence containing the CDS); ‘stop gained’ (introducing a stop codon into the gene or CDS); ‘start lost’ (removing a start codon from the gene or CDS).

[0152] In some typical embodiments, the nucleotide sequence of the isolated nucleic acid is a variant of a nucleotide sequence set forth in SEQ ID NOs: 12685-19331 characterised as ‘synonymous’, ‘missense’, ‘upstream’, ‘upstream less than or equal to 100 base pairs’, ‘downstream’, ‘downstream less than or equal to 100 bp’, ‘intergenic’, ‘intron variant’, ‘splice variant’, ‘stop gained’, or ‘start lost’, with reference to one or more suitable genes or CDSs.

[0153] Tables 12, 13, 14, and 15 set out hereinbelow show nucleotide sequence variations identified relative to genomic scaffolds published by Sharma et al. BMC genomics 16.1 (2015): 1-13, which scaffolds are incorporated herein as SEQ ID NOs:12685-12950, as hereinabove described. CDS sequences as published by Sharma et al. BMC genomics 16.1 (2015): 1-13 in or near to which the nucleotide sequence variations are located (as applicable) are also shown in Tables 12-15, which CDS sequences are incorporated herein as SEQ ID NOs:12951-19331, as hereinabove described.

[0154] With reference to Sharma et al. BMC genomics 16.1 (2015): 1-13, SEQ ID NOs:12685-12950, and SEQ ID NOs:12951-19331, the skilled person will readily appreciate that each respective nucleotide sequence variation as set out in Tables 12-15 can be characterised as a variation of:
[0155] a genic region, i.e. a region from the transcription start site to the end of the 3′ UTR for a given gene;
[0156] a regulatory region, i.e. a region associated with regulation of expression of a given gene; or
[0157] an intergenic region, i.e. a region that is not a genic or regulatory region.

[0158] By way of example, as per Table 12:
[0159] variation X₂₂₃ is a variation of a nucleotide sequence in a genic region of CDS CED80056;
[0160] variation X₂₄₆ is a variation of a nucleotide sequence in a regulatory region for CDS CED80058;
[0161] variation X₂₆₀ is a variation of a nucleotide sequence in an intergenic region located towards the start of genomic scaffold 7 as per Sharma et al, supra.

[0162] By way of another example, as per Table 13:
[0163] variation Y₂₄ is a variation of a nucleotide sequence in a genic region of CDS CED80060;
[0164] variation Y₃₂₂ is a variation of a nucleotide sequence in a regulatory region for CDS CED85243.

[0165] By way of another example, as per Table 14:
[0166] variation Z₉ is a variation of a nucleotide sequence in a genic region of CDS CDZ96153;
[0167] variation Z₂₄ is a variation of a nucleotide sequence in a regulatory region for CDS CED83975.

[0168] By way of another example, as per Table 15:
[0169] variation V₃ is a variation of a nucleotide sequence in a genic region of CDS CDZ98193;
[0170] variation V₂₃ is a variation of a nucleotide sequence in a regulatory region for CDZ96151.

[0171] It will be further appreciated that variations as set forth in Tables 12-15 may be more specifically characterised, such as in the manner hereinabove described including characterisations such as synonymous, missense, upstream, downstream, intergenic, intron variant, splice variant, stop gained, or start lost. Characterisation in said (or similar) manner is provided in Tables 12-15.

[0172] With reference to Example 1 and Table 12, it will be appreciated that variations X₁-X₂₂₂ are variations identified in the re-sequenced wild-type Xanthophyllomyces dendrorhous strain relative to the published genome sequence in Sharma et al., supra.

[0173] In some typical embodiments, the nucleotide sequence of the isolated nucleic acid of this aspect is a variant of a genic, regulatory, or intergenic sequence as set out in Table 12. The nucleotide sequence variant may be associated with a change in an encoded amino acid sequence and/or expression of a CDS sequence set out in Table 12.

[0174] In some typical embodiments, the nucleotide sequence of the isolated nucleic acid of this aspect is a variant of a genic, regulatory, or intergenic region as set out in Table 13. The nucleotide sequence variant may be associated with a change in an encoded amino acid sequence and/or expression of a CDS sequence set out in Table 13.

[0175] In some typical embodiments, the nucleotide sequence of the isolated nucleic acid of this aspect is a variant of a genic, regulatory, or intergenic region as set out in Table 14. The nucleotide sequence variant may be associated with a change in an encoded amino acid sequence and/or expression of a CDS sequence set out in Table 14.

[0176] In some typical embodiments, the nucleotide sequence of the isolated nucleic acid of this aspect is a variant of a genic, regulatory, or intergenic region as set out in Table 15. The nucleotide sequence variant may be associated with a change in an encoded amino acid sequence and/or expression of a CDS sequence set out in Table 15.

[0177] Tables 16 and 17 set out hereinbelow show transcript expression in a mutant Xanthophyllomyces dendrorhous strain (MYM0) relative to the wild-type CBS 6938 strain. In some typical embodiments, the nucleotide sequence of the isolated nucleic acid of this aspect is a variant of a nucleotide sequence encoding a transcript set out in Table 16. In some typical embodiments, the nucleotide sequence of the isolated nucleic acid of this aspect is a variant of a nucleotide sequence encoding a transcript set forth in Table 17.

[0178] With reference to Sharma et al. BMC genomics 16.1 (2015): 1-13, SEQ ID NOs:12685-12950, and SEQ ID NOs:12951-19331, at least certain regulatory sequences associated with control of expression of the transcripts set out in Table 16 and Table 17 will be apparent to or readily determinable by the skilled person. The skilled person is further directed to all annotations available at fungi.ensembl.org/info/data/ftp/index.html for the wild-type CBS 6938 strain, incorporated herein by reference.

[0179] Accordingly, in some typical embodiments, the nucleotide sequence of the isolated nucleic acid of this aspect is a regulatory sequence for a transcript set out in Table 16. In some typical embodiments, the nucleotide sequence of the isolated nucleic acid of this aspect is a regulatory sequence for a transcript set out in Table 17.

[0180] Tables 18 and 19 set out hereinbelow show CDS sequences encoding proteins differentially expressed (based on proteomic analysis) in Xanthophyllomyces dendrorhous strain MYM0 relative to the wild-type CBS 6938 strain. In some typical embodiments, the nucleotide sequence of the isolated nucleic acid of this aspect is a variant of a CDS sequence set out in Table 18 and/or Table 19. The nucleotide sequence variant may be associated with a change in an encoded amino acid sequence and/or expression of a CDS sequence set out in Table 18 and/or Table 19.

[0181] With reference to Sharma et al. BMC genomics 16.1 (2015): 1-13, SEQ ID NOs:12685-12950, and SEQ ID NOs:12951-19331, at least certain regulatory sequences associated with control of expression of CDS sequences and encoded proteins set out in Table 18 and Table 19 will be apparent to or readily determinable by the skilled person. The skilled person is further directed to all annotations available at fungi.ensembl.org/info/data/ftp/index.html for the wild-type CBS 6938 strain, incorporated herein by reference.

[0182] Accordingly, in some typical embodiments, the nucleotide sequence of the isolated nucleic acid of this aspect is a regulatory sequence for a CDS sequence and/or encoded protein set out in Table 18 and/or Table 19.

[0183] In some typical embodiments, the nucleotide sequence of the isolated nucleic acid of this aspect comprises a nucleotide change at a position of one or more variations X₂₂₃-X₈₃₉₅, as set forth in Table 12, relative to SEQ ID NOs:12685-12950. Typically, the nucleotide change comprises a change at a different position than any of the variations X₁-X₂₂₂, as set forth in Table 12, relative to SEQ ID NOs:12685-12950.

[0184] In some typical embodiments, the nucleotide sequence of the isolated nucleic acid comprises a nucleotide change of one or more variations X₂₂₃-X₈₃₉₅, as set forth in Table 12, relative to SEQ ID NOs:12685-12950. Typically, the nucleotide change comprises a change that is different than any of the variations X₁-X₂₂₂, as set forth in Table 12, relative to SEQ ID NOs:12685-12950.

[0185] In some typical embodiments, the nucleotide sequence of the isolated nucleic acid comprises a nucleotide change at a position of one or more variations Y₁-Y₃₆₈, as set forth in Table 13, relative to SEQ ID NOs:12685-12950.

[0186] In some typical embodiments, the nucleotide sequence of the isolated nucleic acid comprises a nucleotide change of one or more variations Y₁-Y₃₆₈, as set forth in Table 13, relative to SEQ ID NOs:12685-12950.

[0187] In some typical embodiments, the nucleotide sequence of the isolated nucleic acid comprises a nucleotide change at a position of one or more variations Z₁-Z₂₅, as set forth in Table 14, relative to SEQ ID NOs:12685-12950.

[0188] In some typical embodiments, the nucleotide sequence of the isolated nucleic acid comprises a nucleotide change of one or more variations Z₁-Y₂₅, as set forth in Table 14, relative to SEQ ID NOs:12685-12950.

[0189] In some typical embodiments, the nucleotide sequence of the isolated nucleic acid comprises a nucleotide change at a position of one or more variations V₁-Z₂₆, as set forth in Table 15, relative to SEQ ID NOs:12685-12950.

[0190] In some typical embodiments, the nucleotide sequence of the isolated nucleic acid comprises a nucleotide change of one or more variations V₁-V₂₆, as set forth in Table 15, relative to SEQ ID NOs:12685-12950.

[0191] SEQ ID NOs:1240-2795 are genomic sequence contigs of mutant X. dendrorhous strain MAMY3. In some typical embodiments, the isolated nucleic acid comprises a nucleotide sequence set forth in SEQ ID NOs:1240-2795 or a variant thereof, wherein the nucleotide sequence or variant thereof is not identical to any one of the nucleotide sequences set forth in SEQ ID NOs:12685-12950 or SEQ ID NOs:12951-19331. Typically, the nucleotide sequence or variant thereof is not identical to any one of the nucleotide sequences set forth in SEQ ID NOs:1-1239.

[0192] SEQ ID NOs:2796-4360 are genomic sequence contigs of mutant X. dendrorhous strain MAMY6. In some typical embodiments, the isolated nucleic acid comprises a nucleotide sequence set forth in SEQ ID NOs:2796-4360 or a variant thereof, wherein the nucleotide sequence or variant thereof is not identical to any one of the nucleotide sequences set forth in SEQ ID NOs:12685-12950 or SEQ ID NOs:12951-19331. Typically, the nucleotide sequence or variant thereof is not identical to any one of the nucleotide sequences set forth in SEQ ID NOs:1-1239.

[0193] SEQ ID NOs:4361-5500 are genomic sequence contigs of mutant X. dendrorhous strain MB18. In some typical embodiments, the isolated nucleic acid comprises a nucleotide sequence set forth in SEQ ID NOs:4361-5500 or a variant thereof, wherein the nucleotide sequence or variant thereof is not identical to any one of the nucleotide sequences set forth in SEQ ID NOs:12685-12950 or SEQ ID NOs:12951-19331. Typically, the nucleotide sequence or variant thereof is not identical to any one of the nucleotide sequences set forth in SEQ ID NOs:1-1239.

[0194] SEQ ID NOs:5501-6921 are genomic sequence contigs of mutant X. dendrorhous strain MB24. In some typical embodiments, the isolated nucleic acid comprises a nucleotide sequence set forth in SEQ ID NOs:5501-6921 or a variant thereof, wherein the nucleotide sequence is not identical to any one of the nucleotide sequences set forth in SEQ ID NOs:12685-12950 or SEQ ID NOs:12951-19331. Typically, the nucleotide sequence or variant thereof is not identical to any one of the nucleotide sequences set forth in SEQ ID NOs:1-1239.

[0195] SEQ ID NOs:6922-8057 are genomic sequence contigs of mutant X. dendrorhous strain MYM0. In some typical embodiments, the isolated nucleic acid comprises a nucleotide sequence set forth in SEQ ID NOs:6922-8057 or a variant thereof, wherein the nucleotide sequence or variant thereof is not identical to any one of the nucleotide sequences set forth in SEQ ID NOs:12685-12950 or SEQ ID NOs:12951-19331. Typically, the nucleotide sequence or variant thereof is not identical to any one of the nucleotide sequences set forth in SEQ ID NOs:1-1239.

[0196] SEQ ID NOs:8058-9311 are genomic sequence contigs of mutant X. dendrorhous strain MYM6. In some typical embodiments, the isolated nucleic acid comprises a nucleotide sequence set forth in SEQ ID NOs:8058-9311 or a variant thereof, wherein the nucleotide sequence or variant thereof is not identical to any one of the nucleotide sequences set forth in SEQ ID NOs:12685-12950 or SEQ ID NOs:12951-19331. Typically, the nucleotide sequence or variant thereof is not identical to any one of the nucleotide sequences set forth in SEQ ID NOs:1-1239.

[0197] SEQ ID NOs:9312-11033 are genomic sequence contigs of mutant X. dendrorhous strain MYM44. In some typical embodiments, the isolated nucleic acid comprises a nucleotide sequence set forth in SEQ ID NOs:9312-11033 or a variant thereof, wherein the nucleotide sequence is not identical to any one of the nucleotide sequences set forth in SEQ ID NOs:12685-12950 or SEQ ID NOs:12951-19331. Typically, the nucleotide sequence or variant thereof is not identical to any one of the nucleotide sequences set forth in SEQ ID NOs:1-1239.

[0198] SEQ ID NOs:11034-12684 are genomic sequence contigs of mutant X. dendrorhous strain MYM92. In some typical embodiments, the isolated nucleic acid comprises a nucleotide sequence set forth in SEQ ID NOs:11034-12684 or a variant thereof, wherein the nucleotide sequence is not identical to any one of the nucleotide sequences set forth in SEQ ID NOs:12685-12950 or SEQ ID NOs:12951-19331. Typically, the nucleotide sequence or variant thereof is not identical to any one of the nucleotide sequences set forth in SEQ ID NOs:1-1239.

[0199] Another aspect of the invention provides an isolated protein encoded by the isolated nucleic acid of the preceding aspect, or a fragment, variant, or derivative of the isolated protein.

[0200] By “protein” is meant an amino acid polymer. The amino acids may be natural or non-natural amino acids, D- or L-amino acids as are well understood in the art.

[0201] A “peptide” is a protein having no more than fifty (50) amino acids.

[0202] A “polypeptide” is a protein having more than fifty (50) amino acids.

[0203] As used herein, “derivative” proteins have been altered, for example by conjugation or complexing with other chemical moieties, by post-translational modification (e.g. phosphorylation, acetylation etc.), modification of glycosylation (e.g. adding, removing or altering glycosylation) and/or inclusion of additional amino acid sequences as is understood in the art.

[0204] Additional amino acid sequences may include fusion partner amino acid sequences which create a fusion protein. By way of example, fusion partner amino acid sequences may assist in detection and/or purification of the isolated fusion protein. Non-limiting examples include metal-binding (e.g. polyhistidine) fusion partners, maltose binding protein (MBP), Protein A, glutathione S-transferase (GST), fluorescent protein sequences (e.g. GFP), epitope tags such as Myc, FLAG and haemagglutinin tags.

[0205] For the particular purpose of fusion polypeptide purification by affinity chromatography, relevant matrices for affinity chromatography include glutathione-, amylose-, and nickel- or cobalt conjugated resins respectively. Many such matrices have been made available in kit form, such as the QIAexpress™ system (Qiagen) useful with (HIS6) fusion partners and the Pharmacia GST purification system.

[0206] Preferably, the fusion partners also have protease cleavage sites, such as for Factor X or Thrombin, which allow the relevant protease to partially digest the fusion polypeptide of the invention and thereby liberate the recombinant polypeptide of the invention therefrom. The liberated polypeptide can then be isolated from the fusion partner by subsequent chromatographic separation.

[0207] Other protein derivatives include, but are not limited to, modification to amino acid side chains, incorporation of unnatural amino acids and/or their derivatives during peptide, polypeptide or protein synthesis and the use of crosslinkers and other methods which impose conformational constraints on the isolated protein, fragments and variants disclosed herein.

[0208] In embodiments, the isolated protein of this aspect is of a protein classification selected from: cytochrome c oxidase subunit 1; ATP synthase subunit 6; NADH dehydrogenase; NADH dehydrogenase subunit 4; cytochrome c oxidase subunit 2; NADH dehydrogenase subunits 2, 5; cytochrome b; NADH dehydrogenase subunit 6; cytochrome c oxidase subunit 3; V-SNARE; DNA polymerase zeta; mRNA splicing factor; ubiquitin-conjugating enzyme E2-binding protein; transcription coactivator protein; phosphoenolpyruvate carboxykinase; mercaptopyruvate sulfurtransferase/thiosulfate sulfurtransferase; HLH transcription factor EBF/Olf-1; peptidase S9; capl-related protein; C4-type Zn-finger protein; endonuclease MUS81; p-loop containing nucleoside triphosphate hydrolase protein; inorganic phosphate transporter; nuclear AAA ATPase (VCP subfamily); leucine-trna ligase; xanthine uracil permease; basic-leucine zipper domain protein; DNA-binding centromere protein B (CENP-B); dimeric dihydrodiol dehydrogenase; pre-mRNA splicing factor prp1; ATP-dependent clp protease proteolytic subunit; myosin 5; MYND Zn-finger protein; splicing factor 3b, subunit 2; OCH1; phosphoinositide phosphatase; ATP synthase subunit mitochondrial kinase-like protein; small molecule transporter protein; B-block binding subunit of TFIIIC; pre-mRNA-splicing factor clf1; transcriptional regulator protein; DnaJ superfamily molecular chaperone; atypical pikk frap protein kinase; 1,4-alpha-glucan branching enzyme/starch branching enzyme II; cyclin-dependent kinase regulatory subunit; heat shock protein 60; FOG protein; density-regulated protein related to translation initiation factor 1 (eIF-1/SUI1); CDC12-septin; MRG-domain-containing protein; mitochondrial cytochrome b2; eukaryotic translation initiation factor 2 subunit alpha; Zn-finger protein; DNA mismatch repair protein; ATPase; RNA polymerase II, subunit POLR2C/RPB3; ATP-dependent metallopeptidase HFL; sexual differentiation process protein ISP4; extracellular protein SEL-1; nucleic acid-binding, OB-fold protein; dead-domain-containing protein; 60s ribosomal protein 121; protein phosphatase; regulatory subunit PPP1R3C/D; ATP-dependent RNA helicase dhx8; RmlC-like jelly roll fold protein; white collar 1 protein; UV radiation resistance associated protein; SAP family cell cycle dependent phosphatase-associated protein; exosomal 3′-5′ exoribonuclease complex, subunit Rrp44/Dis3; ABC transporter; peptidase M28; delta 9 fatty acid desaturase; microtubule binding protein; DNA replication factor large subunit; beta and beta-prime subunits of DNA dependent RNA-polymerase; aspartate-semialdehyde dehydrogenase; metalloexopeptidase; acyl-oxidase; E3 ubiquitin ligase; TPR repeat-containing protein; peroxisomal half ABC transporter; nucleosome assembly protein; mRNA cleavage and polyadenylation factor II complex, subunit CFT2 (CPSF subunit); inositol polyphosphate multikinase, component of the ARGR transcription regulatory complex; ATP-dependent RNA helicase DBP5; SMAD/FHA domain; RNA polymerase II transcription initiation/nucleotide excision repair factor TFIIH, subunit TFB2; immunoglobulin-like; pre-mRNA splicing factor; g-protein alpha-subunit; F-box protein containing LRR; DRIM (down-regulated in metastasis)-like proteins; acid phosphatase; extracellular matrix glycoprotein Laminin subunits alpha and gamma; GTP-binding protein ypt1; DNA repair protein; mRNA (guanine-n7-)-methyltransferase; ataxia telangiectasia protein; ornithine decarboxylase antizyme; aldo/keto reductase family proteins; spermidine/spermine synthases family; membrane protein; high-affinity cell membrane calcium channel; WD40/YVTN repeat-like-containing domain; Golgi apparatus membrane protein TVP23; conserved hypothetical protein CHP02453; AAA-type ATPase; HSP20-like chaperone; pantothenate kinase PanK; mediator complex, subunit Med4; M13 family peptidase; Ca-transporting ATPase; histone tail methylase containing SET domain; ribonuclease iii; zinc finger, RING-type; 40s ribosomal protein s15; nuclear export receptor crml; voltage-gated chloride channel; phosphatidylinositol 4-kinase; geranylgeranyl pyrophosphate synthase; membrane coat complex retromer, subunit VPS5/SNX1; iron permease FTR1; t-complex protein alpha subunit (tcp-1-alpha); short chain-type dehydrogenase; polyadenylation factor I complex, subunit, Yth1 (CPSF subunit); lipase; RNA polymerase III, subunit C34; cytoplasm protein; plant ascorbate peroxidase; lysine-tRNA ligase; retrotransposon tyl-copia subclass; GTP-binding protein; ring finger protein; cytochrome b5; tetraspanin/peripherin; snf2 family amino-terminal protein; arginyl-tRNA synthetase; dihydropteroate synthase; START-like domain protein; WD40 repeat-containing protein; alanine-tRNA ligase; protein kinase essential for the initiation of DNA replication; palp-domain-containing protein; arginase deacetylase; ATP-NAD kinase; fumarate reductase; peptidase c1b bleomycin hydrolase; cytochrome c oxidase, subunit IV/COX5b; 1-aminocyclopropane-1-carboxylate synthase, and related proteins; endosomal p24a protein; sirtuin 4 and related class II sirtuins (SIR2 family); protein-tyrosine/dual specificity phosphatase; calcineurin responsive transcription factor przl; acyl-n-acyltransferase; maintenance of telomere capping protein 1, Mtcl; beta-1,6-N-acetylglucosaminyltransferase; Zn(2)-C6 fungal-type DNA-binding domain; nuclear pore complex, Nup155 component; E3 ubiquitin protein ligase; transmembrane protein; major facilitator superfamily domain, general substrate transporter; protein kinase; glucosyltransferase-Alg8p; Golgi-associated protein/Nedd4 WW domain-binding protein; origin recognition complex, subunit 1; cysteine proteinase; related to C2H2 zinc finger protein FLBC; C-14 reductase; hydroxymethylglutaryl-CoA reductase; RNA polymerase II transcription initiation/nucleotide excision repair factor TFIIH, subunit TFB4; microfibrillar-associated protein MFAP1; tetratricopeptide-like helical; SNF2-family ATP dependent chromatin remodeling factor SNF21; arsenical pump-driving atpase; guanylate kinase; fatty acid-2 hydroxylase; sucrose transporter; RNA polymerase I termination factor, MYB superfamily; ferredoxin/adrenodoxin reductase; WD40 repeat-like protein; HSP90 co-chaperone CNS1 (contains TPR repeats); RhoGEF GTPase; vacuole import and degradation protein; mitochondrial Fe2 transporter MMT 1 and related transporters (cation diffusion facilitator superfamily); glycoside hydrolase, superfamily; CLASP N-terminal domain; pinin/SDK/MemA protein; G protein-coupled receptor, rhodopsin-like; histone deacetylase clr6; methylase protein; and RAB protein geranylgeranyltransferase component A.

[0209] It will be appreciated that the preceding protein classifications correspond to proteins encoded by one or more nucleotide sequences as herein described with reference to Examples 1 and 2 and Tables 12 and 13.

[0210] In some embodiments, the isolated protein of this aspect is of a protein classification selected from: short-chain dehydrogenase; deoxyribodipyrimidine photolyase/cryptochrome; nuclear transport factor 2; 60s ribosomal protein 132; armadillo/beta-catenin-like repeat-containing protein; 60s ribosomal protein 110a; pyridoxamine 5′-phosphate oxidase-like, FMN-binding domain; glutaredoxin-related protein; glycosyl transferase, family 8-glycogenin; mitochondrial carrier; nucleosome assembly protein; sterile alpha motif, type 2; snare protein ykt6; UDP-glucose dehydrogenase; predicted translation factor, contains W2 domain; G-protein beta subunit-like protein; heat shock protein HSS1; 40s ribosomal protein s7; ATP synthase f1 beta subunit; catalase 1; stress responsive alpha-beta barrel; cytokinin riboside 5′-monophosphate phosphoribohydrolase LOG; EF-hand domain pair; 20s proteasome subunit; ferrochelatase; glycine hydroxymethyltransferase; carboxypeptidase s; NADH-ubiquinone oxidoreductase 304 kDa subunit precursor; phytoene dehydrogenase; ribosomal protein L49/IMG2; nop10p-domain-containing protein; thioredoxin/protein disulfide isomerase; predicted dehydrogenase; 6-phosphogluconate dehydrogenase; NADH-dehydrogenase (ubiquinone); COPII vesicle protein; ornithine aminotransferase; ER-associated protein catabolism-related protein; isocitrate dehydrogenase; AAA atpase; probable NADP-dependent dehydrogenase acting on 3-hydroxy acids; CNDP dipeptidase; actin-related protein Arp2/3 complex, subunit ARPC2; branched-chain amino acid aminotransferase ii; carbon-nitrogen hydrolase; aspartate aminotransferase; NADPH oxidase; 26s proteasome subunit p45; pre-mRNA-splicing factor rsel; porphobilinogen deaminase; prolyl oligopeptidase; ABC transporter; 40s ribosomal protein s9; polyadenylate-binding protein; ATP-dependent RNA helicase dhx8; fatty acid synthase complex subunit alpha; glycosyltransferase family 35 protein; WD repeat protein; heat shock protein 60; succinate dehydrogenase; translocase of outer mitochondrial membrane complex, subunit TOM70/TOM72; nucleic acid-binding protein; nucleotide excision repair factor NEF2, RAD23 component; t-complex protein alpha subunit (tcp-1-alpha); k506-binding protein 2; aromatic amino acid aminotransferase; adenylate kinase; alpha-aminoadipate reductase lys1p; coatomer protein subunit alpha; 40s ribosomal protein s21; carbamoyl-phosphate synth; histone acetyltransferase SAGA, TRRAP/TRA1 component, PI-3 kinase superfamily; SAM-dependent RNA methyltransferase; related to 2-hydroxy-3-oxopropionate reductase; transcriptional coactivator p100; 60s ribosomal protein 113a; ornithine carbamoyltransferase; eukaryotic translation initiation factor 5b; aconitate hydratase; RNA 2-o-methyltransferase fibrillarin; t-complex protein beta subunit (tcp-1-beta); voltage-dependent ion-selective channel; coatomer beta subunit; succinate-ligase (adp-forming); carbamoyl-phosphate synthase; related to ste23-metalloprotease involved in a-factor processing; microtubule binding protein; pyridoxalphosphate-dependent enzyme/predicted threonine synthase; fact complex subunit SPT16; SLY1 vesicle trafficking secl-like protein; cytoplasm protein; NADH dehydrogenase; phosphoglycerate kinase; arm repeat-containing protein; ribonuclease III domain; GTP binding protein 4; peptidyl-prolyl cis-trans isomerase b; Translation initiation factor 4F, ribosome/mRNA-bridging subunit (eIF-4G); eukaryotic polypeptide chain release factor 3; asparagine synthase (glutamine-hydrolyzing); splicing factor U2AF, large subunit (RRM superfamily); NADH-cytochrome b5 reductase; histidine biosynthesis trifunctional-protein; Enoyl-CoA hydratase; alcohol; imidazoleglycerol phosphate synthase; thioredoxin-like fold; ef-hand; electron-transferring-flavoprotein dehydrogenase; MDF1-domain-containing protein; transcription factor IIS, N-terminal; heat shock protein 70; pyruvate carboxylase; homoaconitate hydratase; uncharacterized conserved coiled-coil protein; alternative splicing factor SRp55/B52/SRp75 (RRM superfamily); eukaryotic translation initiation factor 3 subunit 7; threonyl-trna synthetase; RmlC-like jelly roll fold; 60s ribosomal protein 120; mRNA splicing factor; pre-mrna-processing protein 45; atp-dependent rma helicase rrp3; dihydrolipoyllysine-residue acetyltransferase; Acyl-CoA synthetase; ribosomal protein S5; phenylalanyl-tRNA synthetase subunit beta; wd40 repeat-like protein; vacuolar ATP synthase subunit d; phosphatidylserine decarboxylase; vigilin; RNA recognition motif domain; plasma membrane h( )-atpase 1; RRM motif-containing protein; predicted GTPase-activating protein; F1-ATP synthase assembly protein; acetyl-hydrolase; peptidyl-prolyl cis-trans isomerase; antiviral helicase; acetyl CoA carboxylase; age pka protein kinase; ATP-dependent RNA helicase pitchoune; Microtubule-associated protein; cell-cycle nuclear protein, contains WD-40 repeats; phosphoserine aminotransferase; vacuolar protein sorting-associated protein; GMP synthase; translational regulator gcn20-like abc transporter; GDP-mannose pyrophosphorylase; acetyl CoA acyltransferase 2; phosphoketolase; delta 12 fatty acid desaturase; vacuolar protein 8; predicted haloacid-halidohydrolase and related hydrolases; class iii adh enzyme; t-complex protein 1; isocitrate lyase; atpase; 6-phosphogluconolactonase; mitochondrial inner membrane protein; t-complex protein 1 subunit delta; adaptor protein complex ap-1 gamma subunit; rRNA processing protein Rrp5; succinate:fumarate antiporter; predicted proline-serine-threonine phosphatase-interacting protein (PSTPIP); phospho-2-dehydro-3-deoxyheptonate aldolase; RNA-binding domain-containing protein; epsilon DNA polymerase; cullins; asparaginyl-tRNA synthetase; dihydroxy-acid dehydratase; SNARE protein SED5/Syntaxin 5; centromere microtubule binding protein cbf5; histidyl-trna synthetase; endoplasmic reticulum protein EP58, contains filamin rod domain and KDEL motif; 3-isopropylmalate dehydrogenase; Glycosyl transferase, family 1; eukaryotic translation initiation factor 3 subunit 6; phosphoglycerate mutase family; chromatin remodelling complex ATPase chain; predicted hydrolases or acyltransferases (alpha/beta hydrolase superfamily); NADH dehydrogenase subunits 2, 5, and related proteins; synaptobrevin-like protein; 40s ribosomal protein s6; ubiquitin C-terminal hydrolase UCHL 1; polyC-binding proteins alphaCP-1 and related KH domain proteins; nucleolar RNA-associated protein (NRAP); WD40 repeat-containing protein; pyruvate decarboxylase; RhoGEF GTPase; Ca2-dependent lipid-binding protein CLB1/vesicle protein vp115/Granuphilin A, contains C2 domain; molecular co-chaperone STI1; vacuolar H-ATPase V1 sector, subunit E; p-loop containing nucleoside triphosphate hydrolase protein; spliceosome subunit; microtubule-binding protein involved in cell cycle control; karyopherin (importin) beta 3; DNA-dependent RNA polymerase ii second largest subunit; coatomer subunit gamma; dehydrogenase kinase; mitochondrial pyruvate dehydrogenase el component beta subunit; glycoside hydrolase family 13 protein; NAD-specific glutamate dehydrogenase; mitochondrial 50s ribosomal protein 13; Ran GTPase-activating protein; FKBP-type peptidyl-prolyl cis-trans isomerase; 60s ribosomal protein 119; small nuclear ribonucleoprotein splicing factor; mannosyltransferase; dUTP pyrophosphatase; GST, gst; glutamate-trna ligase; mov34-domain-containing protein; mitochondrial nuclease; 1,4-benzoquinone reductase-like; thiamine biosynthetic bifunctional enzyme; protein of unknown function DUF3602; upf0041-domain-containing protein; 60s ribosomal protein 111; serine/threonine protein phosphatase 2A, regulatory subunit; argininosuccinate lyase; elongation factor 1 beta delta chain; bar-domain-containing protein; uridylate kinase; phosphatidylethanolamine n-methyltransferase; stomatin family protein; ubiquitin-conjugating enzyme; glycosyltransferase family 2 protein; signal recognition particle protein; B-cell receptor-associated protein and related proteins; RNA-binding S4 domain; Drebrins and related actin binding proteins; small gtpase-binding protein; gtp cyclohydrolase i; ps16 protein; predicted hydrolase related to dienelactone hydrolase; nuclear localization sequence binding protein; SWI SNF complex protein; GTP-binding protein ypt1; ATPase, F0 complex, subunit H; metal resistance protein ycf1; outer membrane protein, MIM1/TOM13, mitochondrial; ubiquitin-protein ligase molybdopterin-converting factor; GTP-binding protein; predicted mitochondrial carrier protein; 28 kda golgi snare protein; dead-domain-containing protein; trehalose-phosphate synthase (UDP-forming); ran protein binding protein; pkinase-domain-containing protein; ribosome recycling factor domain; phosphatase; nucleic acid-binding, GB-fold; ATP-dependent RNA helicase dbp5; mRNA export protein (contains WD40 repeats); protein phosphatase 2A regulatory subunit A and related proteins; glutaminyl-tRNA synthetase; prolactin regulatory element-binding protein/protein transport protein SEC12p; ribosome assembly protein; C4-type Zn-finger protein; exosomal 3′-5′ exoribonuclease complex subunit Rrp40; transcription regulator HTH, APSES-type DNA-binding domain; RIB7, arfC; 60s ribosomal protein 112; guanylate kinase; predicted membrane protein; glycerol-3-phosphate o-acyltransferase; cactin; translation initiation factor eif3 subunit; biotin holocarboxylase synthetase/biotin-protein ligase; 60s ribosomal protein 123; Inositol monophosphatase; RAS-domain-containing protein; maltase glucoamylase and related hydrolases, glycosyl hydrolase family 31; ribosomal protein S24/S35, mitochondrial, conserved domain; peptide methionine sulfoxide reductase; NAD-dependent formate dehydrogenase; molecular chaperone (DnaJ superfamily); immunoglobulin-like fold; translational repressor pumilio/PUF3 and related RNA-binding proteins (PUF superfamily); urease accessory protein; modular protein with glycoside hydrolase family 13 and glycosyltransferase family 5 domains; orotidine-5-phosphate decarboxylase; phosphoprotein/predicted coiled-coil protein; nucleosome remodeling subunit cafl nurf55 msi1; zinc finger, RING/FYVE/PHD-type; prefoldin subunit 6, KE2 family; thioredoxin h; ADF-like domain-containing protein; alcohol dehydrogenase, class V; 60s ribosomal protein 113; glycoside hydrolase family 3 protein; delta 9 fatty acid desaturase; predicted regulator of rRNA gene transcription (MYB-binding protein); regulator of ribosome synthesis; hexose transport-related protein; protein-histidine kinase; DNA-directed RNA polymerase II subunit I; inositol-3-phosphate synthase; protein transport protein sec22; taurine catabolism dioxygenase TauD/TfdA; ATPase inhibitor, IATP, mitochondria; glycoside hydrolase family 32 protein.

[0211] It will be appreciated that the preceding protein classifications correspond to proteins differentially expressed (based on proteomic analysis) in Xanthophyllomyces dendrorhous strain MYM0 relative to the wild-type strain, with reference to Example 3 and Tables 18 and 19.

[0212] In some typical embodiments, the isolated protein of this aspect is of a protein classification selected from: ferredoxin/adrenodoxin reductase; cytochrome; ATP synthase; NADH dehydrogenase; fatty acid desaturase; Acyl-CoA-oxidase; pantothenate kinase; polyphosphate multikinase; G protein-coupled receptor; and succinate dehydrogenase. In some typical embodiments, the isolated protein of a classification selected from ferredoxin/adrenodoxin reductase; mitochondrial cytochrome b2; cytochrome b; cytochrome c oxidase subunit 1; ATP synthase subunit 6; NADH dehydrogenase subunit 4; cytochrome c oxidase subunit 2; cytochrome c oxidase subunit 3; NADH dehydrogenase subunit 2; NADH dehydrogenase subunit 5; NADH dehydrogenase subunit 6; cytochrome c oxidase subunit 3; delta 9 fatty acid desaturase; Acyl-CoA-oxidase; pantothenate kinase PanK; geranylgeranyl pyrophosphate synthase; fumarate reductase; sucrose transporter; inositol polyphosphate multikinase, ARGR transcription regulatory complex component; G protein-coupled receptor, rhodopsin-like; succinate dehydrogenase; and ATP synthase subunit mitochondrial.

[0213] It will be appreciated that the preceding protein classifications correspond to proteins encoded by one or more nucleotide sequences in which variations considered of particular interest have been identified, with reference to Examples 1 and 2 and Tables 14 and 15.

[0214] A related aspect of the invention provides an antibody or antibody fragment that binds, or has been raised against, an isolated protein of the preceding aspect.

[0215] As used herein an “antibody” is or comprises an immunoglobulin. The term “immunoglobulin” includes any antigen-binding protein product of a mammalian immunoglobulin gene complex, including immunoglobulin isotypes IgA, IgD, IgM, IgG and IgE and antigen-binding fragments thereof. Included in the term “immunoglobulin” are immunoglobulins that are chimeric or humanised or otherwise comprise altered or variant amino acid residues, sequences and/or glycosylation, whether naturally occurring or produced by human intervention (e.g. by recombinant DNA technology).

[0216] Antibody fragments include Fab and Fab′2 fragments, diabodies, triabodies and single chain antibody fragments (e.g. scVs), although without limitation thereto. Typically, an antibody comprises respective light chain and heavy chain variable regions that each comprise CDR 1, 2, and 3 amino acid sequences. A typical antibody fragment comprises at least one light chain variable region CDR and/or at least one heavy chain variable region CDR.

[0217] Antibodies and antibody fragments as described herein may be polycolonal or more typically monoclonal. Monoclonal antibodies may be produced using the standard method as for example, described in an article by Kohler & Milstein, 1975, Nature 256, 495, or by more recent modifications thereof as for example described in Chapter 2 of Coligan et al, CURRENT PROTOCOLS IN IMMUNOLOGY, by immortalizing spleen or other antibody producing cells derived from a production species which has been inoculated with an isolated protein or a fragment thereof. It will also be appreciated that antibodies may be produced as recombinant synthetic antibodies or antibody fragments by expressing a nucleic acid encoding the antibody or antibody fragment in an appropriate host cell. Recombinant synthetic antibody or antibody fragment heavy and light chains may be co-expressed from different expression vectors in the same host cell or expressed as a single chain antibody in a host cell. Non-limiting examples of recombinant antibody expression and selection techniques are provided in Chapter 17 of Coligan et al, CURRENT PROTOCOLS IN IMMUNOLOGY and Zuberbuhler et al, 2009, Protein Engineering, Design & Selection 22 169.

[0218] In some embodiments, the antibody or antibody fragment is labelled. The label may be selected from a group including a chromogen, a catalyst, biotin, digoxigenin, an enzyme, a fluorophore, a chemiluminescent molecule, a radioisotope, a drug or other chemotherapeutic agent, a magnetic bead and/or a direct visual label.

[0219] It will be appreciated that the antibody or antibody fragment of this aspect may be used for the detection and/or purification of an isolated protein disclosed herein.

[0220] Another aspect of the invention provides a method of modifying a nucleic acid or protein, including a step of changing one or more nucleotides or amino acids of the nucleic acid or protein, to produce the isolated nucleic acid or the isolated protein of the preceding aspects.

[0221] In embodiments, the method of modifying the nucleic acid or protein according to this aspect is a method of mutagenizing the nucleic acid or protein, or a nucleic acid encoding the protein.

[0222] In some typical embodiments, the method according to this aspect includes a step of mutagenising a cell or an organism to induce mutations in the genetic material of the cell or organism, to thereby modify the nucleic acid or protein.

[0223] The cell may be prokaryotic cell, such as a bacterial cell. In some typical embodiments, the bacterial cell is a Paracoccus cell. The Paracoccus cell may be Paracoccus carotinifaciens.

[0224] The cell may be eukaryotic cell, such as a plant cell, an animal cell, an algal cell, and a fungal cell.

[0225] In some typical embodiments, the algal cell is a microalgae cell. The microalgae cell may be a Haematococcus cell. In embodiments, the Haematococcus cell is Haematococcus pluvialis.

[0226] In some typical embodiments of the fungal cell is a yeast cell. The yeast cell may be a Xanthophyllomyces cell. In some typical embodiments, the Xanthophyllomyces cell is Xanthophyllomyces dendrorhous.

[0227] The terms “mutant”, “mutation” and “mutated” are used herein generally to encompass synonymous, non-synonymous, conservative, and nonconservative nucleic acid base pair substitutions, deletions and/or insertions introduced into genetic material. For example, mutations may be introduced into chromosomal DNA and genomic DNA, RNA such as unspliced and spliced mRNA, tRNA and other forms of genetic material as are known in the art.

[0228] Mutagenesis of the genetic material of an organism may result in introduction of mutations in one or a plurality of nucleic acid molecules. Genome-wide mutagenesis of organisms is well-known in the art. In alternative embodiments, mutations can be introduced or induced by targeting specific loci or regions. It will be appreciated that gain-of-function and loss-of-function mutations may be achieved as a result of mutagenesis, although without limitation thereto.

[0229] Mutations may be induced or introduced using either non-specific methods such as random mutagenesis or alternatively by using specific methods such as targeted mutagenesis. Induced mutations may include single- or multiple-nucleotide substitutions, deletions and/or insertions, either alone or in combination. Mutagenesis methods of the present invention are inclusive of in vitro, in vivo and in situ methodology.

[0230] Chemical mutagenesis is a useful method of genome-wide random mutagenesis methods using alkylating agents such as ethylmethanesulfonate (EMS) and dimethyl sulfate (DMS) or other chemical mutagens such as ethidium bromide, formic acid, hydrazine, sodium bisulphite, and diepoxybutane.

[0231] Physical mutagenesis using physical mutagens as for example irradiation using ionising radiation (such as β, γ or X-ray radiation), UV irradiation and fast neutron irradiation of cells may also be used for genome-wide random mutagenesis. It will be appreciated by a person skilled in the art that the time and dosage of exposure of the cell or organism, to a mutagen is dependent on the cell, organism, and mutagen that is used and can be readily determined by a skilled person.

[0232] Mutations may be introduced into nucleic acids by random or site-directed mutagenesis as are well known in the art. Non-limiting examples of nucleic acid mutagenesis methods are provided in Chapter 8 of CURRENT PROTOCOLS IN MOLECULAR BIOLOGY Eds Ausubel et al., (John Wiley & Sons, Inc. 1995-2008).

[0233] Mutagenesis methods can also include incorporation of dNTP analogs into nucleic acids (Zaccolo et al., 1996, J. Mol. Biol. 255 589) and PCR-based random mutagenesis such as described in Stemmer, 1994, Proc. Natl. Acad. Sci. USA 91 10747 or Shafikhani et al., 1997, Biotechniques 23 304. It is further noted that PCR-based random mutagenesis kits have been made commercially available, such as the Diversify™ kit (Clontech).

[0234] Mutations produced by a nucleic acid sequence amplification-based technique may be introduced into the genetic material of a cell.

[0235] As used herein, a “nucleic acid sequence amplification technique” includes but is not limited to polymerase chain reaction (PCR) as for example described in Chapter 15 of CURRENT PROTOCOLS IN MOLECULAR BIOLOGY Eds. Ausubel et al. (John Wiley & Sons NY USA 1995-2001) strand displacement amplification (SDA); rolling circle replication (RCR) as for example described in International Application WO 92/01813 and International Application WO 97/19193; nucleic acid sequence-based amplification (NASBA) as for example described by Sooknanan et al. 1994, Biotechniques 17 1077; ligase chain reaction (LCR) as for example described in International Application WO89/09385 and Chapter 15 of CURRENT PROTOCOLS IN MOLECULAR BIOLOGY supra; Q-β replicase amplification as for example described by Tyagi et al., 1996, Proc. Natl. Acad. Sci. USA 93 5395 and helicase dependent amplification as for example described in International Publication WO 2004/02025.

[0236] Region-specific mutagenesis and directed mutagenesis using PCR may also be employed to construct nucleic acid mutants according to the invention. Oligonucleotide mediated (or site-directed) mutagenesis may also be used. A non-limiting example of oligonucleotide-mediated site-directed mutagenesis procedures to introduce small clusters of point mutations throughout a target region is provided in Ausubel et al., supra. Briefly, mutations are introduced into a sequence by annealing a synthetic oligo nucleotide containing one or more mismatches to the sequence of interest cloned into a single-stranded M13 vector. This template is grown in an Escherichia coli dut- ung- strain, which allows the incorporation of uracil into the template strand. The oligonucleotide is annealed to the template and extended with T4 DNA polymerase to create a double-stranded heteroduplex. Finally, the heteroduplex is introduced into a wild-type E. coli strain, which will prevent replication of the template strand due to the presence of apurinic sites (generated where uracil is incorporated), thereby resulting in plaques containing only mutated DNA. It is also noted that site-directed mutagenesis kits have been made commercially available, such as the QuikChange™ kit (Stratagene).

[0237] Alternatively, linker-scanning mutagenesis of DNA may be used to introduce clusters of point mutations throughout a sequence of interest that has been cloned into a plasmid vector. For example, reference may be made to Ausubel et al., supra, (in particular, Chapter 8) which describes a first protocol that uses complementary oligonucleotides and requires a unique restriction site adjacent to the region that is to be mutagenised. A nested series of deletion mutations is first generated in the region. A pair of complementary oligonucleotides is synthesised to fill in the gap in the sequence of interest between the linker at the deletion endpoint and the nearby restriction site. The linker sequence provides the desired clusters of point mutations as it is moved or ‘scanned’ across the region by its position at the varied endpoints of the deletion mutation series.

[0238] Mutations may also be induced or introduced by insertion of one or a plurality of nucleotides or base pairs into the genetic material. Transposon and retrotransposon mutagenesis (for example as described in Walbot 2000, Curr Opin Plant Biol 3 103; U.S. Pat. No. 6,720,479; Voytas 1996, Genetics 142 569) are possible methods for insertional mutagenesis. Other methods of insertional mutagenesis include targeted methods such as homologous recombination and site-specific recombination. A non-limiting example of homologous recombination is the T-DNA system (for example as described in Wang et al. 2001, Gene 272 249; and Iida & Terada 2005, Plant Mol. Biol. 59 205). An example of site-specific recombination is the cre-lox recombination system of bacteriophage P1. Chimeric RNA/DNA oligonucleotide-directed gene targeting is also a useful technique for the generation of site-specific point mutations such as deletions, insertions and/or base changes in higher organisms including plants (see for example as described in Iida & Terada, 2005, Plant Mol. Biol. 59 205; and Rice et al., 2000, Plant Physiol, 123 427).

[0239] Mutations may also be introduced by deletional mutagenesis of one or a plurality of nucleotides, or a region of a genetic locus. For example, fast neutron deletion mutagenesis can be effective for genome-wide deletional mutagenesis method and utilises fast neutron bombardment to create randomly mutagenised populations, and more particularly knockout mutations such as described Li et al., 2002, Comp. Funct. Genomics 3 158. It will be appreciated that targeted deletional mutagenesis may be achieved by using a variety of other nucleic acid-based mutagenesis methods as herein described, such as, but not limited to oligonucleotide-based mutagenesis.

[0240] Targeting Induced Local Lesions in Genomes (‘TILLING’) is particularly amenable for random mutagenesis to generate point mutations in many organisms. TILLING combines traditional chemical mutagenesis following by high-throughput screening for point mutations. Reference is made to McCallum et al., 2000, Nat. Biotechnol. 18 455; Till et al., 2003, Methods Mol. Biol. 236 205; Henikoff et al., 2004, Plant Physiol. 135 630; and Till et al., 2003, Genome Res. 13 524 for non-limiting examples of TILLING methods that may be applicable to the present invention.

[0241] In certain embodiments, mutations are introduced into the genetic material of a cell or organism via “genome editing”.

[0242] “Genome editing” is a method for mutagenesis in which DNA is inserted, substituted, modified, or deleted from the genetic material of an organism in a targeted manner, typically using engineered nucleases.

[0243] Methods for genome editing include ‘zinc finger nuclease’ methods, as described for example by Miller et al., 2007, Nat. Biotech. 25 778; ‘CRISPR Cas’ methods, as described for example by Cong et al., Science 339 819; and ‘TALEN’ methods, as described for example by Bedell et al., Nature 491, 114.

[0244] As will be understood by those skilled in the art, genome editing typically comprises the transformation of a cell or tissue with one or more genetic constructs facilitating the expression of:
[0245] (i) one or more DNA nucleases; and
[0246] (ii) one or more molecules that guide the cleavage of DNA at a targeted region within the genetic material of an organism by said nuclease(s).

[0247] Targeted DNA breaks are thereby induced in the genetic material of the organism. These targeted DNA breaks are generally double stranded DNA breaks, although without limitation thereto.

[0248] In embodiments of genome editing wherein a zinc finger nuclease method is used, the one or more molecules that guide the cleavage of DNA at a targeted region within the genetic material of an organism by the nuclease(s) are proteins comprising a zinc finger DNA-binding domain. Generally, a plurality of the proteins are fused to the nuclease (s), and the plurality of zinc finger DNA-binding domains of the proteins bind with at least partial specificity to the targeted region, and thereby induce cleavage of the targeted region by the nuclease (s).

[0249] In embodiments of genome editing wherein a TALEN method is used, the one or more molecules that guide the cleavage of DNA at a targeted region within the genetic material of an organism by the nuclease(s) are proteins comprising a transcription activator-like effector DNA-binding (‘TALE’) domain. Generally, a plurality of the proteins are fused to the nuclease (s), and the plurality of TALE DNA-binding domains of the proteins bind with at least partial specificity to the targeted region, and thereby induce cleavage of the targeted region by said nuclease(s).

[0250] In embodiments of genome editing wherein a CRISPR/Cas method is used, the nuclease is a CRISPR-associated (‘Cas’) nuclease, and the one or more molecules that guide the cleavage of DNA at a targeted region is a “guide” RNA molecule (or ‘gRNA’) with homology to the targeted region. Generally, the gRNA molecule forms a complex with the Cas nuclease and guides binding of the Cas nuclease to the targeted region with at least partial specificity, and thereby induces cleavage of the targeted region by the Cas nuclease.

[0251] It will be further understood that targeted DNA breaks induced during genome editing can facilitate non homologous end joining or homology-dependent repair.

[0252] “Non-homologous end joining” is a cellular mechanism for DNA break repair wherein cleaved DNA ends are ligated, which is typically ‘error prone’, i.e. introduces nucleotide sequence variation, e.g. insertions or deletions, at the site of the DNA break. DNA breakage followed by error-prone non-homologous end joining induced by genome editing can be used to inactivate targeted regions within the genetic material of organisms (as described for example by Gaj et al., 2013 Trends Microbiol. 31 397).

[0253] “Homology-dependent repair” is a cellular mechanism for DNA break repair wherein a nucleic acid possessing homology to the region surrounding a DNA break is used as a template for repair of the DNA break. Genome editing can be used to introduce nucleic acid variants into targeted regions within the genetic material of organisms (as described for example by Gaj et al., 2013 Trends Microbiol 31 397) by inducing DNA breakage followed by homology-dependent repair in the presence of a ‘donor molecule’, wherein said donor molecule comprises homology to the region surrounding the DNA break.

[0254] As will be understood by those skilled in the art, genome editing comprising homology-dependent repair can be used for ‘allele replacement’, wherein a nucleic acid sequence of the genetic material of an organism is ‘substituted’, ‘exchanged’, or ‘replaced’ with a variant or variation of the nucleic acid sequence.

[0255] In some typical embodiments, the step of mutagenising a cell or organism to induce mutations in the genetic material of the cell or organism to thereby modify the nucleic acid or protein according to this aspect is a step of randomly mutagenising the cell using a chemical and/or physical mutagen.

[0256] In some typical embodiments, the chemical mutagen is or includes N-methyl-N′-nitro-N-nitrosoguanidine and/or ethyl methanesulfonate.

[0257] In some typical embodiments, the physical mutagen is or includes ultra violet light.

[0258] Another aspect of the invention provides a nucleic acid vector or construct comprising the isolated nucleic acid of the invention, and one or more additional nucleotide sequences. Typically, the genetic construct is in the form of, or comprises genetic components of, a plasmid, bacteriophage, cosmid, or yeast or bacterial artificial chromosome, as are well known in the art.

[0259] Genetic constructs may be suitable for maintenance and propagation of the isolated nucleic acid in bacteria or yeast or other host cells, for manipulation by recombinant DNA technology and/or expression of the nucleic acid or an encoded protein.

[0260] For the purposes of host cell expression, the genetic construct will be an expression construct. Suitably, the expression construct comprises one or more isolated nucleic acids or fragments disclosed herein operably linked to one or more additional sequences in an expression vector.

[0261] It will be understood that an “expression vector” may be either a self-replicating extra-chromosomal vector such as a plasmid, or a vector that integrates into a host genome.

[0262] By “operably linked” is meant that said additional nucleotide sequence(s) is/are positioned relative to the isolated nucleic acid, typically to initiate, regulate or otherwise control transcription.

[0263] In some embodiments, the additional nucleotide sequences are regulatory sequences. Regulatory nucleotide sequences will generally be appropriate for the host cell used for expression. Numerous types of appropriate expression vectors and suitable regulatory sequences are known in the art for a variety of host cells.

[0264] The one or more regulatory nucleotide sequences may include, but are not limited to, promoter sequences, leader or signal sequences, ribosomal binding sites, transcriptional start and termination sequences, translational start and termination sequences, and enhancer or activator sequences.

[0265] Constitutive or inducible promoters as known in the art may be used. The promoters may be either naturally occurring promoters, or hybrid promoters that combine elements of more than one promoter.

[0266] In some embodiments, the additional nucleotide sequence is a selectable marker gene to allow the selection of transformed host cells. Selectable marker genes are well known in the art and will vary with the host cell used.

[0267] The expression construct may also include an additional nucleotide sequence encoding a fusion partner (typically provided by the expression vector) so a protein of the invention is expressed as a fusion protein, as hereinbefore described.

[0268] By way of example only, an isolated protein of the invention may be produced by a method including the steps of:
[0269] (i) preparing an expression construct which comprises an isolated nucleic acid of the invention, operably linked to one or more regulatory nucleotide sequences;
[0270] (ii) transfecting or transforming a suitable host cell with the expression construct;
[0271] (iii) expressing a recombinant protein in said host cell; and
[0272] (iv) isolating the recombinant protein from said host cell.

[0273] Suitable host cells for expression may be prokaryotic or eukaryotic. For example, suitable host cells may be mammalian cells, plant cells, yeast cells, insect cells or bacterial cells. In some typical embodiments, the host cell for expression of an isolated protein according to the invention is a bacterial cell. In some typical embodiments, the host cell for expression of an isolated protein according to the invention is an algal cell. In some typical embodiments, the host cell for expression of an isolated protein according to the invention is a yeast cell.

[0274] Introduction of genetic constructs into host cells (whether prokaryotic or eukaryotic) is well known in the art, as for example described in CURRENT PROTOCOLS IN MOLECULAR BIOLOGY Eds. Ausubel et al, (John Wiley & Sons, Inc. 1995-2009), in particular Chapters 9 and 16.

[0275] Recombinant proteins may be conveniently prepared by a person skilled in the art using standard protocols as for example described in Sambrook, et al, MOLECULAR CLONING. A Laboratory Manual (Cold Spring Harbor Press, 1989), in particular Sections 16 and 17; CURRENT PROTOCOLS IN MOLECULAR BIOLOGY Eds. Ausubel et al, (John Wiley & Sons, Inc. 1995-2009), in particular Chapters 10 and 16; and CURRENT PROTOCOLS IN PROTEIN SCIENCE Eds. Coligan et al, (John Wiley & Sons, Inc. 1995-2009), in particular Chapters 1, 5 and 6.

[0276] It will further be understood that, in some typical embodiments, the vector or construct of this aspect is a gene silencing or gene regulating vector or construct.

[0277] It will be appreciated by the skilled person that gene silencing or gene regulating vectors or constructs of the invention are typically adapted to produce non-coding sequences with the capacity to silence or regulate gene expression. Typically, the non-coding sequences are “small RNA” sequences.

[0278] As used herein, “small RNA” will be understood to refer to small, non-coding RNA molecules that have the capacity to bind to and regulate the expression, translation and/or replication of other nucleic acid molecules. The skilled person is directed to Ipsaro, J. J., & Joshua-Tor, L., 2015, Nature Struc. & Mol. Biol. 22 20 for summary of small, non-coding RNA molecules.

[0279] It will be understood that, as used herein, the term small RNA encompasses all such molecules, regardless of the particular name that may be used in a scientific or research context. By way of non-limiting example, the skilled person will readily appreciate that, as used herein, the term small RNA encompasses small non-coding RNA molecules referred to as “miRNA” and “siRNA”.

[0280] It will be further understood that small RNA molecules generally have a high degree of nucleotide sequence identity with a nucleic acid molecule for which they have the capacity to bind to and regulate the expression, translation, and/or replication of However, it will also be understood that a small RNA molecule need not necessarily have 100% identity to such a sequence.

[0281] Nucleic acid vectors and constructs for gene silencing or regulation using small RNA molecules are widely available in a range of forms, as is well-known in the art.

[0282] In some typical embodiments, the gene silencing or gene regulating vector or construct is adapted for transformation of yeast. For a recent review of small RNA-based gene regulation for strain engineering in yeast, the skilled person is directed to Chen et al. Front. Bioeng. Biotechnol., 2 Jul. 2020 doi.org/10.3389/fbioe.2020.00731.

[0283] It will also be understood that, in some typical embodiments, the vector or construct of this aspect is a genome editing construct. Details of genome editing and constructs therefor is provided hereinabove.

[0284] In some typical embodiments, the editing construct is adapted for genome editing in yeast. For recent review of genome editing approaches in yeast, the skilled person is directed to Yang, Z., & Blenner, M. (2020). Genome editing systems across yeast species. Current Opinion in Biotechnology, 66, 255-266.

[0285] Another aspect of the invention provides a cell comprising the nucleic acid, protein, or vector or construct of the preceding aspects.

[0286] In some embodiments, the cell of this aspect is a prokaryotic cell. The prokaryotic cell may be a bacterial cell. The bacterial cell may be Gram-negative or Gram-positive. The bacterial cell may be aerobic, anaerobic, or facultatively anaerobic.

[0287] In embodiments, the bacterial cell is of the order Enterobacterales. In embodiments, the bacterial cell is of the family Enterobacteriaceae. In embodiments, the bacterial cell is of the genus Escherichia. In an embodiment, the bacterial cell is Escherichia coli.

[0288] In embodiments, the bacterial cell is of the order Caulobacterales. In embodiments, the bacterial cell is of the family Caulobacteraceae. In embodiments, the bacterial cell is of the genus Brevundimonas. In an embodiment, the bacterial cell is Brevundimonas vesicularis.

[0289] In embodiments, the bacterial cell is of the order Sphingomonadales. In embodiments, the bacterial cell is of the family Sphingomonadaceae. In embodiments, the bacterial cell is of the genus Sphingomonas. In an embodiment, the bacterial cell is Sphingomonas astaxanthinifaciens.

[0290] In embodiments, the bacterial cell is of the order Rhodobacterales. In embodiments, the bacterial cell is of the family Rhodobacteraceae. In embodiments, the bacterial cell is of the genus Paracoccus. In a typical embodiment, the Paracoccus cell is Paracoccus carotinifaciens.

[0291] In some typical embodiments, the cell is a eukaryotic cell. The eukaryotic cell may be selected from an animal cell, a plant cell, an algal cell, and a fungal cell.

[0292] The animal cell may be a marine animal cell. The animal cell may be a crustacean cell. In embodiments, the animal cell is prawn cell or shrimp cell. In embodiments, the animal cell is a krill cell.

[0293] The plant cell may be an angiosperm cell. The plant cell be a monocot or a dicot cell. The plant cell may be an algal cell. The algal cell may be a microalgae cell.

[0294] In embodiments, the plant cell is of the order Ranunculales. In embodiments, the plant cell is of the family Ranunculaceae. In a typical embodiment, the plant cell is of the genus Adonis. The plant cell may be of a species selected from Adonis aestivalis, Adonis aleppica, Adonis amurensis, Adonis annua, Adonis bobroviana, Adonis chrysocyathus, Adonis coerulea, Adonis Cyllene, Adonis davidii, Adonis dentata, Adonis distorta, Adonis flammea, Adonis macrocarpa, Adonis nepalensis, Adonis palaestina, Adonis pyrenaica, Adonis ramose, Adonis sibirica, Adonis sutchuenensis, Adonis tianschanica, Adonis vernalis, and Adonis volgensis.

[0295] In some embodiments, the algal cell is a microalgae cell. In embodiments, the microalgae cell is of the order Chlamydomonadales. In embodiments, the microalgae cell is of the family Haematococcaceae. In embodiments, the microalgae cell is of the genus Haematococcus. In a typical embodiment, the microalgae cell is Haematococcus pluvialis.

[0296] Typically, the cell is a fungal cell. More typically, the cell is a yeast cell.

[0297] In embodiments, the yeast cell is of the order Saccharomycetales. In embodiments, the yeast cell is of the family Saccharomycetaceae. In embodiments, the yeast cell is of the genus Saccharomyces. In an embodiment, the yeast cell is Saccharomyces cerevisiae.

[0298] In embodiments, the yeast cell is of the family Dipodascaceae. In embodiments, the yeast cell is of the genus Yarrowia. In an embodiment, the yeast cell is Yarrowia lipolytica.

[0299] In embodiments, the yeast cell is of the order Cystofilobasidiales. In embodiments, the yeast cell is of the family Cystofilobasidiaceae. In an embodiment, the yeast cell is of the genus Xanthophyllomyces. In a typical embodiment, the cell is Xanthophyllomyces dendrorhous.

[0300] A related aspect provides an organism comprising the cell of the preceding aspect. The organism may be any suitable organism inclusive of bacteria, plant, algae, animal, fungi, and yeast organisms.

[0301] In some typical embodiments, the organism is an algal strain. More typically, the organism is a yeast strain. Exemplary yeast strains according to this aspect include mutant strains MAMY3, MAMY6, MB18, MB24, MYM0, MYM6, MYM44, and MYM92 as described in Example 1.

[0302] It will be appreciated that the cell or organism according to this aspect may be a cell or organism produced according to the mutagenesis approaches for modifying nucleic acid or proteins as hereinabove described.

[0303] Another aspect of the invention provides a method of co-cultivating a cell or organism according to the preceding aspect with a further cell or organism. The further cell or organism may be any suitable cell or organism, including prokaryotic or eukaryotic cells and organisms. In some typical embodiments, the further cell or organism is an algal cell or organism. Typically, the algal cell or organism is a microalgae cell or organism. In a typical embodiment, the microalgae cell or organism is Haematococcus pluvialis.

[0304] Another aspect of the invention provides a method of producing astaxanthin including a step of expressing the isolated nucleic acid or the isolated protein of the preceding aspects, to thereby produce the astaxanthin.

[0305] The expression of the isolated nucleic acid or the isolated protein according to the method of this aspect may be in vitro expression, in vivo expression, or in situ expression. In embodiments, the isolated nucleic acid or isolated protein is expressed in a cell or organism, to thereby produce the astaxanthin. The cell or organism may be a prokaryotic, eukaryotic, animal, plant, algal, microalgal, fungal, or yeast cell or organism as set out in the preceding aspects. Typically, the cell or organism according to the method of this aspect is selected from a bacterial cell or organism, an algal cell or organism, a fungal cell or organism, and a yeast cell or organism.

[0306] In some typical embodiments, the method of this aspect includes a step of expressing the isolated nucleic acid or the isolated protein in a bacterial cell, to thereby produce the astaxanthin. In embodiments, the bacterial cell is a Paracoccus cell. The Paracoccus cell may be Paracoccus carotinifaciens.

[0307] In some typical embodiments, the method of this aspect includes a step of expressing the isolated nucleic acid or the isolated protein in a microalgae cell, to thereby produce the astaxanthin.

[0308] The microalgae cell may be a Haematococcus cell. In embodiments, the Haematococcus cell is Haematococcus pluvialis.

[0309] In some typical embodiments, the method of this aspect includes a step of expressing the isolated nucleic acid or the isolated protein in a fungal cell or, more typically, a yeast cell, to thereby produce the astaxanthin. The yeast cell may be a Xanthophyllomyces cell. Typically, the Xanthophyllomyces cell is Xanthophyllomyces dendrorhous.

[0310] In some typical embodiments, the astaxanthin is produced according to the method of this aspect at an increased or enhanced level or rate by expression of the isolated nucleic acid or isolated protein, as compared to a level or rate by expression of a corresponding wild-type nucleic acid or protein. Suitably, the corresponding wild-type nucleic acid or protein is a nucleic or protein of wild-type Xanthophyllomyces dendrorhous strain CBS 6938.

[0311] In some typical embodiments, the level or rate of expression of astaxanthin is increased or enhanced at least about 5%, 10%, 15%, 20%, 25%, 50%, 75%, 100%, 150%, 200%, 300%, 400%, 500%, 600%, 700%, 800%, 900%, 1000%, 1500%, 2000%, 3000%, 4000%, or 5000%, as compared to the level or rate by expression of the corresponding wild-type nucleic acid or protein.

[0312] Another aspect of the invention provides a method of producing astaxanthin including a step of performing metabolism with a cell or organisms expressing an isolated nucleic acid, isolated protein, or vector or construct as hereinabove described, to thereby produce the astaxanthin.

[0313] In embodiments, the cell or organism according to this aspect is a prokaryotic, eukaryotic, animal, plant, algal, microalgal, fungal, or yeast cell or organism as hereinabove described. More typically, the cell or organism according to the method of this aspect is selected from a bacterial cell or organism, an algal cell or organism, a fungal cell or organism, and a yeast cell or organism.

[0314] In some typical embodiments, the cell is a Paracoccus bacterial cell. More typically, the bacterial cell is a Paracoccus carotinifaciens cell.

[0315] In some typical embodiments, the cell is Haematococcus algal cell. More typically, the algal cell is a Haematococcus pluvialis cell.

[0316] In some typical embodiments, the yeast cell is a Xanthophyllomyces cell. More typically, the yeast cell is a Xanthophyllomyces dendrorhous.

[0317] Typically, the step of performing metabolism with the cell or organism according to this aspect to produce the astaxanthin is a step of performing fermentation with the cell or organism.

[0318] Typically, the method of this aspect includes a step of combining the cell or organism with one or more metabolites.

[0319] In some typical embodiments, the one or more metabolites comprise a nitrogen source metabolite. Typically, the nitrogen source metabolite is selected from urea, ammonium sulphate, yeast extract, malt extract, bactopeptone, and dried corn steep liquor. More typically, the nitrogen source metabolite is or comprises malt extract.

[0320] In some typical embodiments, the one or more metabolites comprise a carbon source metabolite. Typically, the carbon source metabolite is selected from molasses, glucose, glycerol, and sucrose. More typically, the carbon source metabolite is or comprises molasses.

[0321] In some typical embodiments, the astaxanthin is produced according to the method of this aspect at an increased or enhanced level or rate by metabolism with the cell expressing the isolated nucleic acid, isolated protein, or vector or construct, as compared to a level or rate by metabolism of a corresponding wild-type cell or organism. In some typical embodiments, the corresponding wild-type cell organism is, or is of, Xanthophyllomyces dendrorhous strain CBS 6938.

[0322] In some typical embodiments, the level or rate of expression of astaxanthin is increased or enhanced at least about 5%, 10%, 15%, 20%, 25%, 50%, 75%, 100%, 150%, 200%, 300%, 400%, 500%, 600%, 700%, 800%, 900%, 1000%, 1500%, 2000%, 3000%, 4000%, or 5000%, as compared to the level or rate by metabolism of the corresponding wild-type cell.

[0323] In relation to aspects of the invention that can result in increased or enhanced astaxanthin production as hereinabove described, it will be appreciated with reference to Example 1 and Example 2, that increases of astaxanthin production of approaching 50 times (i.e. 5000%) have been achieved using mutant Xanthophyllomyces dendrorhous strains of the invention.

[0324] Another aspect of the invention provides a non-astaxanthin by-product or secondary product of the method of the preceding aspect.

[0325] The skilled person will readily appreciate that cellular metabolism to produce astaxanthin will typically produce a variety of by-products. In embodiments, the by-product according to this aspect is a by-product of fermentation.

[0326] In a typical embodiment, the by-product according to this aspect is an invertase enzyme. The skilled person will appreciate that invertase converts sucrose to glucose and fructose, and is one of the most widely used enzymes in food industry. Invertase is industrially produced by yeast fermentation, such that it could be desirable to produce invertase in conjunction with astaxanthin using the method of the preceding aspect.

[0327] Another aspect of the invention provides a formulation comprising the cell (or part thereof), organism (or part thereof), astaxanthin, and/or by-product of the preceding aspects. The formulation will suitably include one or more other components inclusive of buffers, excipients, and diluents, and/or one or more additional active agents.

[0328] In some typical embodiments, the formulation of this aspect is a substantially dry formulation, such as a granular or powdered formulation. Typically, the substantially dry formulation comprises astaxanthin.

[0329] In some typical embodiments, the formulation of this aspect is a liquid or semi-liquid formulation, such as an aqueous or oil-based formulation. Typically, the liquid or semi-liquid formulation comprises astaxanthin.

[0330] In some typical embodiments, the formulation of this aspect is a solid or semi-solid formulation, such as an oleoresin or encapsulated oleoresin formulation. Typically, the solid or semi-solid formulation comprises astaxanthin.

[0331] In some typical embodiments, the formulation of this aspect, such as the substantially dry formulation, liquid or semi-liquid formulation, or solid or semi-solid formulation, comprises cell wall derivatives of the cell (such as the plant cell or more typically the yeast cell) of the cell or organism according to the invention as herein described.

[0332] The formulation of this aspect may be adapted for administration to or consumption by an animal.

[0333] In some typical embodiments, the formulation is adapted for administration to or consumption by a farmed animal. The farmed animal may be an aquaculture animal, typically a seafood aquaculture animal.

[0334] In some typical embodiments, the formulation is adapted for administration to or consumption by a pet animal, a domestic animal, or a companion animal. The pet animal, domestic animal, or companion animal may be a feline animal (e.g. cat), a canine animal (e.g. dog), or an equine animal (e.g. horse). The formulation may be a pet food formulation or the like.

[0335] In some typical embodiments, the formulation is adapted for administration to or consumption by a human. The formulation adapted for consumption by a human may comprise protein. In some typical embodiments, the formulation is an astaxanthin-supplemented protein formulation such as a protein bar, protein drink, or protein powder, or the like.

[0336] In some typical embodiments, the formulation of this aspect comprises beta-glucans.

[0337] In some typical embodiments, the formulation of this aspect comprises polyphenols.

[0338] Another aspect of the invention provides a method of supplementing an animal with the astaxanthin or formulation according to the preceding aspects.

[0339] In some typical embodiments of this aspect, the animal supplemented according to the method of this aspect is a farmed animal. Typically, the farmed animal is an aquaculture animal. Typically, the aquaculture animal is a crustacean or a fish. In some typical embodiments, the crustacean is selected from shrimp, krill, crab, and crayfish. In some typical embodiments, the fish is selected from salmon and trout. A related aspect provides a farmed animal product produced by or from a farmed animal, such as a seafood animal, supplemented according to the method of this aspect.

[0340] In some typical embodiments, the animal supplemented according to the method of this aspect is a pet animal, a domestic animal, or a companion animal. Typically, the pet animal, domestic animal, or companion animal is selected from a feline animal (e.g. domestic cat), a canine animal (e.g. domestic dog), and an equine animal (e.g. domestic horse).

[0341] In some typical embodiments, the supplemented animal is a human.

[0342] Another aspect of the invention provides a method of treating or preventing a disease or disorder in a subject, including a step of administering the astaxanthin or formulation according to the preceding aspects to the subject. Suitably, the subject is an animal subject. Typically, the animal subject is a human.

[0343] In some typical embodiments, the disease or disorder treated according to the method of this aspect is a wound. The method according to this aspect may be a method of treating, alleviating symptoms or, or controlling infection in a wound. The administration may be topical administration to the wound and/or oral administration to the subject.

[0344] A related aspect provides use of the astaxanthin, by-product, or secondary product according to the preceding aspect in the manufacture of a formulation, composition, or medicament for the treatment of a disease or disorder in a subject.

### EXAMPLES

### Example 1: Enhanced Astaxanthin Production in Mutant Xanthophyllomyces dendrorhous Strains

[0345] Astaxanthin (AX) is a potent antioxidant with increasing biotechnological and commercial potential as a feed supplement. AX is also known for giving salmonids and crustaceans their characteristic pink colour. The red yeast Xanthophyllomyces dendrorhous (previously known as Phaffia rhodozyma) naturally produces AX as its main fermentation product but wild-type strains and those previously generated through classical random mutagenesis produce relatively low yields of AX, such that existing strains do not meet desired commercial requirements.

[0346] This example describes X. dendrorhous CBS 6938 mutant strains generated through chemical and ultraviolet radiation mutagenesis in combination with screening, the strains exhibiting comparatively high AX production. Additionally, this example describes enhancement of mutant X. dendrorhous strain AX production using culture media optimization and fed-batch culture kinetic modelling. Under optimised conditions, an approximately 50-fold increase in AX production as compared to the wild-type strain has been achieved, with a total biomass of around 100 gDCW/L and a carotenoid production of 1 g/L.

[0347] This example further describes whole genome sequencing of eight X. dendrorhous mutant strains showing substantially increased AX production to identify genomic changes. Genomic variant analyses found 368 conserved mutations across the selected strains with notable mutations including those identified in regulators and catalysts of AX precursors in the mevalonate pathway, the electron transport chain, oxidative stress mechanisms, and carotenogenesis.

### Materials and Methods

### Strains, Media, and Growth Conditions

[0348] The wild-type strain of X. dendrorhous CBS 6938 was obtained from the CBS Fungal Biodiversity Centre culture collection. The strain was kept on agar plates at 4° C. for short term storage of up to one month or glycerol stock (glycerol 20%) at −80° C. for long term storage. YM media containing (g/L): yeast extract (3), malt extract (3), bactopeptone (5), and sucrose (20) as a carbon source was used for routine liquid culture and inoculum preparation. Agar (15 g/L) was supplemented to prepare YM agar plates. When specified, YM media was buffered with potassium hydrogen phthalate (20 g/L). For flask fermentations, 50 mL of liquid YM media in a 250 mL shake-flask was cultured on a rotary shaker at 250 rpm and 20° C. Flasks for fermentation were inoculated with a pre-culture growing at the mid-exponential phase by using 10% of inoculum at A600.

### Analytic Techniques

### Optical Density (A600)

[0349] The absorbance of cultures with X. dendrorhous was measured at 600 nm in a spectrophotometer. The sample was diluted within a range of 0.1-1 absorbance units.

### Dried Cell Weight

[0350] One to two millilitres of cells were vacuum filtered using a Millipore HAWP04700 filter (pore size of 0.45 μm and diameter of 47 mm) with the filter humidified with distilled water before filtrating the cells. The filter with filtered cells was then dried in an oven at 80° C. for 48 h and weighed. The difference between the weight of the filter with and without cells, and the volume taken as a sample, were used to calculate the dried cell weight, represented as gDCW/L.

### Total Carotenoids

[0351] The DMSO technique was used to determine the total carotenoids of samples (Sedmak et al., 1990). For this, 5-50 pL of sample was placed into a 2 mL Eppendorf tube and centrifuged at 14,000 rpm for 1 min, in which the supernatant was discarded and the pellet kept. The cells were then washed two times with distilled water. Next, 0.5 mL of heated DMSO at 55° C. was added to the pellet and vortexed for 30 s. To ensure total disruption, the cells were incubated for an additional five minutes at 55° C. and vortexed again for 30 sec. Next, 0.1 mL of 0.01 M sodium phosphate at pH 7 and 1 mL of 1:1 hexane:ethyl acetate was added, followed by vortexing for 30 s. The tube was then centrifuged at 14,000 rpm for 1 min to separate the solution into two phases. Finally, 0.7 mL of the organic phase (the phase on the top with the pigments) was transferred into a 700 pL Quartz Cuvette to measure absorbance at 480 nm. The total carotenoids were calculated with the following equation:

$$Total Carotenoids , \frac{u g}{L} = \frac{[ A 480 ] [ V 1 ] [ 1 E 1 {0}^{7} ]}{[ E ] [ L ] [ V 2 ]}$$

A480: Absorbance at 480 nm; V1: Volume of the organic phase, mL; E: Extinction coefficient of 2150; L: Length of the Quartz Cuvette (generally 1 cm); V2: Volume of the sample, mL.

### Hplc Analyses for Astaxanthin and Other Carotenoids

[0352] The samples were obtained using the DMSO extraction method for total carotenoid analyses. Samples and standards were diluted in hexane:ethyl acetate 1:1 (v/v) before injection of 30 pL. The column was a Luna® 3 pm Silica (2) 100 A, LC Column 150×4.6 mm (Phenomenex Cat. No. 00F-4162-E0). The column was equipped with a security guard cartridge holder (Phenomenex Cat. No. KJO-4282) and a security guard cartridge Silica 4×3 mm ID (Phenomenex Cat. No. AJO-4348) so as to extend lifespan. The mobile phase was a mixture of hexane:acetone (82:18, v/v) which was injected at a flow rate of 1.2 mL/min. The column temperature was ambient and carotenoids were detected in a UV/VIS detector at 474 nm. Standards of astaxanthin, p-Carotene, canthaxanthin, zeaxanthin, 9-cis-AX, 13-cis-AX were used to identify carotenoids in the sample. When required, the column was cleaned with 10 volumes each of hexane, methylene chloride, isopropanol, methylene chloride, and hexane:acetone (82:18, v/v). For water removal (when needed), the column was flushed with 60 mL of 2.5% of 2,2-dimethoxy propane, and 2.5% of glacial acetic in hexane. The column was stored in hexane or isopropanol.

### Carbon Source

### Glucose

[0353] The DNS method was used to measure the concentration of reducing sugars (Miller, 1959). The DNS solution consisted of (g/100 mL): DNS (1), NaOH (1.6), KOH (2.24), Na K Tartrate (30) to 100 mL of distilled water. The technique was adapted so as to be undertaken in microplates of 96-wells where 10 pL of each sample was placed into a 200 pL well of a PCR plate. Then 70 pL of water was added to each well. The blank used 80 pL of water. Next, 120 pL of the DNS solution was added to each well. This solution was centrifuged for 5 min at 4000 g and heated in a thermocycler for 5 min at 100° C. Finally, 170 pL was transferred into a 96-well plate to measure absorbance at 540 nm in a microplate reader. A linear growth curve of glucose (in a range of 0.1 to 10 g/L) was created and used to calculate the concentration of glucose in the sample in g/L.

### Sucrose

[0354] Sucrose was measured using the DNS technique, as for glucose. However, the sucrose was firstly inverted using an acid treatment where 10 pL of the sample was treated with 2 pL of HCl 37% at 90° C. for 5 min. To neutralise the solution, 5 pL of NaOH 10 M was added. After the inversion, the technique was performed as for glucose. The concentration of sucrose was calculated using a linear curve in the linear range of 0.1 to 10 g/L.

### Mutagenic and Screening Methods

### Mutagenic Technique Using N-Methyl-N′-Nitro-N-Nitrosoguanidine (NTG)

[0355] Cells growing at the mid-exponential phase were washed twice with citrate buffer 0.1 M at pH 5.5. The cells were then treated with NTG at 0.1 g/L (dissolved in citrate buffer) for 30 min. These treated cells were then washed twice with a phosphate buffer 0.1 M at pH 7. Before plating on YM agar plates, treated cells were incubated on YM media on a rotary incubator at 20° C. and 250 rpm for 3 h. The plated cells were incubated at 20° C. for seven days. Cells with an increased red-colour were selected and the NTG treatment repeated. This protocol was performed until any increasing concentration of the red colour was no longer observed.

### Mutagenic Technique Using UV-Light

[0356] Cells growing at the mid-exponential phase were washed twice with a phosphate buffer 0.1 M at pH 7 and centrifuged at 4000 rpm for 5 min. Cells adjusted to an A₆₀₀ of 0.3, and 5 mL were placed in a plate and treated with the UV-light source of a biosafety cabinet for 10 min.

### Mutagenic Technique Using Ethyl Methyl Sulfonate (EMS)

[0357] Cells growing at the mid-exponential phase were washed twice with a phosphate buffer 0.1 M at pH 7. Cells were centrifuged at 4000 rpm for 5 min. Cells were adjusted to an A₆₀₀ of 0.3, and 5 mL were resuspended in the same buffer containing 4% EMS and treated for 2 h. Finally, treated cells were washed twice with the phosphate buffer and subjected to further screening analyses.

Screening Methods with Selective Pressure

[0358] Cells treated with the different mutagenic agents were incubated for 3 h in YM media at 20° C. and plated YM agar plates supplemented with 1 mM β-ionone (Bon et al., 1997), 75 pM diphenylamine (Chumpolkulwong et al., 1997), or 50 pM of antimycin A (Sigma Cat. No. A8674) (An et al., 1989). To perform screening with fluorescence activated cell sorting (FACS), treated cells were grown in a buffered YM media, stressed with 20 mM H₂O₂ after 1 day of incubation, supplemented with 20 g/L of sucrose after 3 days of incubation and allowed to grow for an additional 3 days.

[0359] Screening and selection of putatively superior strains using FACS was performed as described in Ukibe et al., 2008. Initially, the BD FACS Aria II flow cytometer, equipped with an ion laser emitting at 488 nm, was used to select putatively superior strains. Before analyses, cells were washed twice with a 10 mM potassium phosphate buffer (pH 7.4) and filtered through a 40 mm nylon mesh and placed into a 5 mL polystyrene 12×75 mm tube (BD Cat. No. 352063). Florescence emissions were measured in two channels at wavelengths of 490-550 nm and 665-685 nm. In further screenings, the cells were screened in a BD FACS ARIA III Cell Sorter using a yellow-green laser excited to 561 nm and a blue laser excited to 488 nm. The forward scatter signal (FS), side scatter signal (SC), and fluorescence intensities were measured simultaneously. Fluorescence emission was measured at 670/14 nm and 530/30 and cells with the highest fluorescence were collected in YM sterile medium. Sorted cells were then plated in YM plates and incubated for 7 days at 20° C. In all strategies, colonies with an increased red colour were selected for further analyses.

### High Throughput Screening

[0360] Selected colonies were cultivated in 24 deep well plates (Axygen Cat. No. AX-P-DW-10ML-24-C) with 3 mL of YM buffered culture media in each well. The plates were covered with breathable paper (Axygen Cat. No. AX-BF-400-S-1) to allow the exchange of gasses. The plates were incubated in a shaker incubator at 250 rpm and 20° C. for 6 days. The cells were stressed with 20 mM of H₂O₂ at day 1 of incubation and allowed to grow for an additional 2 days before being supplemented with 30 g/L of sucrose and allowed to grow for an additional 3 days.

### Culture Media Optimization

[0361] Nutritional requirements were studied in three steps. First, single factor designs were used to test the effect of different nitrogen and carbon sources. A response surface was then used to optimise the significant media components in a screening factorial design. Finally, a feeding profile was designed in a fed-batch culture to maximise AX production.

### Single Factor Design Experiments

[0362] The media composition to test nitrogen sources was made of (g/L): magnesium sulphate (1.5), monobasic potassium phosphate (1.5), and sucrose (20). Potassium hydrogen phthalate was used as a buffer (20 g/L). The pH was adjusted to 5.5 with NaOH 2 M. The nitrogen sources tested were (g/L): yeast extract (5), malt extract (5), bactopeptone (5), dried corn steep liquor (5), urea (2.14) and ammonium sulphate (4.71). The media to test different carbon sources was made of (g/L): ammonium sulphate (5), magnesium sulphate (1.5), monobasic potassium phosphate (1.5), yeast extract (3), dried corn steep liquor (5), and malt extract (3). Potassium hydrogen phthalate was used as a buffer (20 g/L). The carbon sources tested were sucrose, glucose, molasses, and glycerol.

### Statistical Experimental Design and Surface Response

[0363] An initial screening test was conducted with seven components of the culture media using a factorial design 2^{k-p} (k=factors=7; p=fractionation=4). The basal media to perform the design was made of (g/L): magnesium sulphate (1.5), calcium chloride (0.8), iron sulphate heptahydrate (0.019), and potassium hydrogen phthalate as a buffer (20). The media was supplemented with trace salts (mg/L): citric acid (15), ZnSO₄·7H₂O (5); CuSO₄·5H₂O (0.75); MnSO₄ (0.60); H₃BO₃ (0.60); Na₂MoO₄-2H₂O (0.60); KI (0.15), and vitamins (mg/L): vitamin B3 (Niacin) (3); vitamin B5 (Pantothenic acid) (4.5); vitamin B1 (Thiamine) (3); vitamin B6 (Pyridoxine) (0.3); vitamin B7 (Biotin) (0.18); p-aminobenzoic acid (1.8). The pH was adjusted to 5.5 with sodium hydroxide 2 M. The factors tested were bactopeptone (Low Level 1 g/L; High Level 3 g/L), malt extract (Low Level 1 g/L; High Level 3 g/L), yeast extract (Low Level 3 g/L; High Level 5 g/L), dried corn steep liquor (Low Level 2 g/L; High Level 5 g/L), potassium phosphate monobasic (KH₂PO₄) (Low Level 1 g/L; High Level 2 g/L), Sucrose (Low Level 20 g/L; High Level 30 g/L), or a vitamin cocktail (Low Level 1X; High Level 2X). Further optimization was performed using a Central Composite Design and Response Surface Methodology.

### Model Development for Fed-Batch Design

[0364] The model was first developed as a batch culture and then extrapolated to a fed-batch system. The parameters of the batch model were obtained from fermentations on flask culture using 10, 15, and 25 g/L in an optimised culture media. The model was developed on the following assumptions:
[0365] 1. Sucrose is the only limiting carbon source;
[0366] 2. There is no nitrogen limitation;
[0367] 3. The pH is known and controlled throughout the fermentation at pH=5.5.

### Batch Model

[0368] The differential mass balance equations (1) to (6) describe the dynamics of AX production in batch fermentation as follows:

$$\frac{d X}{d t} = uX ( biomass ) \qquad ( 1 )$$

$$\frac{d S}{d t} = - qsX ( sucrose ) \qquad ( 2 )$$

$$\frac{d P}{d t} = qpX ( carotenoids ) \qquad ( 3 )$$

$$u = u max ( \frac{S}{K s + S} ) {( \frac{1 - P}{K p} )}^{r h o} ( specific growth rate ) \qquad ( 4 )$$

$$qs = ( u / Yxs ) + ms ( Specific substrate rate ) \qquad ( 5 )$$

$$qp = ( α * u ) + β ( Specific production rate ) \qquad ( 6 )$$

[0369] Eq. (1) represents the growth rate and Eq. (4) its specific rate (μ). Eq. (2) represents the consumption rate of sucrose and Eq. (5) its specific rate. Eq. (3) represents the carotenoid expression and Eq. (6) its specific production rate that considers growth associated and non-associated production.

### Fed-Batch Model

[0370] The batch model was extrapolated to a fed-batch culture to design the feeding profile.

[0371] The fed-batch model is represented as equations (7) to (11) whereby a differential equation to represent volume (V) used to calculate the factor dilution (D) were added to the equations (1) to (3).

$$\frac{d X}{d t} = u X - DX ( biomass ) \qquad ( 7 )$$

$$\frac{d S}{d t} = - qsX + D ( S o - S ) ( sucrose ) \qquad ( 8 )$$

$$\frac{d P}{d t} = q p X - DP ( carotenoids ) \qquad ( 9 )$$

$$\frac{d V}{d t} = F ( volume ) \qquad ( 10 )$$

$$D = F / V ( factor dilution ) \qquad ( 11 )$$

[0372] In equation (8), So represents sugar concentration in the feeding solution. Equations (12) and (13) were used to design an exponential feeding profile:

$$F exp = F {o ( e )}^{u t} ( exponential feeding rate ) \qquad ( 12 )$$

$$Fo = ( \frac{u}{Yxs} ) ( X o ) ( Vo ) ( initial feeding rate ) \qquad ( 13 )$$

[0373] Where Xo and Vo represent the initial biomass and volume, respectively.

### Reliability of the Model

[0374] The coefficient of determination (R²) was used to determine the reliability of the model. The R² was calculated as follows:

$${R}^{2} = \frac{1}{m} {\sum }_{j = 1}^{m} ( 1 - \frac{SSE}{SST} )$$

$$SSE = {\sum }_{i = 1}^{n} {Δ}_{i}^{2}$$

$$SST = {\sum }_{i = 1}^{n} {( {y}_{i} - \overline{y} )}^{2}$$

$$\overline{y} = \frac{1}{n} {\sum }_{i = 1}^{n} {y}_{i}$$

### Parameter Estimation of the Model

[0375] The model parameters were obtained from batch fermentations at different initial carbon sources. The package SBPDgui of the System Biology Toolbox 2 (SBTOOLBOX2) (Schmidt and Jirstrand, 2006) was used to determine the model parameters.

### Instrumented Fermenters

[0376] Laboratory optimization of AX production in X. dendrorhous was performed in a 2 L Biostat A fermenter. The fermenter was configured with 2 six-blade Rushton impellers with a diameter of 5 cm, three baffles, one ring sparger, and ports for acid, base, antifoam, feeding solution, and sampling. The fermenters were equipped with probes and controllers of pH, dO₂, temperature, and antifoam to measure and control these parameters, respectively. Optimal fermenter conditions were as follows: the fermenter was inoculated using a 10% inoculum culture at an A₆₀₀ from 5 to 10 (cells growing at the mid-exponential phase). The pH was maintained at 5.5 using 12.5% of Ammonium Hydroxide or 2 M of sulphuric acid. The foam was controlled by adding Antifoam C (Sigma Cat. No. A8011). The temperature was controlled at 20° C. using a heater jacket or chiller. The dissolved oxygen was controlled at 70% of air saturation by using cascade changes in agitation (400-1200 rpm), air flow rate (0.4-5 VVM), or pure oxygen flow rate (0-0.5 VVM).

### Culture Medium for Fed-Batch Fermentation

[0377] The following media was used for high cell densities in fed-batch fermentations (BYM). The BYM media was made of (g/L): yeast extract (5), malt extract (5), monobasic potassium phosphate (5), magnesium sulphate (1.5), ammonium sulphate (4), FeSO₄·7H₂O (0.10), CaCl₂) (0.4), sucrose (20). The media was supplemented with trace salts (mg/L): citric acid (225); ZnSO₄·7H₂O (75); CuSO₄·5H₂O (11.25); MnSO₄ (9); H₃BO₃ (9); Na₂MoO₄·2H₂O (9); KI (2.25), and vitamins (mg/L): vitamin B3 (Niacin) (18.99); vitamin B5 (Pantothenic acid) (28.48); vitamin B1 (Thiamine) (18.99); vitamin B6 (Pyridoxine) (1.89); vitamin B7 (Biotin) (1.13); p-aminobenzoic acid (11.39).

### Feeding Solution and Feeding Strategy

[0378] The BYM 2X at 500 g/L of sucrose was used for the growth phase (0-3.5 days) of the fed-batch culture. The BYM 2X was made of (g/L): yeast extract (10), malt extract (10), monobasic potassium phosphate (10), FeSO₄·7H₂O (0.20), CaCl₂) (0.8), and sucrose (500). Carbon source and culture medium components were sterilised separately at 121° C. for 15 min. The media was supplemented with trace salts (mg/L): citric acid (345); ZnSO₄·7H₂O (5); CuSO₄·5H₂O (17.25); MnSO₄ (13.8); H₃BO₃ (13.8); Na₂MoO₄·2H₂O (13.8); KI (3.45), and vitamins (mg/L): vitamin B3 (Niacin) (30); vitamin B5 (Pantothenic acid) (45); vitamin B1 (Thiamine) (30); vitamin B6 (Pyridoxine) (3); vitamin B7 (Biotin) (1.8); p-aminobenzoic acid (18). The pH was adjusted to 5.5 with sodium hydroxide 2 M. From the 3.5 to 7 days of cultivation, the feeding solution consisted of sucrose at 800 g/L. The feeding strategy was designed using the kinetic model for a fed-batch culture. The feeding profile consisted of batch—fed-batch (exponential feed rate at 0.08 h⁻¹)—fed-batch (constant feeding rate at 4.16 mL/h)—batch.

### Genome Sequencing and Bioinformatics Analyses

### DNA-Sequencing

[0379] DNA was extracted using the YeaStar Genomic DNA Kit (Zymoresearch Cat. No. D2002) and quantified using the Nanodrop 1000 (Thermo Scientific) and Qubit dsDNA BR assay kit (Life Technologies Cat. No. Q32850). The DNA quality was determined by running a 1% agarose gel with a DNA gel stain SYBR safe (Life Technologies Cat. No. S33102). The gel was visualised using a ChemiDoc MP system (Bio-Rad). The Illumina platform was used to sequence the genomes of nine strains (wild-type X. dendrorhous CBS 6938 and eight mutant strains). Sequencing was performed using MiSeq V3 600 Cycle 300 PE (Illumina Cat. No. MS-102-3003). Libraries were prepared using the Illumina Nextera XT library preparation kit (Illumina Cat. No. FC-121-2003).

### Bioinformatics

[0380] Sequenced genomes were analysed using the following bioinformatics tools. Firstly, FastQC was used to evaluate the quality of the Illumina reads (Andrews, 2010). Trimmomatic was then used to remove poor quality reads (Bolger et al., 2014). Assembly of reads was performed using a reference genome. For this step, Bowtie2 was used to align the reads against the publicly available genome X. dendrorhous CBS 6938 (accession ids in the European Nucleotide Archive: LN483084-LN483350) (Langmead and Salzberg, 2012; Sharma et al., 2015). Then, the Velvet genome assembly algorithm was used to assemble the reads (Zerbino, 2010). To objectively determine genome similarity, the genome-to-genome distance calculator (GGDC 2.0) was used to calculate the genome distance between two genomes (Auch et al., 2010). The TMHMM server 2.0 was used to predict transmembrane helix proteins (Krogh et al., 2001). Variant analyses was performed with GATK by using the recommended best practices for a non-model organism (Auwera et al., 2013; Kryvokhyzha, 2016). Here, BWA-MEM was used to align the Illumina reads against the published genome X. dendrorhous CBS 6938 (Li and Durbin, 2010; Sharma et al., 2015). In further filter analyses, the detected variants, namely SNPs and INDELs, were filtered out if the number of reads harbouring the mutation were below the total reads. BCFtools and Samtools were used to compare and manipulate the VCF files resulting from the variant analyses (Li et al., 2009). SnpEff was used to annotate the variants and SnpSift to filter them (Cingolani et al., 2012). IGV viewer was used for visualization (Thorvaldsdottir et al., 2013).

### Results

Mutant Strains with Enhanced Carotenoid Production

[0381] The wild-type X. dendrorhous CBS 6938 was submitted to recursive NTG mutagenic cycles and screening in YM plates until a visible plateau of pink-colour improvement was achieved. After four mutagenic cycles, a pool of the best strains was selected to perform further mutagenic cycles using either UV-light, EMS, or NTG, with different screening methods including fluorescence activated cell sorting, antimycin, (3-ionone, or diphenylamine (FIG. 1). From 187 selected strains, and after screening in deep-well liquid culture plates (see FIGS. 2-6), 15 strains were selected for testing in shake flask cultures: MYM0, MYM6, MAMY3, MAMY16, MAMY17, MDHA7, MDHA19, MYM19, MYM92, MB10, MB18, MB24, MYM42, MYM44, MYM66, and MYM8. FIG. 7 demonstrates that carotenoid production was increased 18 to 23-fold in these strains as compared to the wild-type strain.

### Single Factor Design Experiments

[0382] Different organic and inorganic nitrogen sources were evaluated for growth and production of AX by mutant X. dendrorhous strain MYM0 (Table 2). Single factor statistical analyses gave significant results (p<0.05) for the response variables of growth (A₆₀₀) and production (total carotenoids and intracellular carotenoid content (Ypx)). Here, except for malt extract, all nitrogen sources tested had similar growth performances (A₆₀₀) with growth from 18.60 to 21.76. Malt extract had the highest intracellular carotenoid content (Ypx) with 3.94, 1.85, 1.09, 1.19, and 1.40-fold improvements compared to urea, ammonium sulphate, yeast extract, bactopeptone, and dried corn steep liquor, respectively. The best performing nitrogen sources in terms of carotenoid production were yeast extract and bactopeptone, followed by ammonium sulphate, dried corn steep liquor, malt extract, and urea. Table 2 shows that urea led to the lowest specific carotenoid production, suggesting that it may be a sub-optimal nitrogen source for carotenoid production in this strain. The carbon sources molasses, glucose, glycerol, and sucrose were also tested for growth and carotenoid production. MYM0 was able to grow and produce carotenoids in all carbon sources tested (Table 3). Here, the observed growth (A₆₀₀) was from 19.79 to 27.89, specific production from 3132 μg/gDCW to 4778 μg/gDCW, and carotenoid production from 36,047 to 53,395 μg/L. Except for molasses, all carbon sources had a similar growth performance. Glycerol and molasses led to similar levels of catotenoid production, with an improvement of 1.52-fold compared to glucose and sucrose. Of note is that the lag phase for growing on glycerol was extended for three days compared to six hours for the other carbon sources.

### Factorial Design and Surface Response

[0383] Initial screening was conducted with seven components of the culture media by using a factorial design of 2^{k-p} (k=7; p=4). Tables 5, 6, and 7 show results for the analyses of variance for growth, carotenoid production, and specific yield, respectively. The significant factors were bactopeptone, malt extract, yeast extract, sucrose, and dried corn steep liquor (p<0.05). These factors were further used to perform a Central Composite Design (for the experiments) and Response Surface Methodology for identifying the optimal levels). The effects of malt extract, yeast extract, Sucrose, and dried corn steep liquor were studied at five experimental levels (−1.6818, −1, 0, 1, 1.6818) for growth and production. Sucrose, malt extract, and yeast extract stimulated production. In contrast, dried corn steep liquor was observed to be detrimental for carotenoid production. As a result, this media component was removed from further experiments. Experimental results were fitted to a predictive quadratic model and identify the conditions for maximal carotenoid production. Table 8 demonstrates the model was able to predict production with a Coefficient of Variance within 5%.

### Fed-Batch Fermentation

[0384] After culture media optimization, production was scaled-up to instrumented fermenters using a non-structure model. This model was validated using kinetic data in a batch mode at 10 g/L and 25 g/L of initial sucrose concentration (FIG. 8 and FIG. 9) where the coefficients of determination were 0.95 and 0.93, respectively. The model was then extrapolated to a fed-batch culture and used to design feeding strategy. Growth and production was divided into four phases: Batch—Exponential Feeding Rate—Constant Feeding Rate—Batch. After seven days of fermentation, the MYM0 strain was able to grow to 117±4.24 gDCW/L and produce 967±15 mg/L of carotenoids, wherein the carotenoid composition was 75% for AX, 5.5% for β-carotene, 4.5% for cantaxanthin, and 15% for other carotenoids. There was no detectable zeaxanthin, 9-cis-AX, or 13-cis-AX in the carotenoid fraction. The coefficient of determination was 0.94 suggesting a reliable model to predict growth and production in P. rhodozyma.

### Bioinformatics Analyses

[0385] From the strains screened for production (FIG. 2), X. dendrorhous MYM6 (coded for sequencing as MYM6_Y2), MYM0 (coded as MYM0_Y11), MYM44 (coded as MYM44_Y14), MB18 (coded as MB18_Y15), MAMY3 (coded as MAMY3_Y16), MB24 (coded as MB24_Y17), MYM92 (coded as MYM92_Y4), and MAMY6 (coded as MAMY6_Y12) were selected for whole genome sequencing using the Illumina platform. The wild-type X. dendrorhous CBS 6938 was re-sequenced as a control. Genome assembly was performed with Velvet, including adapter removal, trimming, and filtering of poor-quality reads. The contigs were then filtered to leave those with a length>300 bp, and coverage above 10X. The genome size, number of contigs, N50, and GC content is presented in Table 4. The genome sizes were from 18.55 Mb to 19.11 Mb. The number of contigs were from 1239 to 1722. The N50 of the newly sequenced genomes were from 23,732 bp to 44,235 bp. The GC content for the newly sequenced genomes was 48.57%±0.17%.

### Variant Analyses

[0386] The genome sequence and annotation of X. dendrorhous CBS 6938 was used as a reference to call and annotate the variants (Sharma et al., 2015). After filtering the variants using the criteria detailed hereinabove, there were 983, 1009, 1037, 994, 1015, 977, 1067, and 1091 SNPs and 52, 64, 47, 68, 76, 66, 68, and 61 INDELs detected for the strains MYM6_Y2, MYM0_Y11, MYM44_Y14, MB18_Y15, MAMY3_Y16, MB24_Y17, MYM92_Y4, and MAMY6_Y12, respectively. Next, any mutations detected in the re-sequenced X. dendrorhous CBS6938 compared to the published sequence were removed from the newly sequenced mutant strains. Mutations present across all strains were extracted and used for variant analyses (FIG. 12). After variant annotation, synonymous mutations were removed. These filtering criteria yielded 368 SNPs (see, Table 13). From these mutations, the following criteria were used for further analyses: non-synonymous missense variants in coding regions (144 mutations), upstream variants (126 mutations), upstream variants within 100 bp of a gene (5 mutations), stop gained (2 mutations), start lost (1 mutation), missense/splice variants (4 mutations), and splice donor/intron variants (6 mutations).

### Conserved Variants

[0387] Table 13 shows the types of mutations detected across the eight sequence mutant strains, and the genomic details location of the mutation in the chromosome, gene name, protein, gene ID, type of mutation, gene length, protein length, effect, and amino acid change. There were 144 non-synonymous missense mutations in coding regions found across all of the newly sequenced mutant strains. From these mutations, 27 in proteins annotated as hypothetical proteins while the remaining were in more specifically annotated proteins.

[0388] Of the mutations in specifically annotated proteins, several were found in subunits of complex proteins. Four SNPs were found in subunits of the gene encoding cytochrome c oxidase: subunit 1, subunit 2, subunit 3. In addition to this cytochrome-related protein, the cytochrome b2 gene encoding protein was also mutated. Five SNPs were found in subunits of the gene encoding to the NADH dehydrogenase protein. Among other mutations in subunits, the ATP synthase subunit 6 gene encoding protein was also mutated. In terms of mutations in genes encoding proteins related to transporters, a small molecule transporter, an ABC transporter, and a sucrose transporter were mutated. Five SNPs in Zn-finger proteins encoding genes were also mutated including C4-type Zn-finger, an uncharacterised MYND Zn-finger, Zn(2)-C6 fungal-type DNA-binding domain gene encoding protein, Zinc finger RING-type, and the related to C2H2 zinc finger protein FLBC. Fatty acid related gene encoding proteins were mutated including the delta 9 fatty acid desaturase, and the acyl-CoA oxidase. From mutations of the TCA cycle, the gene encoding to fumarate reductase was mutated. Mutations were also found in the pantothenate kinase (PanK), the calcium-transporting ATPase, the Snf2 family amino-terminal protein, the 1-aminocyclopropane-1-carboxylate synthase, the cysteine proteinase and the ferredoxin/adrenodoxin reductase encoding genes.

[0389] Notably, ‘high impact’ mutations included two SNPs leading to premature stop codons in a WD40 repeat-containing protein and a G protein-coupled receptor, rhodopsin-like, respectively. Additionally, a loss of start codon mutation was detected in one protein annotated as a hypothetical protein. Six mutations within 100 bp upstream of a gene were found including cytochrome b, inositol polyphosphate multikinase, components of the ARGR transcription regulatory complex, mRNA (guanine-n7-)-methyltransferase, and glucosyltransferase-Alg8p; two of these types of effect mutations were annotated as hypothetical proteins. Six mutations with the effect “Splice Donor and Intron Variant” were found. This type of mutation causes the loss of a splicing signal that defines the 3′-end of an exon, the consequence being that the whole intron could be retained as the splicing machinery is unable to recognise the splice donor site (Jian et al., 2013). The mutations found with this effect included the predicted E3 ubiquitin ligase, acid phosphatase, predicted Zn-finger protein, palp-domain-containing protein, Zn(2)-C6 fungal-type DNA-binding domain, and uncharacterised conserved protein. Four mutations were found with the effect missense and splice region variant including mercaptopyruvate sulfurtransferase/thiosulfate sulfurtransferase, ATP-NAD kinase, snf2-family ATP dependent chromatin remodelling factor snf21 with G3713A, and arsenical pump-driving ATPase.

[0390] Overall, 25 mutations conserved across the sequenced strains were identified as of particular interest, as set out in Table 14.

### DISCUSSION

### Strain Improvement

[0391] In this example, mutagenesis was applied using NTG combined with EMS and UV-light, and incorporated screening methods with selective pressure or cell sorting in the last mutagenic cycle, with the intention of producing mutagenized X. dendrorhous capable of enhanced AX production. This methodology resulted in strains capable of greater than 15-fold AX production as compared to the wild-type strain (e.g., FIG. 7). In addition to improving AX production, the combination of mutagenic agents and screening methods used reduced the number of mutagenic cycles 3-fold as compared to previous studies (see, e.g., Xie et al., 2014).

[0392] The use of antimycin, diphenylamine, or β-ionone in our screening methods appeared to assist with the selection of superior strains. Antimycin inhibits the cytochrome P450 enzyme responsible for providing electrons during the oxygenation of the AX molecule by the AX synthase (Bon et al., 1997; Ojima et al., 2006), diphenylamine inhibits the phytoene desaturase enzyme leading to an accumulation of the colourless carotenoid phytoene (Chumpolkulwong et al., 1997), and, p-ionone competes with the p-carotene molecule during its oxygenation by the AX synthase to produce AX (Lewis et al., 1990).

[0393] Cell sorting (FACS) was also used as a screening method to select superior strains. FACS used fluorescence properties of the AX molecule to select strains with an improved ability to produce AX. Additionally, as cells screened with FACS were stressed with H₂O₂, cells were selected for increased tolerance to oxidative stresses which is associated with an improved ability to produce AX (Schroeder and Johnson, 1995).

### Culture Media Optimization and Fed-Batch Fermentation

[0394] Classical random mutagenesis produces unique strains with specific phenotypic traits making it challenging to directly extrapolate culture media optimization results from other studies. Therefore, one of the selected strains, MYM0, was subjected to a culture media optimization process.

[0395] Different nitrogen sources were tested to grow X. dendrorhous cells including urea, ammonium sulphate, yeast extract (YE), malt extract (ME), bactopeptone (BP), and dried corn steep liquor (DCSL) (see Table 2). While urea has been reported to be a low-cost and promising nitrogen source to grow and produce AX in X. dendrorhous (An et al., 2001; Fontana et al., 1996), this example identified that urea inhibited carotenogenesis in our selected strain (Table 2). Ammonium sulphate is another low-cost nitrogen source used to grow X. dendrorhous cells (Flores-Cotera et al., 2001; Ni et al., 2007). The example provided here is consistent with these earlier studies, with ammonium sulphate resulting in the highest growth. YE, ME, and BP are part of the YM media used as a routine to grow X. dendrorhous cells. The evaluation of these media components as a sole nitrogen source confirmed its effectiveness to grow and produce AX. Of note is that ME produced the highest carotenoid content in our selected strain suggesting the importance of this media component. BP delivered improved growth and carotenoid production but its high cost that means this nitrogen source is sometimes replaced by other low-cost sources such as urea or ammonium sulphate (Ni et al., 2007).

[0396] Different carbon sources were also tested to grow and produce AX in the selected strain. Table 3 confirms that the selected strains grew in several carbon sources including glucose, sucrose, glycerol, and molasses and can be used to produce high cell densities. The best performing nitrogen and carbon sources were then optimised in a surface response experiment to determine optimal levels to maximise growth and AX production.

[0397] X. dendrorhous is a Crabtree positive yeast (high level of sugars produce fermentative products during aerobic fermentations) which limits the application of batch fermentations at a high concentration of carbon source (Reynders et al., 1997). To overcome this limitation, the optimised media and a nonstructure model were used to design the feeding profile for the fed-batch culture. Notably, after seven days of fermentation, the AX production of X. dendrorhous MYM0 increased 50-fold compared with the wild-type strain.

[0398] The final biomass achieved was above 100 gDCW/L and the carotenoid content was around 1 g/L (FIG. 10). This result was a 1.41-fold production improvement compared with previous fed-batch cultures that designed the feeding profile using either DO-stat, pH-stat, constant feeding rate, or feedback loops of online sugar measurements (Schewe et al., 2017; Schmidt et al., 2011).

[0399] Luna-Flores et al., 2010 used kinetic models to design the feeding profile of a fed-batch culture but the media used in that study was not optimised, rendering 3-fold less growth than in the example presented here. The superiority of our approach highlights the significance of incorporating culture media optimisation in selected strains before using them in fed-batch fermentations.

[0400] While glycerol has been reported to be an effective carbon source to stimulate AX production in X. dendrorhous (Silva et al., 2012), and despite glycerol supported growth and production being similar to other carbon sources in a flask fermentation (Table 3), when tested in a fed-batch culture during the maturation phase (after day 3.5 of culture), glycerol in fact accumulated suggesting that it is a poor carbon source for the tested strain. This poor performance when using glycerol in fed-batch fermentations may well be associated with the long adaptation phase prior to assimilation of glycerol (Table 3).

[0401] Molasses has previously been tested in X. dendrorhous with two to three times more AX obtained than when using glucose or a synthetic blend of sugars that constitute molasses (Haard, 1988). Our results are consistent with this previous finding with molasses increasing AX production 1.52-fold compared with glucose or sucrose (Table 3) in the tested strain. The stimulation of AX production by molasses suggests it is a promising carbon source to maximise carotenoid production for strains obtained by this approach.

### Genome and Variant Analyses

[0402] The genome assembly and filter method (remove contigs below 300 bp and depth below 10X) applied to the selected strains generated genome assembly sizes ranging from 18.55 Mb to 19.11 Mb (Table 4). The genome sizes without filtering the contigs using the mentioned criteria of size and depth resulted in assembly sizes of 19.14±0.15 for all the genomes.

[0403] The observed genome sizes were similar to the 19.50 Mb genome of the previously sequenced wild-type X. dendrorhous CBS 6938 strain (Sharma et al., 2015). Similarly, the genome size of the re-sequenced X. dendrorhous CBS 6938 was 19.20 Mb. The GC contents in the new strains and re-sequenced wild-type strain were around 48% which were similar to the 47.3% GC content of the publicly available wild-type strain (Table 4) (Sharma et al., 2015). In previous studies with related strains, X. dendrorhous CBS 7918 yielded a 18.7 Mb genome and 47.2% GC content, and X. dendrorhous CRUB 1149 an 18.9 Mb genome and 47.1% GC content (Libkind et al., 2011).

[0404] Genome to genome distance was calculated to objectively calculate the similarity between our selected strains and the wild-type strains (Auch et al., 2010). The genome distance calculated was 0.01 for the re-sequenced X. dendrorhous CBS 6938 and 0.02 for the selected strains (the closer to “0” the more similar the strains in comparison) suggesting that the wild-type strains are more similar between themselves than with our selected strains. This genome comparison confirmed the genome similarity among the X. dendrorhous strains used in this example and those with a genome sequence publicly available.

Genomic Mutations Associated with AX Biosynthesis in X. Dendrorhous

[0405] X. dendrorhous uses the precursor isopentenyl pyrophosphate (IPP) for AX biosynthesis, which is generated via the mevalonate (MVA) pathway, starting from acetyl-CoA. Here, a mutation was identified in the pantothenate kinase encoding gene, which is required in the first reaction of the conenzyme A (CoA) biosynthetic pathway (Table 14). Pantothenate kinase phosphorylates panthothenate to form phophopanthothenate at the expense of a molecule of ATP. This reaction is a limiting step in the biosynthesis of CoA, required by the MVA pathway in the form of acetyl-CoA.

[0406] The MVA pathway uses five enzymes to produce IPP, in which 3-hydroxy-3-methyl-glutaryl-CoA reductase (HMGR) is a critical regulator and the enzyme that catalyses the production of MVA (Goldstein and Brown, 1990). Here, a mutation was identified in the gene encoding to the HMGR enzyme (see Table 14). HMGR overexpression has been associated with an improvement of AX in X. dendrorhous indicating that the mutation found in the HMGR gene may influence the AX production increase in our selected strains. For example, the addition of ethanol to cultures of the mutant strains X. dendrorhous P-5-6 and Dp-41 overexpressed 3-fold the HMGR gene which was associated with the increase of AX production on those mutated strains (Gu et al., 1997). Similarly, the overexpression of three MVA synthetic pathway genes, namely acetoacetyl-CoA thiolase, HMG-CoA synthase, and HMGR in X. dendrorhous increased AX production 2.1 fold (Hara et al., 2014).

[0407] Following the IPP synthesis through the MVA pathway, eight IPP molecules are then condensed through prenyltransferases in which IPP isomerase catalyses the isomerization of IPP to dimethylallyl-pyrophosphate (DMAPP), and then both molecules joined, generating geranyl pyrophosphate (GPP) (Kajiwara et al., 1997). The addition of a second molecule of IPP to GPP gives the precursor C-15 sesquiterpene, farnesyl pyrophosphate (FPP), which is converted into geranylgeranyl-pyrophosphate (GGPP) by a further addition of IPP by the GGPP synthase (see Table 14) (Niklitschek et al., 2008). In this example, the new strains presented a mutation in the GGPP synthase encoding gene, which in abundance has been associated with a remarkable carotenoid production in ripening fruit (Sandmann, 1994). Because GGPPs are the building blocks of the carotenogenesis pathway, the mutation in the GGPP synthase gene might positively influence the synthesis of GGPPs and thus the carotenoid production in our selected strains.

Mutations Associated with Carbon Source and Nutrient Assimilation

[0408] This example used sucrose as a carbon source in all screening and selection experiments and efficiently produced high cell densities in a fed-batch culture (FIG. 10). A mutation in a gene encoding a sucrose transporter, associated with sucrose assimilation, was identified. Due to its association with sucrose assimilation, the mutation in the sucrose transporter may have influenced the improved growth and carotenoid production in the selected strain.

[0409] A mutation identified in a gene encoding a G protein-coupled receptor, rhodopsin-like protein (GPCR) had the effect “Stop Gained”. GPCR proteins comprise the largest class of membrane proteins in eukaryote genomes with a common denominator of seven-transmembrane domains. Yeast has three different GPCR proteins for pheromone and sugar sensing (Lengger and Jensen, 2020). Glycerol was a carbon source tested in the selected strains to grow and produce AX (Table 3). For glycerol, the lag phase lasted three days before the culture started to grow. In a fed-batch culture, glycerol failed as it accumulated during its feeding. Potentially, this GPCR mutation is negatively influencing the ability of the selected strain to grow under glycerol as a carbon source. Further analyses in the GPCR mutation using the TMHMM server 2.0 revealed that the transmembrane helices of the GPCR protein were not affected as these were found in the first 200 amino acid sequences—the stop gained was at the position 395/523 (see Table 14 and FIG. 13) (Krogh et al., 2001).

[0410] Five mutated genes encoding Zn-finger-type proteins (Table 14), comprising small a protein structural motif characterised by the coordination of one or more zinc ions in order to stabilise the fold, were also identified. These protein types interact with RNA, DNA, or proteins altering their binding specificity for a particular protein. Zn-finger proteins have been associated with the regulation of nitrogen assimilation in Neurospora crassa or Aspergillus nidulans (Fu and Marzluf, 1990), so it is possible that mutations of Zn-finger genes in the selected strain of P. rhodozyma resulted in superior use of ammonium sulphate as compared to urea as a nitrogen source (Table 2).

Mutations Associated with Oxidative Phosphorylation and Stress

[0411] Schroeder et. al., 1995 indicated that AX plays an important role against oxidative stress in X. dendrorhous (Schroeder and Johnson, 1995). This oxidative stress link with AX production is also supported by the evidence that AX production in X. dendrorhous is mainly associated with respiratory or aerobic fermentations rather than anaerobic ones (Luna-Flores et al., 2010). ROS tends to be generated during the respiration phase because of electron overflow in the respiratory chain caused by an imbalance of electron transfer during reduction of the ubiquinone pool and electron transfer occurring downstream in the respiratory chain. AX can quench ROS in a manner analogous to superoxide dismutase in which harmful oxygen molecules are break down and eliminated (Schroeder and Johnson, 1993).

[0412] ROS are produced via the respiratory electron chain and, in this example, mutations in subunits of the electron transport chain components affecting the complexes I, III, IV, and V (Table 14) were identified. Of these mutations, four were found in subunits of the cytochrome c oxidase (CoC) protein. This CoC protein is responsible for carrying the electrons from complex III to complex IV in the electron transport chain, the last step in the electron transport chain. In fact, this complex is inhibited by antimycin or potassium cyanide (KCN), a compound used in our studies as a screening method.

[0413] Evidence suggesting that X. dendrorhous shifted from KCN-sensitive to KCN-insensitive growth in later growth phases (carotenoid production phases) (Schroeder and Johnson, 1993) supports the importance of alternative pathways of oxygen utilization during AX biosynthesis. Another report suggests that mutant strains sensitive to antimycin, can create an imbalance in the flow of electrons during the electron transport chain, increasing the amount of ROS and so improving AX production (An et al., 1989). This overflow of electrons can also increase AX production by the action of AX synthase, an enzyme that belongs to the P450 family enzyme and requires an electron donor (P450 reductase or cytochrome b), to incorporate the oxygen functional groups to the molecule of p-carotene.

[0414] In this example, a mutation of a ferredoxin/adrenodoxin reductase encoding gene (Table 14) was also observed. Adrenodoxin is a cAMP-regulated ferredoxin that transports electrons from NADPH-dependent adrenodoxin reductase to P450 family enzymes (Grinberg et al., 2000). The electron donor capability of ferredoxin/adrenodoxin reductase that suggests a potential role as an electron donor required by AX synthase. Other mutations associated with the electron transport chain included a mutation in the cytochrome b, cytochrome b2 and ATP synthase encoding genes and five mutations in subunits of the NADH dehydrogenase protein (Table 14). These mutations are potentially associated with the improved AX production in the selected strains due to the abundance of oxidative phosphorylation enzymes such as NADH dehydrogenase and ATP synthase, found when X. dendrorhous cells were growing on succinate as a carbon source, and where production of AX was around 2-fold more than when grown on glucose (Martinez-Moya et al., 2015).

[0415] Another mutation potentially associated with increased AX production in the selected strains is in an acyl-CoA oxidase encoding gene (Table 14). This enzyme is associated with the fatty acid metabolism in a reaction involving the oxidation of acyl-CoA to tans-2,3-dehydroacyl-CoA and the reactive oxygen species H₂O₂, which can trigger an increase of AX production to protect the cells from an oxidative stress (Liu and Wu, 2006).

[0416] Another mutation associated with lipid metabolism was observed in a delta 9 fatty acid desaturase, which is reported to have preferences for substrates of C18:1 and C16:1 converting to C18:2 and C16:2 fatty acids (L. Zhang et al., 2020). Notably, the most abundant fatty acids in the X. dendrorhous pathway are linoleate (C18:2), stearic acid (18:0), oleic acid (C18:1), palmitic acid (C16:1), and hexadecanoic acid (16:2) (Sharma et al., 2015). The proportion of fatty acid and its influence to produce AX (Miao et al., 2011) suggests that the mutation in the delta 9 fatty acid desaturase encoding gene may stimulated AX production in our selected strains of X. dendrorhous.

[0417] It is further notable that, in this example, antimycin, β-ionone, diphenylamine, or the stressor H₂O₂ were used in the screening methods to select superior strains of X. dendrorhous, which potentially increased selection for strains with the mutations in the electron transport chain to enhance AX production.

### Example 2: Metabolomic and Transcriptomic Analysis of a High Astaxanthin Producer Strain of Xanthophyllomyces dendrorhous

[0418] In this example, one of the X. dendrorhous mutant strains developed as per Example 1, and the wild-type as a control, were cultured in chemically defined media and instrumented fermenters, and differential kinetic, metabolomics, and transcriptomics data were obtained. The results obtained in this example suggest that carotenoid production primarily occurred during growth phase.

[0419] During the growth phase, the mutant strain showed positive regulation of central carbon metabolism metabolites associated with glycolysis, the pentose phosphate pathway, the TCA cycle, and amino acid and fatty acid biosynthesis. In the stationary phase, amino acids associated with the TCA cycle increased, but most of the fatty acids and central carbon metabolism metabolites decreased. TCA cycle metabolites such as succinate, fumarate, and a-ketoglutarate were abundant during both growth and stationary phases.

[0420] The overall observed metabolic changes in the central carbon metabolism and abundance of TCA cycle metabolites suggest an enhancement in the electron respiratory chain in the mutant, and in the provision of the electrons required for the AX synthesis by the AX synthase, may be primarily responsible for enhanced AX production. Transcriptomic data correlated with the metabolic data and found a positive regulation of genes associated with the electron respiratory chain.

### Materials and Methods

### Strains, Media, and Growth Conditions

[0421] The wild-type strain of X. dendrorhous CBS 6938 and the mutant strain X. dendrorhous MYM0, each as described in Example 1, were used in this example. In this example X. dendrorhous MYM0 is hereinafter referred to as X. dendrorhous BPAX-A1. Storage of the strains was as described in Example 1. Chemically defined media for inoculum and fermenters contained (in g/L): glucose (20), (NH₄)2SO₄ (6), KH₂PO₄ (2), FeSO₄·7H₂O (0.019), MgSO₄·7H₂O (0.88), and CaCl-2H₂O (0.2). Potassium hydrogen phthalate 20 was used as a buffer when growing in flasks. The pH was adjusted to 5.5 with NaOH 2M. The media was supplemented with trace salts (mg/L): ZnSO₄·7H₂O (5.01), CuSO₄·5H₂O (0.75), MnSO₄ (0.48), H₃BO₃ (0.6), Na₂MoO₄·2H₂O (0.6), and KI (0.15) and vitamins (mg/L): myo-inositol (60), vitamin B3 (niacin) (3), vitamin B5 (pantothenic Acid) (3), vitamin B1 (thiamine) (3), vitamin B6 (pyridoxine) (3), vitamin B7 (biotin) (0.048), and p-aminobenzoic acid (1.8).

### Analytical Techniques

### Optical Density (A600)

[0422] OD was measured as for Example 1.

### Dried Cell Weight

[0423] Dried cell weight was measured as for Example 1.

### Total Carotenoids

[0424] Total carotenoids were assessed as for Example 1.

### Hplc Analyses for Astaxanthin and Other Carotenoids

[0425] HPLC analyses for astaxanthin and other carotenoids were performed as for Example 1.

### Hplc Analyses for Sugars and Organic Acids

[0426] Supernatants for sugar and organic acid analyses was obtained by centrifugation of 1 mL of fermentation sample at 15,000 rpm for 5 min. Organic acids and carbohydrates were quantified by ion exchange chromatography using an Agilent 1200 HPLC system and an Agilent Hiplex H column (300×7.7 mm, PL1170-6830) with a guard column (PL Hi-Plex H 50×7.7 mm, PL1170-1830). Sugars were monitored using a refractive index detector (Agilent RID, G1362A) set on positive polarity and optical unit temperature of 35° C. while organic acids were monitored at 210 nm (Agilent MWD, G1365B). 30 gL of each sample was injected onto the column using an auto-sampler (Agilent HiP-ALS, G1367B) and the column temperature was kept at 40° C. using a thermostatted Column compartment (Agilent TCC, G1316A). Analytes were eluted isocratically with 5 mM H2SO4 at 0.4 mL/min for 40 min. Chromatograms were integrated using Chromeleon 7.2 software.

### Intracellular Metabolite Extraction and Analyses

[0427] The following methods for quenching, extraction, and analyses were adapted from (Canelas et al., 2008, 2009; Martinez-Moya et al., 2015; Luna-Flores et al., 2018; Pan et al., 2020). Cells were quenched in cold methanol 60% and placed in a bath of ethanol/dry-ice. Cells were then centrifuged at 4,500 rpm for 5 min at −20° C. and pellet was washed with cold 60% methanol before to snap-freeze in liquid nitrogen. Cell pellets were kept at −80° C. until further use. The pellet was then dissolved in a mixture 1:1 of chloroform and methanol 50% and submitted to five cycles of 5 min of bead beating using acid washed glass beads (Sig. Cat. No. G1152-100G) and a tissue lyser (Qiagen TissueLyser II); the tubes were cooled down on ice for 5 min before start each cycle.

[0428] To separate polar and non-polar metabolites, the disrupted cells were centrifuged at 15,000 rpm for 15 min in which polar metabolites were in the top layer (methanol 50%) and non-polar metabolites were in the bottom layer (chloroform). The top layer was collected, freeze dried, and the pellet obtained was finally re-suspended in 2% acetonitrile. 5 uM of AZT, 3 ppm of 13-C valine, and 3 ppm of 13-C sorbitol were used as internal standards. LCMS was used to analyse central carbon metabolism using the method described in (Luna-Flores et al., 2018). Briefly, analyses were performed using a Dionex Ultimate 3000 HPLC system coupled to an ABSciex 4000 QTRAP mass spectrometer. Liquid chromatography was performed using a 50 min gradient with 0.3 mL/min flowrate, on a Phenomenex Gemini-NX C18 column (150×2 mm, 3 gm, 110 A), with a guard column (SecurityGuard Gemini-NX C18, 4×2 mm), and column temperature of 55° C. The mobile phases used were: 7.5 mM aqueous tributylamine (Sigma-Aldrich) with pH adjusted to 4.95 (+0.05) using acetic acid (Labscan) for Solvent A, and acetonitrile (Merck) for Solvent B. Samples were kept at 4° C. in the autosampler and 10 gL of various dilutions of samples were injected for analyses. The HPLC was controlled by Chromeleon 6.80 software (Dionex). Mass spectrometry was achieved using a scheduled multiple reaction monitoring (sMRM) method on the negative ionisation mode. Collected data were processed using MultiQuant 2.1 (AB Sciex). The amino acids profile was obtained using the protocol described in (Chen et al., 2020). In brief, Shimadzu LCMS 8050 was used for amino acid analyses. This instrument was equipped with three quadrupoles for mass analysers and collision. Liquid chromatography was performed by injecting 1 uL of sample to a F5 column (Sigma) and eluted in a 25 min gradient using as mobile phase acetonitrile with 0.1% of formic acid at 0.25 mL/min. Oven was set to 40° C. Electrospray ionization was used to ionise the sample. Mass spectrometry was achieved using a scheduled multiple reaction monitoring (sMRM) method on the positive ionisation mode. Amino acid mix was used as standard for identification and quantification (Sig. Cat. No. A9906-1ML). Skyline daily was used to analyse amino acids detected in LC-MS (Adams et al., 2020). The fatty acid profile of yeast biomass was determined using the following procedure. A portion of dried yeast biomass (50 mg) was mixed with 2 mL solvents containing methanol/hydrochloric acid/chloroform (10:1:1, v/v/v). The mixture was heated at 90° C. for 1 h in a sealed glass tube to convert microbial oils to fatty acid methyl esters (FAMEs). Then the mixture was treated through mixing with 0.9% NaCl solution (1 mL). Afterwards, FAMEs were extracted through addition of 0.5 mL hexane, followed by centrifugation. Then, the supernatant hexane phase containing FAMEs were analyzed by an Agilent 6890 Series Gas Chromatography system equipped with a HP 5973 mass spectrometer detector and a HP-5MS capillary column (Agilent J&W 30 m×0.25 mm×0.25 [im). 1 [J.L of the sample was injected with a split ratio of 10:1. The injection port temperature was 230° C. Initial column temperature was 90° C. and held for 1 min, followed by increasing the column temperature at a rate of 15° C./min until 180° C., 5° C./min to 220° C., 10° C./min until 250° C. and held for 10 min. FAME Mix (Supelco® 37 Component, Sigma-Aldrich) was used as standard.

### Rna Extraction, Sequencing, and Analyses

[0429] Cells sampled at Phase III were used for RNA extraction and analysis. For this, cells (50 ODs) were quenched in cold methanol 60% and placed in a bath of ethanol/dry-ice. The cells were then centrifuged at 4,500 rpm for 5 min at −20° C. and the pellet was snap-frozen in liquid nitrogen and finally storage at −80° C. until further use. ZymoBiomics DNA/RNA Miniprep Kit (Zymo Research Cat. No. R2002) was used for RNA extraction. For this, the pellets were first submitted to a cryogenic grinding step using a mortar, pestle and liquid nitrogen. To ensure extraction, using indications of the kit, the grinded pellet was submitted to three cycles of five minutes of bead beating using a Qiagen Tissue Lyser II. This grinded extract was then used for RNA extraction following the indications of the kit. Extracted RNA was quantified using a NanoDrop and Qubit 4.0. The library was prepared using the Illumina Stranded mRNA prep kit. The quality of the RNA and library were evaluated by a Fragment Analyser 5200. Finally, the samples were sequenced using the Illumina platform 100 bp Pair End using NovaSeq 6000 and a SP PE100 flow cell. Quality of the reads was evaluated using FASTQC (Andrews, 2010) and Trimmomatic (Bolger et al., 2014) was used to remove bad quality reads. Then, Tophat, Cufflinks, and CuffDiff were used to align the RNA-seq reads against the reference genome X. dendrorhous CBS6938 (Sharma et al., 2015), normalize and annotate the transcripts, and evaluate the differential expression, respectively (Trapnell et al., 2012). The cutoff for significant differentially expressed genes was q<0.05.

### Statistical Analyses of Intracellular Metabolomics

[0430] Metabolomics data were normalized and analysed for statistical significance (De Livera et al., 2012). Principal component analyses were used to profile all metabolites (Mendez et al., 2019).

### Instrumented Fermenters

[0431] Instrumented fermenters were performed in a 1 L New Brunswick BioFlo/CelliGen 115. The fermenter was configured with one six-blade Rushton impeller with a diameter of 2.5 cm, three baffles, one ring sparger, and ports for acid, base, antifoam, and sampling. The fermenters were equipped with probes and controllers of pH, pO₂, temperature, and antifoam to measure and control these parameters, respectively. Optimal fermenter conditions were the following. The fermenter was inoculated with 10% of cells at A600 of 5 growing at the mid-exponential phase. The pH was controlled at 5.5 using 2 M sodium hydroxide or 2 M of sulphuric acid. The foam was controlled by adding Antifoam C (Sigma Cat. No. A8011). The temperature was controlled at 20° C. using a heater jacket or chiller. The dissolved oxygen was controlled at 70% of air saturation by using cascade changes in agitation (400-1200 rpm), and a constant air flow rate of 1 VVM.

### Calculation of Fermentation Parameters

[0432] Specific growth rates (p) was calculated across all the growth phases using the logarithm method. Yield of sugar conversion to biomass (Yxs) was calculated using the total biomass produced over the consumed substrate. The specific consumption rate of glucose (qs) and the specific production rates of carotenoids (qp) and AX (qpax) were computed at all the growth phases by multiplying the specific growth rate by the linear correlations of sugar or carotenoids and AX with biomass. For the stationary phase in which no-growth was observed, the specific rates were calculated using the linear correlations of sugar or carotenoid production with an average of biomass multiplied by its time frame.

### Results

### Instrumented Fermenters and Kinetic Analyses

[0433] The wild-type X. dendrorhous CBS 6938 and the mutant X. dendrorhous BPAX-A1 (referred to as MYM0 in Example 1) strains were grown for three days in a chemically defined media and sampled for growth and production measurements. Comparatively, as can be seen in Table 9, the wild-type final biomass was 13.60±0.29 gDCW/L, which represented 35.8% higher than that obtained in the mutant strain. The wild-type sugar to biomass yield (Yxs) was 0.62 g/gDCW being 44% higher than that obtained in the mutant strain. In terms of AX production, the mutant strain presented an improvement of around 11-fold compared to the wild-type strain. The final proportion of AX was around 70% for both strains. In terms of specific rates, as can be seen in Table 10 and FIGS. 14-17, the wild-type strain had a maximum specific growth of 0.12 h⁻¹ which was 9% higher than that obtained in the mutant strain. The mutant and wild-type strain did not present a lag growth phase, but in the total carotenoid production (see FIGS. 14-17). The maximum specific carotenoid production in the mutant strain was 12-fold higher than that obtained in the wild-type strain. In terms of strain specific changes for growth and production, as can be seen in Table 10 and FIG. 14, the mutant strain had an increase of the specific carotenoid production of 2.44-fold from Phase 1 to Phase 2 and continued until the stationary phase. Interestingly, the specific AX production remained relatively constant across all the growth phases. At the stationary phase, the carotenoid production ceased but the accumulation of AX continued mainly due to an increase in the AX composition of the total carotenoids. For the wild-type strain, the specific carotenoid production was increased 7.92-fold from Phase 1 to Phase 2 and it was extended until the stationary phase. For the AX production specifically, it was increased 2.37-fold and 7.51-fold from Phase 1 to Phase 2 and Phase 3, respectively.

### Metabolite Profiling of Wild-Type and Mutant Strains of X. Dendrorhous

[0434] FIGS. 14 and 16 show the growth phases sampled for intracellular metabolite analyses. A total of 80 metabolites associated with primary metabolism were obtained. Before statistical analyses, the metabolite data was normalized based on biomass and internal standards. Principal component analyses (PCA) was then used for statistical grouping of the samples. As can be seen in FIG. 18, the score and loading plots discerned between the different metabolites analysed grouping the four growth phases of the strains under analyses. Phase 3 suggested to be the most explanatory for differential comparison due to it was isolated inside each strain and between them. To compare the relative amounts of metabolites, the response ratio of each metabolite was obtained and converted to log 2 (FIG. 19). The metabolomes of the wild-type and mutant strains were then compared at each growth phase. Here, central carbon metabolism metabolites presented the highest differences (more abundant in the mutant strain) for the first three growth phases analysed. In Phase 4, except pyruvate, fumarate, succinate, a-ketoglutarate, ribulose-5-phosphate, and glucose-6-phosphate all metabolites were similar or less abundant in the mutant strain. A similar pattern was observed with FAME metabolites, in which methyl laurete (C15:0) and methyl palmitoleate (16:1) were more abundant in all the growth phases. In regards to amino acids, they were more abundant in the mutant strain during all the growth phases. To study the dynamic of metabolite profiles, the principal carbon, amino acid, FAME, electron transport chain, and carotenogenesis pathways were obtained using the KEGG database; to facilitate the comparison, the response ratios were normalized to 100 (FIG. 20).

### Comparative Transcriptomics Analysis

[0435] Cells from Phase 3 were used for differential transcriptomic analysis. RNA-sequencing was used to compare the transcriptional profile of the strains. Our analyses identified 6363 transcribed genes, of which 690 were significantly different (q<0.05). From these genes, 211 (132<Log 2 −2) were downregulated and 479 (228>Log 2 2) were upregulated (Table 16). FIG. 20 shows the gene expression on the pathways glycolysis, pentose phosphate pathway (PPP), TCA cycle, electron transport chain, and carotenoid biosynthesis (see also Tables 15 and 16; FIG. 20). Among the most relevant changes, the hexose carrier gene CED82529 was significantly downregulated in the mutant strain (Log 2 −2.10, q<0.05). There were not found significant differences on the expression of genes associated with the glycolytic pathway. However, this pathway seems to be more active in the wild-type strain than in the mutant strain. Similarly, the gluconate kinase and 6-phosphogluconate dehydrogenase PPP genes were significantly downregulated in the mutant strain (FIG. 20 and Table 17). For the TCA cycle, the gene isocitrate lyase was significantly downregulated (Log 2 −1.24, q<0.05) in the mutant strain and the genes ketoglutarate dehydrogenase and succinate dehydrogenase were significantly upregulated (Log 2 1.55, q<0.05) and (Log 2 2.8, q<0.05), respectively. Several genes associated with the electron transport chain were significantly upregulated in the mutant strain including the Complex I genes (CDZ96154, CED84925, CDZ96153, and CDZ96151), Complex II gene (CDZ98193), Complex III genes (CED80059 and CED80058), Complex IV genes (CED800856, CDZ96152, CED800061, CED84572, and

[0436] CED82283), and ATP-Synthase genes (CDZ96150 and CDZ96333) (see Table 17 and FIG. 20 for more details). Similarly, most of the genes associated with the AX biosynthesis were upregulated in the mutant strains including the AX synthase CDZ97194 (Log 2 2.23, q<0.05), the aldo/ketolase related proteins CDZ97194 (Log 2 1.85, q<0.05) and CDZ97021 (Log 2 1.13, q<0.05), and the P450 reductase CED84998 (Log 2 4.05, q<0.05) and CDZ98632 (Log 2 1.44, q<0.05); from these P450 reductase genes, the CED85015 belonging to the CYP2 family was significantly downregulated (Log 2 −2.30, q<0.05).

### DISCUSSION

[0437] In Example 1, comparative genomics was explored to link phenotype and genotype of the mutant strain X. dendrorhous BPAX-A1 (MYM0). However, metabolic changes associated with improved AX production remained unclear. In this example, to gain metabolic insight, the wild-type and mutant strains were grown in chemically defined media and sampled at four growth phases for kinetic and metabolic comparisons. No substantial lag-phase was observed in either strain, and carotenoid production appeared primarily associated with growth. Principal Component Analysis (PCA) of all metabolites grouped the growth phases between and among the strains under comparison. Growth Phase III was fully isolated in the PCA analysis (see FIG. 18), and kinetically, presented the highest carotenoid production rate (see Table 10), indicating that this phase may be particularly relevant for transcriptomic comparisons. Accordingly, RNA-seq data was obtained and integrated with kinetic, metabolomics, and genomics data.

### Comparative Metabolomics

[0438] To study metabolic changes, a system-level characterization was performed, previously shown to be useful (Luna-Flores et al., 2016, 2018). Extracellular and intracellular metabolites were measured across the fermentation time course (FIGS. 14-17). As can be seen in Tables 9 and 10, the mutant strain produced more carotenoids than the wild-type strain but had a lower specific growth rate and final biomass. These results are in agreement with other studies in which strains with enhanced AX production have displayed lower biomass (Cannizzaro et al., 2004; Gassel et al., 2013). These previous studies suggested that wild-type X. dendrorhous used the PPP primarily for glucose degradation, leading to greater abundance of NADPH and pentoses used for lipid and nucleotide biosynthesis, respectively.

[0439] In this example, metabolites associated with the PPP were more abundant in the wild-type strain than in the mutant strain (FIG. 19 and FIG. 20). Of note is that NADPH was lower in the mutant than in the wild-type strain, providing a possible (at least partial) explanation for the observed decreased biomass. This decreased NADPH may well be associated with the improved AX in the mutant strain, with production of isoprenoid units of the AX molecule through the MVA pathway potentially competing with NADPH production. Also, the wild-type strain had a maximum glucose uptake rate 13% higher than the mutant strain. Notably, the hexose carrier gene CED82529 was significantly downregulated (Log 2 −2.10, q<0.05) in the mutant strain (Table 16 and Table 17), which may well be at least partly responsible for the lower growth rate in the mutant strain as compared to the wild-type strain.

[0440] During the growth phase, the mutant strain showed abundance of metabolites associated with glycolysis, TCA cycle, amino acids, and fatty acids metabolites, but at the stationary phase, except for amino acids, most of these metabolites were more abundant in the wild-type strain. Similarly, metabolites of the TCA cycle namely succinate, fumarate and a-ketoglutarate were more abundant in the mutant strain than the wild-type strain during all the growth phases studied (FIG. 19). These metabolic changes suggest a more active central carbon metabolism to grow and produce AX in the mutant strain in which the TCA cycle is playing an important role. The supplementation of TCA cycle metabolites, such as succinate or citrate, has been reported to increase AX production in X. dendrorhous (Flores-Cotera et al., 2001; Martinez-Moya et al., 2015). Similarly to oleaginous yeast, X. dendrorhous can use citrate as a carbon source for lipids and carotenoids biosynthesis (Flores-Cotera et al., 2001). It is reported that the use of succinate as a sole carbon source increased TCA cycle metabolites and proteins when compared to glucose as a carbon source suggesting that succinate can positively alter the whole synthesis of metabolites and translation of proteins (Martinez-Moya et al., 2015).

[0441] In regard to lipids, linoleic acid, palmitoleic acid, and stearic acid were the most abundant fatty acids in both strains. At Phase IV or stationary phase, the mutant strain presented 1.15-fold more palmitoleic acid, 1.17-fold more steric acid, and 1.41-fold less linoleic acid than the wild-type strain. Similarly to linoleic acid, all the other fatty acids were decreased in the mutant strain suggesting changes in the final fatty acid profile between the strains under study. Also, amino acids associated with the TCA cycle were more abundant in the mutant strain than in the wild-type strain. This Phase IV also matched with a switch in pH control including use of acid instead of base to maintain the pH at the desired level. The production of carotenoid ceased but AX continued increasing mainly due to a change in the composition of the total carotenoids. All collected data at Phase 4 suggest that the mutant strain was consuming lipids and peptides to obtain energy and metabolic precursors to continue producing AX.

### Integrating Transcriptomics Respiratory and Energy Metabolism

[0442] For Example 1, a genomic variant analysis was performed in mutant strains including X. dendrorhous BPAX-A1. This genomic analysis found mutations in the electron respiratory chain pathway and metabolomics analysis suggested changes in the TCA cycle associated with the electron respiratory chain. In Example 1, a subset of mutations that were considered of particular interest were identified. Notably, some of these mutated genes were overexpressed based on transcriptomic analysis (see Table 15, Table 16, and Table 17). For example, a mutation in the succinate dehydrogenase or complex II gene (CDZ981393) was identified; this gene was significantly upregulated in the mutant strain (Log 2 2.8, q<0.05). Also, the complex I or NADH:ubiquinone/plastoquinone oxidoreductase, chain 3 (CDZ96154) gene was mutated with two intron variants and this gene was significantly upregulated in transcriptomics (Log 2 4.73, q<0.05). The complex I or the NADH dehydrogenase subunit 4 (CDZ96151) gene had two mutations and was significantly upregulated in transcriptomics (Log 2 4.13, q<0.05). Similarly, cytochrome b gene CED80058 was mutated in the upstream and in the downstream of the gene; these mutations might be responsible for the significantly upregulated gene CED80058 in transcriptomics (Log 2 5.15, q<0.05) (FIG. 4). The complex IV or cytochrome c oxidase subunit 1 gene CED80056 had two mutations, the cytochrome c oxidase subunit 2 gene CDZ96152 had one mutation, and the cytochrome c oxidase subunit 3 gene CED80061 had two mutations. These genes were significantly upregulated in transcriptomics: CED80056 (Log 2 5.57, q<0.05), CDZ96152 (Log 2 5.30, q<0.05), and CED80061 (Log 2 5.01, q<0.05). Linked to these changes in the Complex IV gene, the cooper transporter gene CED82663 was significantly upregulated (Log 2 2.38, q<0.05) in the mutant strain probably increasing the copper availability inside the cell. As Complex

[0443] IV protein contains two copper catalytic centres (Cua and Cub), copper supplementation has been associated with an increase of AX production in X. dendrorhous (Srinivasan and Avadhani, 2012; Martinez-Cardenas et al., 2018). The ATP synthase subunit 6 gene CDZ96150 had two mutations in the upstream of the gene, and two other mutations in the downstream of the gene. Similarly, the ATP synthase subunit mitochondrial gene CDZ96333 had two mutations in the downstream of the gene. These CDZ96150 and CDZ96333 genes were significantly upregulated in transcriptomics (Log 2 5.25, q<0.05) and (Log 2 4.65, q<0.05), respectively. In X. dendrorhous, AX is utilized by oxidation of P-carotene through the P450 enzyme AX synthase (Ojima et al., 2006). This reaction needs the adjunct activity of the cytochrome P450 reductase or the cytochrome b as an electron donor (Alcaino et al., 2008a). Although no mutation was found in the AX synthase gene (CED83940), this gene was significantly upregulated in transcriptomics (Log 2 2.23, q<0.05).

[0444] Similarly, the cytochrome P450 CYP3/CYP5/CYP6/CYP9 subfamilies gene (CED84998) and the cytochrome P450 CYP4/CYP19/CYP26 subfamilies gene (CDZ98632) were significantly upregulated (Log 2 4.05, q<0.05) and (Log 2 1.45, q<0.05), respectively. Interestingly, the cytochrome P450 CYP2 subfamily (CED85015) was significantly downregulated (Log 2 −2.30, q<0.05). Cytochrome P450 reductase (crtR) of X. dendrorhous has been cloned and found to be an essential gene for AX biosynthesis (Alcaino et al., 2008b). That study suggested that only one crtR is required for AX biosynthesis. However, the disruption of that gene in X. dendrorhous was not lethal suggesting the existence of an alternative electron donor such as the cythochrome b5. Here, upregulation of two crtR genes (CED84998 and CDZ98632) and downregulation of another one (CED85015) was observed. No significant overexpression of cytochrome b5 was observed.

[0445] Significant upregulation of the Ferredoxin/adrenodoxin reductase gene (CDZ98521) (Log 2 −2.30, q<0.05) was observed. Ferredoxin/adrenodoxin reductase can transport electrons from a FADH2 coenzyme, produced during p-oxidation of lipids by the action of the acyl-CoA dehydrogenase, to a P450 systems of the mitochondria (Hanukoglu, 1992). Linked with this reaction step, here significant upregulation of an acyl-CoA dehydrogenase gene (CED84717) (Log 2 1.36, q<0.05) was observed, which is involved in the initial step of p-oxidation of lipids and production FADH2. This upregulated lipid degradation to provide FADH2 cofactors is potentially associated with the ongoing change in proportion of AX in the mutant strain BPAX-A1 after glucose was depleted and in its change of final lipids profile in which linoleic acid was 1.41-fold less than the wild-type.

[0446] Although not significant, all the other carotenoid-associated production genes (GGPP synthase, phytoene synthase, phytoene dehydrogenase, and lycopene cyclase) were nominally upregulated in transcriptomics in the mutant strain BPAX-A1 (Table 17). Linked to the TCA cycle, the a-ketoglutarate dehydrogenase gene (CED83799) was upregulated in transcriptomics in the mutant strain (Log 2 1.55, q<0.05) and downregulated the isocitrate lyase gene (CED85129)(Log 2 1.24, q<0.05). This suggests that the mutant strain is not using the glyoxylate shunt to deal with cell oxidative stress (Ahn et al., 2016), but the improved amounts of AX produced. Also, the asparagine synthase gene (CED83843) was upregulated in the mutant strain (Log 2 2.11, q<0.05). Asparagine is a TCA cycle derived (from oxaloacetate) amino acid which was more abundant in the mutant strain than in the wild-type strain (FIG. 20). Contrary to TCA cycle intermediates, asparagine supplementation inhibited carotenogenesis in a hyper producing strain of X. dendrorhous impaired to assimilate nitrogen sources (An, 2001). This suggests that asparagine overproduction can be detrimental for AX production and potentially can be used as a metabolic strategy to improve AX production. Also, asparagine abundance is probably associated with a decrease in the Carbon/Nitrogen ratio which has been associated with a decrease in carotenoid production in X. dendrorhous (Fomtana et al., 1996). Overall, these metabolic differential analyses suggest a correlation between genome changes in the BPAX-A1 mutant strain and its transcriptome and metabolome profile, which potentially increased AX production (FIGS. 14-17 and Table 9). The main driver for the improved AX production in the mutant BPAX-A1 strain seems likely to be a positive regulation of its respiratory electron transport chain (FIG. 20). This improved the availability of electrons required the incorporation of oxygen groups to the AX molecule and the increase the oxidative stress through ROS, which has been suggested to be a trigger of AX production in X. dendrorhous (Liu and Wu, 2006).

### Oxidative Stress Response in X. Dendrorhous

[0447] Carotenoids, including AX, present antioxidant properties that have been associated with survival mechanisms in X. dendrorhous and other microorganisms (Schroeder and Johnson, 1995). Normally, ROS are generated by an overflow of electrons in the electron respiratory chain triggered by an imbalance of electrons transfer during the reduction and oxidation of the ubiquinone pool. AX can quench ROS analogously to the superoxide dismutase. In this example, it was observed that the mutant strain upregulated genes associated with the electron transport chain that in turn triggered mechanisms associated with protection against ROS. First, the AX and total carotenoids accumulation in the mutant strain was significantly higher (p<05) than the ones found in the wild-type strain across all the growth and production phases (FIGS. 14-17; FIG. 20; Table 9).

[0448] Second, in yeast, hydrogen peroxide is increased during p-oxidation of lipids in the peroxisome, which can be neutralized by catalases (Yin et al., 2009). It has been reported that X. dendrorhous shows low activity of this enzyme (Schroeder and Johnson, 1995). Here, at the transcriptome level, two catalases genes were significantly upregulated in the mutant strain: the CDZ96425 (Log 2 2.89, q<0.05) and CDZ98863 (Log 2 1.91, q<0.05) genes, respectively. This suggests that the mutant X. dendrorhous strain may use catalases as a mechanism to alleviate oxidative stresses. And third, a report suggests that X. dendrorhous uses an antioxidant core which is modulated by the carotenoid production including monooxygenases, a cytochrome P450 enzyme, phosphoglucomutase, and glyceraldehyde 3-phosphate (Flores-Cotera et al., 2001; Martinez-Moya et al., 2015).

[0449] It is reported that X. dendrorhous showed low levels of superoxide dismutase, or glutathione peroxidase enzymes under inductions with single oxygen and peroxyl radicals (Schroeder and Johnson, 1995). However, in a separate study, at the proteome level, it was identified activity of the superoxide dismutase and some glutathione enzymes when grown on succinate as a carbon source, which increased AX by 2.33-fold (Martinez-Moya et al., 2015). In agreement with that study, here two glutathione-S-transferase genes were significantly upregulated in the mutant strain: CED84930 (Log 2 6.09, q<0.05) and CDZ97957 (Log 2 5.72, q<0.05) (Table 16 and Table 17). It is reported that the glutathione S-transferases counteract the mutagenic effect of aldehyde products of lipid peroxidation (Ames et al., 1993). Generally, glutathione, glutathione enzymes, and superoxide dismutase are used as oxidative stress biomarkers in trials to evaluated the antioxidant effect of certain chemicals or drugs (Ames et al., 1993). Using these markers, AX has shown to be effective to stimulate these oxidative stress mechanisms in rainbow trout (Elia et al., 2019). In addition, the highest overexpressed gene in the mutant strain was the conidiation-specific protein 6 gene (CED85080) (Log 2 9.29, q<0.05). This protein has been associated with survival mechanisms against environmental stresses (Zhang et al., 2016). Overall, the mutant strain showed upregulation of the electron transport chain which might increased ROS triggering some protective oxidative stress mechanisms including higher AX production, upregulation of AX synthase, P450 reductase, and glutathione-related genes.

### Lipid Biosynthesis

[0450] The fatty acid pathway in X. dendrorhous has been elucidated (Sharma et al., 2015). The synthesis starts with the acetyl CoA carboxylase and the acyl carrier protein (ACP) for the formation of acetyl-ACP and malonyl-ACP, which is followed by condensations, ketoacyl reduction, a dehydratase reaction, and enoyl reduction all the way to palmityl-CoA are catalyzed by two multi-enzyme complexes FAS1 and FAS2. The FAS1 has functional domains of malony transferase, enoly reductase, hydroxyacyl dehydratase, and malony/palmitoyl transferase and FAS2 has functional groups of ketoacyl reductase, ketoacyl synthase, and phosphopantetheinyl transferase. The additional genes involved in the elongation of C16 to C18 fatty acid by the fatty acid elongase, and the insertion of a delta-9 and a delta-12 double bond by delta 9 fatty acid desaturase, and delta 12 fatty acid desaturase, respectively. From the mitochondrial fatty acid enzymes, palmitic acid can be synthesised by palmitoyl thioesterase from palmytil-ACP. Condensation, ketoacyl reduction, dehydratase, and enoyl-reduction can be also carried out by acetyl-CoA acyltransferase, 2 ketoacyl reductase, enoyl-CoA hydratase, or 3-hydroxyacyl CoA dehydrogenase, respectively.

[0451] In this example, another mutation was found in the delta 9 fatty acid desaturase. A report suggest that this enzyme has preferences for substrates of C18:1 and C16:1 converting to C18:2 and C16:2 fatty acids (L. Zhang et al., 2020). The most abundant fatty acids in the P. rhodozyma pathway are linoleate (C18:2), stearic acid (18:0), oleic acid (C18:1), palmitic acid (C16:1), and hexadecanoic acid (16:2) (Sharma et al., 2015). Although not significant, the delta 9 fatty acid desaturase gene (CED83656) was nominally downregulated in the mutant strain (Log 2 −0.53, q>0.05). This suggests that delta 9 fatty acid desaturase might be influencing the fatty acid pathway in the novel strains of P. rhodozyma. A decrease in the fatty acid and ergosterol metabolism in P. rhodozyma increased AX production (Miao et al., 2011). Also, the FAS1 gene (CED83610) was significantly upregulated in the mutant strain (Log 2 1.92, q<0.05). Similarly, the delta-6-desaturase gene (CED83550) was significantly upregulated (Log 2 1.38, q<0.05). This gene is the first step in the degradation of linoleic acid before to be utilised by the microorganism (Horrobin et al., 1993). Overall, these findings provide a possible explanation as to why linoleic acid was more abundant in the wild-type strain than in the mutant strain at the end of the fermentation.

### Example 3: Proteomic Analysis of a High Astaxanthin Producer Strain of Xanthophyllomyces dendrorhous

[0452] In this example, proteomic analysis was performed to complement the metabolomic and transcriptomic analysis of Example 2.

### Materials and Methods

### Strains, Media, and Growth Conditions

[0453] Strains, media, and growth conditions were as for Example 2, above.

### Proteomic Extraction, Quantification, Digestion, and SWATH Analyses.

[0454] Samples equivalent to 20-50 A600 units were harvested from the instrumented fermenters at Growth Phase 3 and Growth Phase 4 as described in Example 2. Cells were pelleted at 14000×g for 5 min at 4° C. The supernatant was discarded, and the pellet was washed twice with ice-cold water. The washed pellet was then re-suspended in 2 mL of sodium dodecyl sulfate (SDS) lysis buffer and transferred to a tubes containing 0.5 g of acid washed glass beads (Sigma Cat. No. G1152-100G). The tubes were chilled on ice for 5 minutes and then disrupted using five bead-beating cycles of 5 min using a Qiagen Tissue Lyser II. After disruption, the tubes were centrifuged at 14000×g for 10 min at 4° C.

[0455] The extracted proteins were quantified using the Pierce BCA Protein Assay Kit (ThermoFisher Cat. No. 23225). The FASP and C18 StageTip protocols were then applied to digest the extracted proteins and desalt the peptides, respectively (Jacek R Wisniewski, Alexandre Zougman, Nagarjuna Nagaraj, 2009). The peptides of digested samples were quantified using the Pierce Quantitative Colorimetric Peptide Kit (ThermoFisher Cat. No. 23275) and used to normalize their concentration before submitting the samples to mass spectrometry (MS) analysis. The sequential window acquisition of all theoretical mass spectra (SWATH) technique was then applied to the peptide samples using the Sciex 5600 QTOF (Yeo et al., 2016).

[0456] To prepare the library, a mixture of all peptide samples (PBQC) was MS analysed in Data Dependent Acquisition mode (DDA). For this, ProteinPilot 5.0.2 was first used to identify proteins using the Paragon method and the published and annotated P. rhodozyma CBS6938 genome using a quality threshold of 1.3 (95%) (Sharma et al., 2015). Skyline was then used to create the spectral library and SWATH mode analysed samples. Differential proteome expression was assessed between the mutant X. dendrorhous BPAX-A1 (referred to as MYM0 in Example 1) and wild-type X. dendrorhous CBS 6938 at Phase 3 and Phase 4.

### Results

[0457] Differential protein expression results are set out for Growth Phase 3 in FIG. 22 and Table 18; and for Growth Phase 4 in FIG. 23 and Table 19.

### Example 4: Products Incorporating Astaxanthin

[0458] This example provides details of certain typical formulation for supplementing domestic or companion animals, the formulation including astaxanthin produced as herein described. The formulation may be referred to as ‘NatuAX’, although without limitation thereto.

[0459] The formulations are also rich in dietary fibre, vitamins, beta-glucan, and amino acids. An analysis of fatty acid profile for the formulations is provided in FIG. 21. An analysis of amino acid profile is provided in Table 11.

[0460] Formulations for feline, canine, and equine use have been developed. All formulations include astaxanthin and beta-glucans.

[0461] In general, astaxanthin may provide benefits including:
[0462] Antioxidant activity for supporting the immune system
[0463] Mitochondrial protection against reactive oxygen species
[0464] Reduction in cellular damage and lipid peroxidation
[0465] Improve response and processing of antigens

[0466] In general, beta-glucans may provide benefits including:
[0467] Stimulation of the immune system
[0468] Reduction of blood concentration of total cholesterol
[0469] Antioxidant properties
[0470] Reduction of inflammatory response

[0471] Equine variations comprise polyphenols, which may provide benefits including:
[0472] Combat inflammation and the natural aging process (‘inflamm-aging’)
[0473] Decrease the amount of non-steroidal anti-inflammatory drugs administered to older horses
[0474] Antioxidant activity for reducing oxidative stress and improve immune function
[0475] Support muscle recovery in endurance horses
   Specifications for the feline, canine, and equine formulations are as follows:

### Feline

### Component Percentages:

[0476] Astaxanthin: 0.25%=2.5 g/kg
[0477] beta-Glucan: 15%=150 g/kg
[0478] Carriers: =847.5% g/kg=847.5 g/kg

### Minimum and Maximum Recommended Dose Rates:

[0479] Adult cats<5 kg: 1 g/day
[0480] Adult cats>5 kg: 2 g/day
[0481] Kittens and geriatric cats: 2 g/day

### Canine

### Component Percentages:

[0482] Astaxanthin: 0.25%=2.5 g/kg
[0483] beta-Glucan: 15%=150 g/kg
[0484] Carriers: =847.5% g/kg=847.5 g/kg

### Minimum and Maximum Recommended Dose Rates:

[0485] Extra small dogs (8 kg)=1 g/day
[0486] Small dogs (16 kg): 2 g/day
[0487] Medium dogs (24 kg): 3 g/day
[0488] Large dogs (32 kg): 4 g/day
[0489] Extra large dogs (40 kg): 5 g/day

### (Puppies and Geriatric Dogs Require Double the Recommended Dose)

### Equine

### Component Percentages:

[0490] Astaxanthin: 0.075%=0.75 g/kg
[0491] beta-Glucan: 4.22%=42.2 g/kg
[0492] Polyphenols: 2.5%=25 g/kg
[0493] Carriers: 93.21% g/kg=932.05 g/kg

### Minimum and Maximum Recommended Dose Rates:

[0494] 100 g per day orally or mixed in feed

[0495] (Horses in poor condition or commencing training require double the recommended dose for the first 3 weeks)

### REFERENCES

[0496] Adams, K. J., Pratt, B., Bose, N., Dubois, L. G., St. John-Williams, L., Perrott, K. M., Ky, K., Kapahi, P., Sharma, V., Maccoss, M. J., Moseley, M. A., Colton, C. A., Maclean, B. X., Schilling, B., Thompson, J. W., 2020. Skyline for Small Molecules: A Unifying Software Package for Quantitative Metabolomics. J. Proteome Res. 19, 1447-1458. doi.org/10.1021/acs.jproteome.9b00640
[0497] Ahn, S., Jung, J., Jang, I. A., Madsen, E. L., Park, W., 2016. Role of glyoxylate shunt in oxidative stress response. J. Biol. Chem. 291, 11928-11938. doi.org/10.1074/jbc.M115.708149
[0498] Alcaíno, J., Barahona, S., Carmona, M., Lozano, C., Marcoleta, A., Niklitschek, M., Sepúlveda, D., Baeza, M., Cifuentes, V., 2008a. Cloning of the cytochrome p450 reductase (crtR) gene and its involvement in the astaxanthin biosynthesis of Xanthophyllomyces dendrorhous. BMC Microbiol. 8, 1-13. doi.org/10.1186/1471-2180-8-169
[0499] Alcaíno, J., Barahona, S., Carmona, M., Lozano, C., Marcoleta, A., Niklitschek, M., Sepúlveda, D., Baeza, M., Cifuentes, V., 2008b. Cloning of the cytochrome p450 reductase (crtR) gene and its involvement in the astaxanthin biosynthesis of Xanthophyllomyces dendrorhous. BMC Microbiol. 8. doi.org/10.1186/1471-2180-8-169
[0500] Ambati, R. R., Moi, P. S., Ravi, S., Aswathanarayana, R. G., 2014. Astaxanthin: Sources, extraction, stability, biological activities and its commercial applications—A review. Mar. Drugs 12, 128-152. doi.org/10.3390/md12010128
[0501] Ames, B. N., Shigenaga, M. K., Hagen, T. M., 1993. Oxidants, antioxidants, and the degenerative diseases of aging (cancer/mutation/endogenous DNA adducts/oxygen radicals), Proc. Natl. Acad. Sci. USA.
[0502] An, G. H., 2001. Improved growth of the red yeast, Phaffia rhodozyma (Xanthophyllomyces dendrorhous), in the presence of tricarboxylic acid cycle intermediates. Biotechnol. Lett. 23, 1005-1009. doi.org/10.1023/A:1010523800650
[0503] An, G. H., Jang, B. G., Cho, M. H., 2001. Cultivation of the carotenoid-hyperproducing mutant 2A2N of the red yeast Xanthophyllomyces dendrorhous (Phaffia rhodozyma) with molasses. J. Biosci. Bioeng. 92, 121-5. doi.org/10.1263/jbb.92.121
[0504] An, G. H., Schuman, D. B., Johnson, E. A., 1989. Isolation of Phaffia rhodozyma Mutants with Increased Astaxanthin Content. Appl. Environ. Microbiol. 55, 116-24.
[0505] Andrews, S., 2010. FastQC: A quality control tool for high throughput sequence data [WWW Document]. Online. URL www.bioinformatics.babraham.ac.uk/projects/fastqc/
[0506] Auch, A. F., Klenk, H.-P., Göker, M., 2010. Standard operating procedure for calculating genome-to-genome distances based on high-scoring segment pairs. Stand. Genomic Sci. 2, 142-8. doi.org/10.4056/sigs.541628
[0507] Auwera, G. A., Carneiro, M. O., Hartl, C., Poplin, R., del Angel, G., Levy-Moonshine, A., Jordan, T., Shakir, K., Roazen, D., Thibault, J., Banks, E., Garimella, K. V., Altshuler, D., Gabriel, S., DePristo, M. A., 2013. From FastQ Data to High-Confidence Variant Calls: The Genome Analysis Toolkit Best Practices Pipeline. Curr. Protoc. Bioinforma. 43, 11.10.1-11.10.33. doi.org/10.1002/0471250953.bi1110s43
[0508] Bergstrom, J. R., Nelssen, J. L., Tokach, M. D., Bergstrom, J. R.; Nelssen, J. L.; Tokach, M. D.; Derouchey, J. M.; Goodband, R. D.; Dritz, S. S., 1968. An evaluation of astaxanthin as a nutraceutical growth promoter An evaluation of astaxanthin as a nutraceutical growth promoter in starter diets for weanling pigs in starter diets for weanling pigs Recommended Citation Recommended Citation. Kansas Agric. Exp. Stn. Res. Reports 0. doi.org/10.4148/2378-5977.6963
[0509] Bolger, A. M., Lohse, M., Usadel, B., 2014. Trimmomatic: A flexible trimmer for Illumina sequence data. Bioinformatics 30, 2114-2120. doi.org/10.1093/bioinformatics/btu170
[0510] Bon, J. A., Leathers, T. D., Jayaswal, R. K., 1997. Isolation of astaxanthin-overproducing mutants of Phaffia rhodozyma. Biotechnol. Lett. 19, 109-112. doi.org/10.1023/A:1018391726206
[0511] Brühl, W. K., Hassloch, K. H., Neuhofen, J. P., Speyer, H. E., 1997. Preparation of astaxanthin.
[0512] Calo, P., de Miguel, T., Velazquez, J. B., Villa, T. G., 1995. Mevalonic acid increases trans-astaxanthin and carotenoid biosynthesis in Phaffia rhodozyma. Biotechnol. Lett. 17, 575-578.
[0513] Canelas, A. B., Ras, C., ten Pierick, A., van Dam, J. C., Heijnen, J. J., van Gulik, W. M., 2008. Leakage-free rapid quenching technique for yeast metabolomics. Metabolomics 4, 226-239. doi.org/10.1007/s11306-008-0116-4
[0514] Canelas, A. B., Ten Pierick, A., Ras, C., Seifar, R. M., Van Dam, J. C., Van Gulik, W. M., Heijnen, J. J., 2009. Quantitative evaluation of intracellular metabolite extraction techniques for yeast metabolomics. Anal. Chem. 81, 7379-7389. doi.org/10.1021/ac900999t
[0515] Cannizzaro, C., Christensen, B., Nielsen, J., Stockar, U. Von, 2004. Metabolic network analysis on Phaffia rhodozyma yeast using 13C-labeled glucose and gas chromatography-mass spectrometry. Metab. Eng. 6, 340-351. doi.org/10.1016/j.ymben.2004.06.001
[0516] Capelli, B., Bagchi, D., Cysewski, G. R., 2014. Synthetic astaxanthin is significantly inferior to algal-based astaxanthin as an antioxidant and may not be suitable as a human nutraceutical supplement. Nutrafoods 2013 124 12, 145-152. doi.org/10.1007/S13749-013-0051-5
[0517] Capelli, B., Talbott, S., Ding, L., 2019. Astaxanthin sources: Suitability for human health and nutrition. Funct. Foods Heal. Dis. 9, 430-445. doi.org/10.31989/ffhd.v9i6.584
[0518] Chen, T., Speight, R., Sadowsky, P., Blanksby, S., 2020. COMPOSITIONAL ANALYSIS OF NEW MICROBIAL FEED SUPPLEMENTS PRODUCED FROM MEAT PROCESSING CO-PRODUCTS. Queensland University of Technology.
[0519] Chumpolkulwong, N., Kakizono, T., Nagai, S., Nishio, N., 1997. Increased astaxanthin production by Phaffia rhodozyma mutants isolated as resistant to diphenylamine. J. Ferment. Bioeng. 83, 429-434. doi.org/10.1016/S0922-338X(97)82996-0
[0520] Chun, S. B., Chin, J. E., Bai, S., An, G. H., 1992. Strain improvement of Phaffia rhodozyma by protoplast fusion. FEMS Microbiol. Lett. 93, 221-226. doi.org/10.1016/0378-1097(92)90466-2
[0521] Cingolani, P., Platts, A., Wang, L. L., Coon, M., Nguyen, T., Wang, L., Land, S. J., Lu, X., Ruden, D. M., 2012. A program for annotating and predicting the effects of single nucleotide polymorphisms, SnpEff: SNPs in the genome of Drosophila melanogaster strain w 1118; iso-2; iso-3. Fly (Austin). 6, 80-92. doi.org/10.4161/fly.19695
[0522] Cruz, J. M., Parajo, J. C., 1998. Improved astaxanthin production by Xanthophyllomyces dendrorhous growing on enzymatic wood hydrolysates containing glucose and cellobiose. Food Chem. 63, 479-484. doi.org/10.1016/S0308-8146(98)00061-2
[0523] De Livera, A. M., Dias, D. A., De Souza, D., Rupasinghe, T., Pyke, J., Tull, D., Roessner, U., McConville, M., Speed, T. P., 2012. Normalizing and integrating metabolomics data. Anal. Chem. 84, 10768-10776. doi.org/10.1021/ac302748b
[0524] Dominguez-Bocanegra, A. R., Torres-Munoz, J. A., 2004. Astaxanthin hyperproduction by Phaffia rhodozyma (now Xanthophyllomyces dendrorhous) with raw coconut milk as sole source of energy. Appl. Microbiol. Biotechnol. 66, 249-252. doi.org/10.1007/s00253-004-1686-3
[0525] Elia, A. C., Prearo, M., Josef, A., Dorr, M., Pacini, N., Magara, G., Brizio, P., Gasco, L., Abete, M. C., 2019. Journal of Toxicology and Environmental Health, Part A Current Issues Effects of astaxanthin and canthaxanthin on oxidative stress biomarkers in rainbow trout Effects of astaxanthin and canthaxanthin on oxidative stress biomarkers in rainbow trout. J. Toxicol. Environ. Heal. Part A 82, 760-768. doi.org/10.1080/15287394.2019.1648346
[0526] Flores-Cotera, L. B., Chávez-Cabrera, C., Martinez-Cárdenas, A., Sánchez, S., García-Flores, O. U., 2021. Deciphering the mechanism by which the yeast Phaffia rhodozyma responds adaptively to environmental, nutritional, and genetic cues. J. Ind. Microbiol. Biotechnol. 48. doi.org/10.1093/jimb/kuab048
[0527] Flores-Cotera, L. B., Martin, R., Sánchez, S., 2001. Citrate, a possible precursor of astaxanthin in Phaffia rhodozyma: Influence of varying levels of ammonium, phosphate and citrate in a chemically defined medium. Appl. Microbiol. Biotechnol. 55, 341-347. doi.org/10.1007/s002530000498
[0528] Flores-Cotera, L. B., Sánchez, S., 2001. Copper but not iron limitation increases astaxanthin production by Phaffia rhodozyma in a chemically defined medium. Biotechnol. Lett. 23, 793-797. doi.org/10.1023/A:1010358517806
[0529] Fomtana, J. D., Guimarães, M. F., Martins, N. T., Fontana, C. A., Baron, M., 1996. Culture of the astaxanthinogenic yeast Phaffia rhodozyma in low-cost media. Appl. Biochem. Biotechnol. 57-58, 413-422. doi.org/10.1007/BF02941721
[0530] Fontana, J. D., Chocial, M. B., Baron, M., Guimaraes, M. F., Maraschin, M., Ulhoa, C., Florêncio, J. a, Bonfim, T. M., 1997. Astaxanthinogenesis in the yeast Phaffia rhodozyma: optimization of low-cost culture media and yeast cell-wall lysis. Appl. Biochem. Biotechnol. 63-65, 305-14. doi.org/10.1007/BF02920432
[0531] Fontana, J. D., Czeczuga, B., Bonfim, T. M. B., Chociai, M. B., Oliveira, B. H., Guimarães, M. F., Baron, M., 1996. Bioproduction of carotenoids: The comparative use of raw sugarcane juice and depolymerized bagasse by Phaffia rhodozyma. Bioresour. Technol. 58, 121-125. doi.org/10.1016/S0960-8524(96)00092-2
[0532] Fu, Y. H., Marzluf, G. A., 1990. nit-2, the major nitrogen regulatory gene of Neurospora crassa, encodes a protein with a putative zinc finger DNA-binding domain. Mol. Cell. Biol. 10, 1056-1065. doi.org/10.1128/mcb.10.3.1056
[0533] Gassel, S., Schewe, H., Schmidt, I., Schrader, J., Sandmann, G., 2013. Multiple improvement of astaxanthin biosynthesis in Xanthophyllomyces dendrorhous by a combination of conventional mutagenesis and metabolic pathway engineering. Biotechnol. Lett. 35, 565-569. doi.org/10.1007/s10529-012-1103-4
[0534] Gil-Hwan, A. N., Schuman, D. B., Johnson, E. A., 1989. Isolation of Phaffia rhodozyma mutants with increased astaxanthin content. Appl. Environ. Microbiol. 55, 116-124. doi.org/10.1128/aem.55.1.116-124.1989
[0535] Goldstein, J. L., Brown, M. S., 1990a. Regulation of the mevalonate pathway. Nature 343, 425-430. doi.org/10.1038/343425a0
[0536] Goldstein, J. L., Brown, M. S., 1990b. Regulation of the mevalonate pathway. Nature. doi.org/10.1038/343425a0
[0537] Grinberg, A. V., Hannemann, F., Schiffler, B., Miller, J., Heinemann, U., Bernhardt, R., 2000. Adrenodoxin: Structure, stability, and electron transfer properties. Proteins Struct. Funct. Genet. 40, 590-612. doi.org/10.1002/1097-0134(20000901)40:4<590::AID-PROT50>3.0.CO;2-P
[0538] Gu, W. L., An, G. H., Johnson, E. a, 1997. Ethanol increases carotenoid production in Phaffia rhodozyma. J. Ind. Microbiol. Biotechnol. 19, 114-117. doi.org/10.1038/sj.jim.2900425
[0539] Haard, N. F., 1988. Astaxanthin formation by the yeast Phaffia rhodozyma on molases. Biotechnol. Lett. 10, 609-614.
[0540] Hanukoglu, I., 1992. Steroidogenic enzymes: Structure, function, and role in regulation of steroid hormone biosynthesis. J. Steroid Biochem. Mol. Biol. 43, 779-804. doi.org/10.1016/0960-0760(92)90307-5
[0541] Hara, K. Y., Morita, T., Mochizuki, M., Yamamoto, K., Ogino, C., Araki, M., Kondo, A., 2014. Development of a multi-gene expression system in Xanthophyllomyces dendrorhous. Microb. Cell Fact. 13, 175. doi.org/10.1186/s12934-014-0175-3
[0542] Hasan, M., Azhar, M., Nangia, H., Bhatt, P. C., Panda, B. P., 2016. Influence of High Pressure Homogenization, Ultra-Sonication and Supercritical Fluid on Free Astaxanthin Extraction From β-Glucanase Treated Phaffia rhodozyma Cells. Prep. Biochem. Biotechnol. 0, 150527100841001. doi.org/10.1080/10826068.2014.995807
[0543] Higashida, K., Nakashimada, Y., Kakizono, T., Nishio, N., 1997. Influence of Oxygen and Glucose on Primary Metabolism and Astaxanthin Production by Phaffia rhodozyma in Batch and Fed-Batch Cultures: Kinetic and Stoichiometric Analysis. Microbiology 63, 4471-4478.
[0544] Higuera-Ciapara, I., Félix-Valenzuela, L., Goycoolea, F. M., 2006. Astaxanthin: a review of its chemistry and applications. Crit. Rev. Food Sci. Nutr. 46, 185-96. doi.org/10.1080/10408690590957188
[0545] Honda, T., Takahashi, J., Aichi-Ken, J., Toyama-ken, J., 2007. ASTAXANTHIN-CONTAINING PET FOODS. US 2007/0128310 A1.
[0546] Horrobin, D. F., Crawford, M. A., Vergroesen, A. J., Horrobin, D. F., 1993. Fatty acid metabolism in health and disease: The role of Δ-6-desaturase, in: American Journal of Clinical Nutrition. Am J Clin Nutr. doi.org/10.1093/ajcn/57.5.732S
[0547] Jacek R Wisniewski, Alexandre Zougman, Nagarjuna Nagaraj, M. M. (2009) Universal sample preparation method for proteome analysis. Nat Methods 6: 377-362.
[0548] Jian, X., Boerwinkle, E., Liu, X., 2013. In silico tools for splicing defect prediction: a survey from the viewpoint of end users. doi.org/10.1038/gim.2013.176
[0549] Johnson, E. a., An, G.-H., 1991. Astaxanthin from Microbial Sources. Crit. Rev. Biotechnol. 11, 297-326. doi.org/10.3109/07388559109040622
[0550] Kajiwara, S., Fraser, P. D., Kondo, K., Misawa, N., 1997. Expression of an exogenous isopentenyl diphosphate isomerase gene enhances isoprenoid biosynthesis in Escherichia coli. Biochem. J. 324, 421-426. doi.org/10.1042/bj3240421
[0551] Krogh, A., Larsson, B., Von Heijne, G., Sonnhammer, E. L. L., 2001. Predicting transmembrane protein topology with a hidden Markov model: Application to complete genomes. J. Mol. Biol. 305, 567-580. doi.org/10.1006/jmbi.2000.4315
[0552] Kryvokhyzha, D., 2016. GATK the best practice for a non-model organism [WWW Document]. URL evodify.com/gatk-in-non-model-organism/
[0553] Langmead, B., Salzberg, S. L., 2012. Fast gapped-read alignment with Bowtie 2. Nat. Methods 9, 357-9. doi.org/10.1038/nmeth.1923
[0554] Lengger, B., Jensen, M. K., 2020. Engineering G protein-coupled receptor signalling in yeast for biotechnological and medical purposes. FEMS Yeast Res. doi.org/10.1093/femsyr/foz087
[0555] Lewis, M. J., Ragot, N., Berlant, M. C., Miranda, M., 1990. Selection of astaxanthin-overproducing mutants of Phaffia rhodozyma with B-ionone. Appl. Environ. Microbiol. 56, 2944-2945.
[0556] Li, H., Durbin, R., 2010. Fast and accurate long-read alignment with Burrows-Wheeler transform. Bioinformatics 26, 589-595. doi.org/10.1093/bioinfornatics/btp698
[0557] Li, H., Handsaker, B., Wysoker, A., Fennell, T., Ruan, J., Homer, N., Marth, G., Abecasis, G., Durbin, R., 2009. The Sequence Alignment/Map format and SAMtools. Bioinformatics 25, 2078-9. doi.org/10.1093/bioinformatics/btp352
[0558] Li, X., Wang, X., Duan, C., Yi, S., Gao, Z., Xiao, C., Agathos, S. N., Wang, G., Li, J., 2020. Biotechnological production of astaxanthin from the microalga Haematococcus pluvialis. Biotechnol. Adv. 43, 107602. doi.org/10.1016/J.BIOTECHADV.2020.107602
[0559] Libkind, D., Moline, M., Van Broock, M., 2011. Production of the UVB-absorbing compound mycosporine-glutaminol-glucoside by Xanthophyllomyces dendrorhous (Phaffia rhodozyma). FEMS Yeast Res. 11, 52-59. doi.org/10.1111/j.1567-1364.2010.00688.x
[0560] Liu, X., Osawa, T., 2007. Cis astaxanthin and especially 9-cis astaxanthin exhibits a higher antioxidant activity in vitro compared to the all-trans isomer. Biochem. Biophys. Res. Commun. 357, 187-193. doi.org/10.1016/J.BBRC.2007.03.120
[0561] Liu, Y. S., Wu, J. Y., 2006. Hydrogen peroxide-induced astaxanthin biosynthesis and catalase activity in Xanthophyllomyces dendrorhous. Appl. Microbiol. Biotechnol. 73, 663-668. doi.org/10.1007/s00253-006-0501-8
[0562] Luna-Flores, C. H., Palfreyman, R. W., Krömer, J. O., Nielsen, L. K., Marcellin, E., 2016. Improved production of propionic acid using genome shuffling. Biotechnol. J. 1-12. doi.org/10.1002/biot.201600120
[0563] Luna-Flores, C. H., Ramirez-Cordova, J. J., Pelayo-Ortiz, C., Femat, R., Herrera-López, E. J., 2010. Batch and fed-batch modeling of carotenoids production by Xanthophyllomyces dendrorhous using Yucca fillifera date juice as substrate. Biochem. Eng. J. 53, 131-136. doi.org/10.1016/j.bej.2010.10.004
[0564] Luna-Flores, C. H., Stowers, C. C., Cox, B. M., Nielsen, L. K., Marcellin, E., 2018. Linking genotype and phenotype in an economically viable propionic acid biosynthesis process. Biotechnol. Biofuels 11, 224. doi.org/10.1186/s13068-018-1222-9
[0565] Luna-Flores, C. H., Stowers, C. C., Cox, B. M., Nielsen, L. K., Marcellin, E., 2017. Scalable and economical process for propionic acid biosynthesis. Biotechnol. Biofuels Submitted.
[0566] Martinez-Cárdenas, A., Chávez-Cabrera, C., Vasquez-Bahena, J. M., Flores-Cotera, L. B., 2018. A common mechanism explains the induction of aerobic fermentation and adaptive antioxidant response in Phaffia rhodozyma. Microb. Cell Fact. 17, 53. doi.org/10.1186/s12934-018-0898-7
[0567] Martinez-Moya, P., Niehaus, K., Alcaino, J., Baeza, M., Cifuentes, V., 2015. Proteomic and metabolomic analysis of the carotenogenic yeast Xanthophyllomyces dendrorhous using different carbon sources. BMC Genomics 16, 1-18. doi.org/10.1186/s12864-015-1484-6
[0568] Mendez, K. M., Pritchard, L., Reinke, S. N., Broadhurst, D. I., 2019. Toward collaborative open data science in metabolomics using Jupyter Notebooks and cloud computing. Metabolomics 15, 1-16. doi.org/10.1007/sI1306-019-1588-0
[0569] Miao, L., Chi, S., Tang, Y., Su, Z., Yin, T., Guan, G., Li, Y., 2011. Astaxanthin biosynthesis is enhanced by high carotenogenic gene expression and decrease of fatty acids and ergosterol in a Phaffia rhodozyma mutant strain. FEMS Yeast Res. 11, 192-201. doi.org/10.1 111/j.1567-1364.2010.00705.x
[0570] Miller, G. L., 1959. Use of Dinitrosalicylic Acid Reagent for Determination of Reducing Sugar. Anal. Chem. 31, 426-428. doi.org/10.1021/ac60147a030
[0571] Misawa, N., 2021. Carotenoids: Biosynthetic and Biofunctional Approaches.
[0572] Moretti, V. M., Mentasti, T., Bellagamba, F., Luzzana, U., Caprino, F., Turchini, G. M., Giani, I., Valfrè, F., 2006. Determination of astaxanthin stereoisomers and colour attributes in flesh of rainbow trout (Oncorhynchus mykiss) as a tool to distinguish the dietary pigmentation source. Food Addit. Contain. 23, 1056-63. doi.org/10.1080/02652030600838399
[0573] Mussagy, C. U., Pereira, J. F. B., Dufossé, L., Raghavan, V., Santos-Ebinuma, V. C., Pessoa, A., 2021. Advances and trends in biotechnological production of natural astaxanthin by Phaffia rhodozyma yeast. Crit. Rev. Food Sci. Nutr. 0, 1-15. doi.org/10.1080/10408398.2021.1968788
[0574] Najafi, N., Ahmadi, A.-R., Hosseini, R., Golkhoo, S., 2011. Gamma irradiation as a useful tool for the isolation of astaxanthin-overproducing mutant strains of Phaffia rhodozyma. Can. J. Microbiol. 57, 730-734. doi.org/10.1139/W11-060
[0575] Ni, H., Chen, Q., Ruan, H., Yang, Y., Li, L., Wu, G., Hu, Y., He, G., 2007. Studies on optimization of nitrogen sources for astaxanthin production by Phaffia rhodozyma. J. Zhejiang Univ. Sci. B 8, 365-70. doi.org/10.1631/jzus.2007.B0365
[0576] Niklitschek, M., Alcaino, J., Barahona, S., Sepúlveda, D., Lozano, C., Carmona, M., Marcoleta, A., Martinez, C., Lodato, P., Baeza, M., Cifuentes, V., 2008. Genomic organization of the structural genes controlling the astaxanthin biosynthesis pathway of Xanthophyllomyces dendrorhous. Biol. Res. 41, 93-108. doi.org/10.4067/S0716-97602008000100011
[0577] Ojima, K., Breitenbach, J., Visser, H., Setoguchi, Y., Tabata, K., Hoshino, T., Van Den Berg, J., Sandmann, G., 2006. Cloning of the astaxanthin synthase gene from Xanthophyllomyces dendrorhous (Phaffia rhodozyma) and its assignment as a β-carotene 3-hydroxylase/4-ketolase. Mol. Genet. Genomics 275, 148-158. doi.org/10.1007/s00438-005-0072-x
[0578] Pan, X., Wang, B., Duan, R., Jia, J., Li, J., Xiong, W., Ling, X., Chen, C., Huang, X., Zhang, G., Lu, Y., 2020. Enhancing astaxanthin accumulation in Xanthophyllomyces dendrorhous by a phytohormone: metabolomic and gene expression profiles. Microb. Biotechnol. doi.org/10.1111/1751-7915.13567
[0579] Park, J. S., Kim, H. W., Mathison, B. D., Hayek, M. G., Massimino, S., Reinhart, G. A., Chew, B. P., 2010. Astaxanthin uptake in domestic dogs and cats. Nutr. Metab. 7, 52. doi.org/10.1186/1743-7075-7-52
[0580] Perenlei, G., Tojo, H., Okada, T., Kubota, M., Kadowaki, M., Fujimura, S., 2014. Effect of dietary astaxanthin rich yeast, Phaffia rhodozyma, on meat quality of broiler chickens. Anim. Sci. J. 85, 895-903. doi.org/10.1111/asj.12221
[0581] Reynders, M. B., Rawlings, D. E., Harrison, S. T. L., 1997. Demonstration of the Crabtree effect in Phaffia rhodozyma during continuous and fed-batch cultivation. Biotechnol. Lett. 19, 549-552. doi.org/10.1023/A:1018341421122
[0582] Rodriguez-Sáiz, M., De La Fuente, J. L., Barredo, J. L., 2010. Xanthophyllomyces dendrorhous for the industrial production of astaxanthin. Appl. Microbiol. Biotechnol. 88, 645-658. doi.org/10.1007/s00253-010-2814-x
[0583] Rohmer, M., 1999. The discovery of a mevalonate-independent pathway for isoprenoid biosynthesis in bacteria, algae and higher plants. Nat. Prod. Rep. 16, 565-574. doi.org/10.1039/a709175c
[0584] Sandmann, G., 1994. Carotenoid biosynthesis in microorganisms and plants. Eur. J. Biochem. 223, 7-24. doi.org/10.1111/j.1432-1033.1994.tb18961.x
[0585] Schewe, H., Kreutzer, A., Schmidt, I., Schubert, C., Schrader, J., 2017. High concentrations of biotechnologically produced astaxanthin by lowering pH in a Phaffia rhodozyma bioprocess. Biotechnol. Bioprocess Eng. 22, 319-326. doi.org/10.1007/s12257-016-0349-4
[0586] Schmidt, H., Jirstrand, M., 2006. Systems Biology Toolbox for MATLAB: A computational platform for research in systems biology. Bioinformatics 22, 514-515. doi.org/10.1093/bioinformatics/bti799
[0587] Schmidt, I., Schewe, H., Gassel, S., Jin, C., Buckingham, J., Hümbelin, M., Sandmann, G., Schrader, J., 2011. Biotechnological production of astaxanthin with Phaffia rhodozyma/Xanthophyllomyces dendrorhous. Appl. Microbiol. Biotechnol. doi.org/10.1007/s00253-010-2976-6
[0588] Schneider, R., Brors, B., Massow, M., Weiss, H., 1997. Mitochondrial fatty acid synthesis: A relic of endosymbiontic origin and a specialized means for respiration. FEBS Lett. 407, 249-252. doi.org/10.1016/S0014-5793(97)00360-8
[0589] Schroeder, W. a, Johnson, E. a, 1993. Antioxidant role of carotenoids in Phaffia rhodozyma. J. Gen. Microbiol. 139, 907-912. doi.org/10.1099/00221287-139-5-907
[0590] Schroeder, W. A., Johnson, E. A., 1995. Singlet oxygen and peroxyl radicals regulate carotenoid biosynthesis in Phaffia rhodozyma. J. Biol. Chem. 270, 18374-18379. doi.org/10.1074/jbc.270.31.18374
[0591] Sedmak, J. J., Weerasinghe, D. K., Jolly, S. O., 1990. Extraction and quantification of astaxanthin from Phaffia rhodozyma. Biotechnol. Tech. 4, 107-112.
[0592] Shah, M. M. R., Liang, Y., Cheng, J. J., Daroch, M., 2016. Astaxanthin-producing green microalga Haematococcus pluvialis: From single cell to high value commercial products. Front. Plant Sci. doi.org/10.3389/fpls.2016.00531
[0593] Sharma, R., Gassel, S., Steiger, S., Xia, X., Bauer, R., Sandmann, G., 2015. The genome of the basal agaricomycete Xanthophyllomyces dendrorhous provides insights into the organization of its acetyl-CoA derived pathways and the evolution of Agaricomycotina 1-13. doi.org/10.1186/s12864-015-1380-0
[0594] Silva, C. M., Borba, T. M., Burkert, C. A. V, Burkert, J. F. M., 2012. Carotenoid production by Phaffia rhodozyma using raw glycerol as an additional carbon source. Int. J. Food Eng. 8. doi.org/10.1515/1556-3758.2843
[0595] Srinivasan, S., Avadhani, N. G., 2012. Cytochrome c oxidase dysfunction in oxidative stress. Free Radic. Biol. Med. doi.org/10.1016/j.freeradbiomed.2012.07.021
[0596] Sun, N., Lee, S., Song, K. Bin, 2004. Characterization of a carotenoid-hyperproducing yeast mutant isolated by low-dose gamma irradiation. Int. J. Food Microbiol. 94, 263-267. doi.org/10.1016/50168-1605(03)00311-8
[0597] Thorvaldsdóttir, H., Robinson, J. T., Mesirov, J. P., 2013. Integrative Genomics Viewer (IGV): high-performance genomics data visualization and exploration. Brief Bioinform. 14, 178-92. doi.org/10.1093/bib/bbs017
[0598] Trapnell, C., Roberts, A., Goff, L., Pertea, G., Kim, D., Kelley, D. R., Pimentel, H., Salzberg, S. L., Rinn, J. L., Pachter, L., 2012. Differential gene and transcript expression analysis of RNA-seq experiments with TopHat and Cufflinks. Nat. Protoc. 7, 562-78. doi.org/10.1038/nprot.2012.016
[0599] Ukibe, K., Katsuragi, T., Tani, Y., Takagi, H., 2008. Efficient screening for astaxanthin-overproducing mutants of the yeast Xanthophyllomyces dendrorhous by flow cytometry. FEMS Microbiol. Lett. 286, 241-248. doi.org/10.1111/j.1574-6968.2008.01278.x
[0600] Verdoes, J. C., Krubasik, P., Sandmann, G., Van Ooyen, A. J. J., 1999. Isolation and functional characterisation of a novel type of carotenoid biosynthetic gene from Xanthophyllomyces dendrorhous. Mol. Gen. Genet. 262, 453-461. doi.org/10.1007/s004380051105
[0601] Xie, H., Zhou, Y., Hu, J., Chen, Y., Liang, J., 2014. Production of astaxanthin by a mutant strain of Phaffia rhodozyma and optimization of culture conditions using response surface methodology. Ann. Microbiol. 64, 1473-1481. doi.org/10.1007/s13213-013-0790-y
[0602] Yeo, K. Y. B., Chrysanthopoulos, P. K., Nouwens, A. S., Marcellin, E., and Schulz, B. L. (2016) High performance targeted mass spectrometry with precision data independent acquisition reveals site-specific glycosylation macroheterogeneity. Anal Biochem 510: 106-113.
[0603] Yin, Z., Stead, D., Walker, J., Selway, L., Smith, D. A., Brown, A. J. P., Quinn, J., 2009. A proteomic analysis of the salt, cadmium and peroxide stress responses in Candida albicans and the role of the HogI stress-activated MAPK in regulating the stress-induced proteome. Proteomics 9, 4686-4703. doi.org/10.1002/pmic.200800958
[0604] Zerbino, D. R., 2010. Using the Velvet de novo assembler for short-read sequencing technologies.

[0605] Curr. Protoc. Bioinformatics Chapter 11, Unit 11.5. doi.org/10.1002/0471250953.bi1105s31
[0606] Zhang, C., Chen, X., Too, H. P., 2020. Microbial astaxanthin biosynthesis: recent achievements, challenges, and commercialization outlook. Appl. Microbiol. Biotechnol. doi.org/10.1007/s00253-020-10648-2
[0607] Zhang, L., Chen, W., Yang, S., Zhang, Y., Xu, J., Yang, D., Wu, Z., Liu, T., Cao, J., 2020. Identification and Functional Characterization of a Novel Δ12 Fatty Acid Desaturase Gene from Haematococcus pluvialis. J. Ocean Univ. China 19, 1362-1370. doi.org/10.1007/s11802-020-4418-0
[0608] Zhang, Y., Navarro, E., Cánovas-Márquez, J. T., Almagro, L., Chen, H., Chen, Y. Q., Zhang, H., Torres-Martinez, S., Chen, W., Garre, V., 2016. A new regulatory mechanism controlling carotenogenesis in the fungus Mucor circinelloides as a target to generate β-carotene over-producing strains by genetic engineering. Microb. Cell Fact. 15. doi.org/10.1186/s12934-016-0493-8

[0609] The disclosure of each patent and scientific document, computer program and algorithm referred to in this specification is incorporated by reference in its entirety.

[0610] Throughout the specification, the aim has been to describe typical aspects and embodiments without limiting the invention as disclosed herein to any one aspect, embodiment, or specific collection of features. It will be appreciated that various changes and modifications may be made relative to the exemplary disclosure provided herein without departing from the present invention.

[0611] In this specification, the use of the terms “suitable” and “suitably”, and similar terms, is not to be read as implying that a feature or step is essential, although such features or steps referred to as “suitable” may well be preferred.

[0612] In this specification, the indefinite articles “a” and “an” are not to be read as singular indefinite articles or as otherwise excluding more than one or more than a single subject to which the indefinite article refers. For example, “a” cell includes one cell, one or more cells, and a plurality of cells.

[0613] In this specification, the terms “comprises”, “comprising”, “includes”, “including”, and similar terms, are intended to denote the inclusion of a stated integer or integers, but not necessarily the exclusion of another integer or other integers, depending on context. That is, a product, composition, or method, etc., that comprises or includes stated integer(s) need not have those integer(s) solely, and may well have at least some other integers not stated, depending on context.

[0614] In this specification, the terms “consisting essentially of” and “consists essentially of” are intended to mean a non-exclusive inclusion only to the extent that, if additional elements are included beyond those elements recited, the additional elements do not materially alter basic and novel characteristics. That is, a composition, apparatus, system, or method that “consists essentially of” one or more recited elements includes those elements only, or those elements and any additional elements that do not materially alter the basic and novel characteristics of the apparatus, system, or method.

### Tables

### Table Descriptions

[0615] Table 1. Kinetic model parameters as per Example 1.

[0616] Table 2. Nitrogen sources assessed in relation to growth and carotenoid production as per Example 1.

[0617] Table 3. Carbon sources assessed in relation to growth and carotenoid production as per Example 1.

[0618] Table 4. Genomic characteristics of X. dendrorhous strains (referred to as P. rhodozyma in Table 4) sequenced as per Example 1.

[0619] Tables 5-7. Analyses of variance of the factorial design as per Example 1 to evaluate the effect on carotenoid production of the culture media components: Bactopeptone (BP), Malt Extract (ME), Yeast Extract (YE), Sucrose, Dried Corn Steep Liquor (DCSL), Vitamins Cocktail, and Potassium Phosphate Monobasic (KH₂PO₄).

[0620] Table 8. Coefficients of the quadratic equation and model validation as per Example 1.

[0621] Table 9. Fermentation parameters of wild-type (CBS6938) and mutant (BPAX-A1) X. dendrorhous strains as per Example 2.

[0622] Table 10. Kinetic parameters of fermentation with wild-type (CBS6938) and mutant strains (BPAX-A1) of X. dendrorhous as per Example 2.

[0623] Table 11. Amino acid profile analysis for formulations as described in Example 3.

[0624] Table 12. Variants in re-sequenced X. dendrorhous CBS 6938 and eight mutant X. dendrorhous strains (MAMY3, MAMY6, MB18, MB24, MYM0, MYM6, MYM44, and MYM92) as per Example 1, relative to SEQ ID NOs:12685-12950. V=variation index; S=strain, wherein WT=re-sequenced CBS 6938, M1=MAMY3, M2=MAMY6, M3=MB18, M4=MB24, M5=MYM0, M6=MYM6, M7=MYM44, M8=MYM92); RS=reference scaffold in published genome assembly of Sharma et al. BMC genomics 16.1 (2015): 1-13, corresponding to SEQ ID NOs:12685-12950, wherein the scaffold number is given, i.e. ‘62’ corresponds to ‘scaffold_62’ as per the published assembly—the correspondence of SEQ ID NOs:12685-12950 to the reference scaffolds in the published genome assembly will be apparent or readily determinable by the skilled person; RB=reference scaffold base at the variation position; SB=strain base at the variation position; T=type of change of the variation, wherein 1=synonymous, 2=missense, 3=upstream region of a CDS, 4=downstream region of a CDS, 5=stop gained, 6=intergenic; 7=intron variant, 8=splice variant, 9=start lost; CDS=coding sequence reference for affected CDS (if applicable) as per the published genome assembly of Sharma et al. BMC genomic 16.1 (2015): 1-13, corresponding to SEQ ID NOs:12951-19331—the correspondence of SEQ ID NOs:12951-19331 to the CDS reference in the published genome assembly will be apparent or readily determinable by the skilled person.

[0625] Table 13. Variations (a subset of those in Table 12) shared across all eight sequenced mutant strains X. dendrorhous strains (MAMY3, MAMY6, MB18, MB24, MYM0, MYM6, MYM44, and MYM92) and not present in re-sequenced X. dendrorhous CBS 6938 as per Example 1, relative to SEQ ID NOs:12685-12950. V, RS, RP, RB, SB, T, and CDS are as per Table 12. GC=gene characterisation; AA change=amino acid change of the variation, as applicable.

[0626] Table 14. Twenty-five selected variations (Z₁ to Z₂₅; a subset of those in Table 13) considered of particular interest as per Example 1.

[0627] Table 15. Twenty-six selected variations (V₁ to V₂₆; a subset of those in Table 13) considered of particular interest as per Example 2.

[0628] Table 16. CDS transcripts differentially expressed between BPAX-A1 (MYM0) mutant X. dendrorhous strain and wild-type X. dendrorhous CBS 6938 as per Example 2.

[0629] Table 17. Differential expression analysis between BPAX-A1 (MYM0) mutant X. dendrorhous strain and wild-type X. dendrorhous CBS 6938 for selected CDS transcripts (Ti to T₅₅) considered of particular interest.

[0630] Table 18. CDS sequences encoding proteins differentially expressed between BPAX-A1 (MYM0) mutant X. dendrorhous strain and wild-type X. dendrorhous CBS 6938 at Growth Phase 3, as per Example 3.

[0631] Table 19. CDS sequences encoding proteins differentially expressed between BPAX-A1 (MYM0) mutant X. dendrorhous strain and wild-type X. dendrorhous CBS 6938 at Growth Phase 4, as per Example 3.

[0632] Table 20. CDS accessions of X. dendrorhous CBS 6938 (as published by Sharma et al. BMC genomics 16.1 (2015): 1-13 and deposited at the European Nucleotide Archive; www.ebi.ac.uk/ena/browser/home) containing variations as set out in Table 14 and Table 15, and corresponding SEQ ID NOs.

### Tables 1-20 Follow

TABLE 1

| Parameter | Unit | Value |
|---|---|---|
| μmax | h⁻¹ | 0.12 |
| Ks | g/L | 2.33 |
| Yxs | g/g | 0.7 |
| α | μg/gDCW | *2000-4000 |
| rho | — | 1 |
| kp | μg | 650,000 |
| β | μg/h | 50 |
| ms | g/gDCW · h | 0.005 |

*Low Range: Growth Phase; High Range: Production Phase

TABLE 2

| Nitrogen | | | |
|---|---|---|---|
| Source | A₆₀₀ | Carotenoids (μg/L) | Ypx (g/gDCW) |
| Urea | 18.6 ± 0.23 | 10511.63 ± 394.66 | 1339.23 ± 50.28 |
| Ammonium | 21.76 ± 0.12 | 26186.05 ± 2565.32 | 2848.84 ± 197.90 |
| Sulphate | | | |
| YE | 20.46 ± 0.31 | 41860.47 ± 1578.66 | 4850.21 ± 256.59 |
| ME | 9.08 ± 0.56 | 20186.05 ± 920.88 | 5285.83 ± 569.63 |
| BP | 20.42 ± 0.82 | 38046.51 ± 1578.66 | 4422.41 ± 360.84 |
| DCSL | 18.80 ± 0.46 | 29860.47 ± 2104.88 | 3768.083 ± 356.02 |

YE yeast extract; ME malt extract; BP bactopeptone; DCSL dried corn steep liquor; Ypx yield of carotenoid produced per gram of dried cell weight.

TABLE 3

| Carbon Source | A₆₀₀ | Final pH | Carotenoids (ug/L) | Ypx (g/g) |
|---|---|---|---|---|
| Molasses | 19.79 ± 0.12 | 5.39 ± 0.01 | 39906.98 ± 789.32 | 4778.89 ± 125.5 |
| Glucose | 26.00 ± 1.27 | 5.26 ± 0.01 | 37348.84 ± 2039.01 | 3132.13 ± 749.62 |
| Glycerol¹ | 27.89 ± 6.8 | 5.11 ± 0.01 | 53395.35 ± 1183.99 | 4688 ± 1244.11 |
| Sucrose | 26.55 ± 2.12 | 5.23 ± 0.06 | 36046.51 ± 2696.87 | 3217.91 ± 16.40 |

¹Lag phase extended for three days

TABLE 4

| | Genome | | | |
|---|---|---|---|---|
| | Size | No. of | | |
| Strain | (Mb) | contigs | % GC | N50 |
| P. rhodozyma CBS6938¹ | 19.50 | 266 | 47.31 | 2,080,000 |
| P. rhodozyma CBS6938_Y8² | 19.05 | 1239 | 48.31 | 39,444 |
| P. rhodozyma MYM6_Y2 | 19.01 | 1254 | 48.51 | 37,281 |
| P. rhodozyma MYM0_Y11 | 19.01 | 1136 | 48.61 | 42,199 |
| P. rhodozyma MYM44_Y14 | 18.92 | 1722 | 48.72 | 23,350 |
| P. rhodozyma MB18_Y15 | 19.01 | 1140 | 48.64 | 44,235 |
| P. rhodozyma MAMY3_Y16 | 18.88 | 1556 | 48.64 | 28,341 |
| P. rhodozyma MB24_Y17 | 19.11 | 1421 | 48.73 | 30,813 |
| P. rhodozyma MYM92_Y4 | 18.96 | 1651 | 48.76 | 23,938 |
| P. rhodozyma MAMY6_Y12 | 18.55 | 1565 | 48.27 | 23,723 |

¹Phaffia rhodozyma CBS 6938 downloaded from ENA: LN483084-LN483350 (Sharma et al., 2015).
²Phaffia rhodozyma CBS 6938 re- sequenced in this study.
% GC, guanine-cytosine percentage content.

TABLE 5

| Source | DF | Adj SS | Adj MS | F-Value | P-Value |
|---|---|---|---|---|---|
| Model | 7 | 1445027042 | 206432435 | 112.30 | 0.000 |
| Linear | 7 | 1445027042 | 206432435 | 112.30 | 0.000 |
| BP | 1 | 8450514 | 8450514 | 4.60 | 0.064 |
| ME | 1 | 109032450 | 109032450 | 59.31 | 0.000 |
| YE | 1 | 14018929 | 14018929 | 7.63 | 0.025 |
| Sucrose | 1 | 1284305571 | 1284305571 | 698.64 | 0.000 |
| DCSL | 1 | 22287182 | 22287182 | 12.12 | 0.008 |
| Vitamins Cocktail | 1 | 6905895 | 6905895 | 3.76 | 0.089 |
| KH2PO4 | 1 | 26501 | 26501 | 0.01 | 0.907 |
| Error | 8 | 14706328 | 1838291 | | |
| Total | 15 | 1459733369 | | | |

R² = 98.11%

TABLE 6

| Source | DF | Adj SS | Adj MS | F-Value | P-Value |
|---|---|---|---|---|---|
| Model | 7 | 38.3215 | 5.4745 | 49.73 | 0.000 |
| Linear | 7 | 38.3215 | 5.4745 | 49.73 | 0.000 |
| BP | 1 | 0.4390 | 0.4390 | 3.99 | 0.081 |
| ME | 1 | 1.7224 | 1.7224 | 15.65 | 0.004 |
| YE | 1 | 0.0579 | 0.0579 | 0.53 | 0.489 |
| Sucrose | 1 | 35.7573 | 35.7573 | 324.85 | 0.000 |
| DCSL | 1 | 0.1411 | 0.1411 | 1.28 | 0.290 |
| Vitamins Cocktail | 1 | 0.0752 | 0.0752 | 0.68 | 0.432 |
| KH2PO4 | 1 | 0.1287 | 0.1287 | 1.17 | 0.311 |
| Error | 8 | 0.8806 | 0.1101 | | |
| Total | 15 | 39.2021 | | | |

R² = 97.75%

TABLE 7

| Source | DF | Adj SS | Adj MS | F-Value | P-Value |
|---|---|---|---|---|---|
| Model | 7 | 2009531 | 287076 | 13.55 | 0.001 |
| Linear | 7 | 2009531 | 287076 | 13.55 | 0.001 |
| BP | 1 | 151052 | 151052 | 7.13 | 0.028 |
| ME | 1 | 174941 | 174941 | 8.26 | 0.021 |
| YE | 1 | 151802 | 151802 | 7.16 | 0.028 |
| Sucrose | 1 | 1187459 | 1187459 | 56.05 | 0.000 |
| DCSL | 1 | 303517 | 303517 | 14.33 | 0.005 |
| Vitamins Cocktail | 1 | 35727 | 35727 | 1.69 | 0.230 |
| KH2PO4 | 1 | 5032 | 5032 | 0.24 | 0.639 |
| Error | 8 | 169496 | 21187 | | |
| Total | 15 | 2179026 | | | |

R² = 92.22%

TABLE 8

| initial sucrose | Carotenoid | Carotenoid |
|---|---|---|
| concentration | production (ug/L) | production (ug/L) |
| (g/L) | Predicted | Calculated |
| 10 | 35,849 | 44,418 |
| 15 | 48,217 | 51,162 |
| 25 | 74,793 | 73,953 |
| 40 | 118,636 | 111,860 |
| 80 | 165,546 | 145,348 |

| Coded Coefficient | Value | P-Value |
|---|---|---|
| Constant | 91529 | 0.000 |
| ME | 4175 | 0.447 |
| Sucrose | 31769 | 0.000 |
| DCSL | −7620 | 0.191 |
| YE | 2882 | 0.597 |
| ME*ME | −4079 | 0.696 |
| Sucrose*Sucrose | −12521 | 0.241 |
| DCSL*DCSL | −5591 | 0.579 |
| YE*YE | −6335 | 0.545 |
| ME*Sucrose | −3805 | 0.783 |
| ME*DCSL | −5520 | 0.684 |
| ME*YE | 6234 | 0.653 |
| Sucrose*DCSL | −14251 | 0.302 |
| Sucrose*YE | 10433 | 0.454 |
| DCSL*YE | −524 | 0.969 |

TABLE 9

| | Biomass | Carotenoids | Astaxanthin | Ypx | Ypax | Yxs |
|---|---|---|---|---|---|---|
| Strain | (gDCW/L) | (μg/L) | (μg/L) | (μg/gDCW) | (μg/gDCW) | (gDCW/g) |
| BPAX-A1 | 10.01 ± 0.39 | 28310 ± 12 | 21212 ± 19 | 2832 ± 207 | 2118 ± 165 | 0.43 ± 0.02 |
| CBS6938 | 13.60 ± 0.29 | 2651 ± 61 | 1875 ± 29 | 195 ± 0.5 | 137 ± 1.7 | 0.62 ± 0.01 |

The parameters represent global values of the average of three biological replicates. Ypx Specific carotenoid production yield; Ypax Specific AX production yield; Yxs Biomass to sugar consumption yield. gDCW/L grams of dried cell weight per litre.

TABLE 10

| | μ | qp | qpax | qs |
|---|---|---|---|---|
| Strain | (h⁻¹) | (μg/gDCW · h) | (μg/gDCW · h) | (g/gDCW · h) |
| BPAX-A1-Phase 1 | 0.11 ± 0.002 | 80.70 ± 16.39 | 50.25 ± 4.46 | 0.13 ± 0.33 |
| BPAX-A1-Phase 2 | 0.10 ± 0.005 | 197.37 ± 15.62 | 67.01 ± 17.93 | 0.22 ± 0.01 |
| BPAX-A1-Phase 3 | 0.10 ± 0.004 | 141.89 ± 27.55 | 60.58 ± 2.19 | 0.21 ± 0.03 |
| BPAX-A1-Phase 4 | 0.0 ± 0.000 | 83.60 ± 1.15 | 33.37 ± 7.79 | 0.0 ± 0.00 |
| CBS6938-Phase 1 | 0.12 ± 0.002 | 2.14 ± 0.05 | 1.27 ± 0.50 | 0.18 ± 0.03 |
| CBS6938-Phase 2 | 0.12 ± 0.004 | 16.97 ± 0.20 | 3.02 ± 1.41 | 0.25 ± 0.02 |
| CBS6938-Phase 3 | 0.10 ± 0.004 | 16.36 ± 0.27 | 9.55 ± 2.43 | 0.19 ± 0.01 |
| CBS6938-Phase 4 | 0.0 ± 0.000 | 3.90 ± 0.13 | 4.03 ± 2.55 | 0.0 ± 0.00 |

μ: Specific growth rate; qp: Specific carotenoids production; qax: Specific astaxanthin production; qs: Specific glucose consumption

TABLE 11

| Amino Acid | uM/gDCW | SSD |
|---|---|---|
| Arginine | 22.23377 | 1.296117 |
| Histidine | 0.679908 | 0.115273 |
| Threonine | 3.79767 | 0.511533 |
| Glutamine/Lysine | 34.24658 | 3.448584 |
| Lysine/Glutamine | 1.051276 | 0.149964 |
| Valine | 2.577432 | 0.475985 |
| Methionine | 0.266643 | 0.025636 |
| Isoleucine | 0.460132 | 0.080446 |
| Leucine | 0.460132 | 0.080446 |
| Phenylalanine | 0.612914 | 0.118322 |
| Tryptophan | 0.049219 | 0.006615 |
| L-Tyrosine | 0.141318 | 0.019971 |
| Proline | 0.262457 | 0.039893 |
| Serine | 4.693926 | 0.556659 |
| Aspartic acid | 21.66696 | 1.089912 |
| Glutamic acid | 57.78015 | 6.399202 |
| Glycine | 0.699527 | 0.138553 |
| Asparagine | 7.194973 | 0.968078 |
| Alanine | 5.183911 | 1.019159 |

TABLE 12

| V | S | RS | RP | RB | SB | T | CDS |
|---|---|---|---|---|---|---|---|
| X₁ | WT | 62 | 26 | T | A | 4 | CDZ96152 |
| X₂ | WT | 62 | 27 | T | C | 4 | CDZ96152 |
| X₃ | WT | 62 | 55 | T | A | 4 | CDZ96152 |
| X₄ | WT | 179 | 2648 | A | G | 4 | CDZ96154 |
| X₅ | WT | 179 | 2649 | G | A | 4 | CDZ96154 |
| X₆ | WT | 24 | 513 | T | C | 3 | CDZ96160 |
| X₇ | WT | 24 | 520 | C | G | 3 | CDZ96160 |
| X₈ | WT | 24 | 242334 | A | T | 5 | CDZ96235 |
| X₉ | WT | 33 | 399 | T | A | 4 | CED82002 |
| X₁₀ | WT | 33 | 4019 | T | C | 4 | CED82002 |
| X₁₁ | WT | 33 | 370630 | A | T | 6 | CED82121- |
| | | | | | | | CED82122 |
| X₁₂ | WT | 33 | 374131 | A | G | 6 | CED82121- |
| | | | | | | | CED82122 |
| X₁₃ | WT | 33 | 374134 | A | G | 6 | CED82121- |
| | | | | | | | CED82122 |
| X₁₄ | WT | 33 | 374137 | A | T | 6 | CED82121- |
| | | | | | | | CED82122 |
| X₁₅ | WT | 33 | 374150 | A | C | 6 | CED82121- |
| | | | | | | | CED82122 |
| X₁₆ | WT | 33 | 375339 | A | G | 6 | CED82121- |
| | | | | | | | CED82122 |
| X₁₇ | WT | 33 | 375366 | T | C | 6 | CED82121- |
| | | | | | | | CED82122 |
| X₁₈ | WT | 33 | 385319 | A | C | 2 | CED82122 |
| X₁₉ | WT | 33 | 385527 | C | T | 2 | CED82122 |
| X₂₀ | WT | 33 | 917545 | A | G | 7 | CED82294 |
| X₂₁ | WT | 33 | 917558 | G | A | 7 | CED82294 |
| X₂₂ | WT | 33 | 917771 | A | T | 7 | CED82294 |
| X₂₃ | WT | 33 | 928726 | C | T | 3 | CED82295 |
| X₂₄ | WT | 33 | 936350 | T | A | 3 | CED82300 |
| X₂₅ | WT | 33 | 936356 | G | A | 3 | CED82300 |
| X₂₆ | WT | 33 | 936571 | A | G | 3 | CED82300 |
| X₂₇ | WT | 33 | 936600 | G | A | 3 | CED82300 |
| X₂₈ | WT | 33 | 936667 | A | G | 3 | CED82300 |
| X₂₉ | WT | 33 | 1538001 | G | A | 3 | CED82483 |
| X₃₀ | WT | 33 | 1544767 | A | C | 6 | CED82485- |
| | | | | | | | CED82486 |
| X₃₁ | WT | 48 | 563 | C | T | 6 | |
| X₃₂ | WT | 48 | 565 | T | C | 6 | |
| X₃₃ | WT | 48 | 576 | G | A | 6 | |
| X₃₄ | WT | 48 | 580 | T | A | 6 | |
| X₃₅ | WT | 48 | 720 | A | G | 6 | |
| X₃₆ | WT | 52 | 516267 | C | T | 3 | CED82823 |
| X₃₇ | WT | 52 | 1313179 | A | G | 3 | CED83105 |
| X₃₈ | WT | 52 | 1506995 | T | C | 2 | CED83177 |
| X₃₉ | WT | 52 | 1874150 | G | T | 3 | CED83305 |
| X₄₀ | WT | 52 | 2575090 | A | G | 3 | CED83525 |
| X₄₁ | WT | 54 | 4815 | G | A | 1 | CDZ96384 |
| X₄₂ | WT | 54 | 4816 | A | T | 2 | CDZ96384 |
| X₄₃ | WT | 54 | 4817 | G | C | 2 | CDZ96384 |
| X₄₄ | WT | 54 | 4821 | G | A | 1 | CDZ96384 |
| X₄₅ | WT | 54 | 274617 | A | T | 3 | CDZ96471 |
| X₄₆ | WT | 54 | 316790 | T | G | 4 | CDZ96487 |
| X₄₇ | WT | 54 | 468399 | T | A | 3 | CDZ96530 |
| X₄₈ | WT | 54 | 616268 | A | G | 3 | CDZ96581 |
| X₄₉ | WT | 58 | 93 | T | C | 6 | |
| X₅₀ | WT | 69 | 82710 | G | A | 3 | CED83554 |
| X₅₁ | WT | 69 | 1084824 | G | A | 3 | CED83891 |
| X₅₂ | WT | 69 | 1084835 | C | T | 3 | CED83891 |
| X₅₃ | WT | 69 | 1084848 | A | G | 3 | CED83891 |
| X₅₄ | WT | 69 | 1084866 | A | G | 3 | CED83891 |
| X₅₅ | WT | 69 | 1084931 | C | T | 3 | CED83891 |
| X₅₆ | WT | 69 | 1109785 | C | T | 3 | CED83899 |
| X₅₇ | WT | 69 | 1109813 | A | G | 3 | CED83899 |
| X₅₈ | WT | 69 | 1109818 | A | G | 3 | CED83899 |
| X₅₉ | WT | 69 | 1109819 | T | A | 3 | CED83899 |
| X₆₀ | WT | 69 | 1109823 | T | C | 3 | CED83899 |
| X₆₁ | WT | 69 | 1109830 | A | G | 3 | CED83899 |
| X₆₂ | WT | 69 | 1109831 | C | A | 3 | CED83899 |
| X₆₃ | WT | 69 | 1109835 | A | G | 3 | CED83899 |
| X₆₄ | WT | 69 | 1257466 | A | G | 2 | CED83949 |
| X₆₅ | WT | 69 | 2089848 | A | G | 4 | CED84232 |
| X₆₆ | WT | 69 | 2089870 | C | T | 4 | CED84232 |
| X₆₇ | WT | 69 | 2089876 | C | A | 4 | CED84232 |
| X₆₈ | WT | 69 | 2099452 | C | G | 4 | CED84233 |
| X₆₉ | WT | 72 | 93 | T | C | 6 | |
| X₇₀ | WT | 77 | 18912 | A | G | 2 | CDZ96635 |
| X₇₁ | WT | 77 | 34978 | G | T | 3 | CDZ96642 |
| X₇₂ | WT | 77 | 39665 | G | C | 2 | CDZ96646 |
| X₇₃ | WT | 77 | 39842 | G | A | 8 | CDZ96646 |
| X₇₄ | WT | 78 | 263674 | A | G | 3 | CED84438 |
| X₇₅ | WT | 78 | 263828 | T | C | 3 | CED84438 |
| X₇₆ | WT | 78 | 263896 | T | C | 3 | CED84438 |
| X₇₇ | WT | 78 | 280587 | G | A | 2 | CED84440 |
| X₇₈ | WT | 78 | 280603 | A | G | 1 | CED84440 |
| X₇₉ | WT | 78 | 281454 | C | A | 3 | CED84441 |
| X₈₀ | WT | 78 | 298141 | C | G | 3 | CED84443 |
| X₈₁ | WT | 78 | 301815 | T | C | 3 | CED84443 |
| X₈₂ | WT | 78 | 302700 | A | G | 2 | CED84443 |
| X₈₃ | WT | 78 | 333312 | A | G | 3 | CED84452 |
| X₈₄ | WT | 78 | 661166 | G | C | 2 | CED84562 |
| X₈₅ | WT | 78 | 1143063 | A | G | 3 | CED84728 |
| X₈₆ | WT | 78 | 1742796 | G | A | 3 | CED84926 |
| X₈₇ | WT | 79 | 161 | T | C | 3 | CDZ96674 |
| X₈₈ | WT | 79 | 687842 | T | C | 2 | CDZ96908 |
| X₈₉ | WT | 79 | 735053 | T | C | 3 | CDZ96928 |
| X₉₀ | WT | 79 | 748083 | G | T | 3 | CDZ96929 |
| X₉₁ | WT | 79 | 759403 | C | T | 3 | CDZ96931 |
| X₉₂ | WT | 79 | 759659 | G | A | 2 | CDZ96931 |
| X₉₃ | WT | 79 | 760430 | T | C | 2 | CDZ96932 |
| X₉₄ | WT | 79 | 760541 | A | G | 2 | CDZ96932 |
| X₉₅ | WT | 79 | 760891 | A | G | 2 | CDZ96932 |
| X₉₆ | WT | 79 | 760988 | G | T | 2 | CDZ96932 |
| X₉₇ | WT | 79 | 761056 | T | C | 3 | CDZ96932 |
| X₉₈ | WT | 79 | 768537 | A | G | 4 | CDZ96933 |
| X₉₉ | WT | 79 | 786064 | A | G | 3 | CDZ96934 |
| X₁₀₀ | WT | 79 | 830852 | T | A | 2 | CDZ96950 |
| X₁₀₁ | WT | 79 | 1287496 | C | T | 1 | CDZ97107 |
| X₁₀₂ | WT | 79 | 2339881 | C | G | 3 | CDZ97460 |
| X₁₀₃ | WT | 79 | 2340326 | G | A | 3 | CDZ97462 |
| X₁₀₄ | WT | 79 | 2340636 | T | C | 3 | CDZ97462 |
| X₁₀₅ | WT | 81 | 210 | G | T | 6 | |
| X₁₀₆ | WT | 85 | 521 | C | T | 6 | |
| X₁₀₇ | WT | 85 | 522 | A | G | 6 | |
| X₁₀₈ | WT | 105 | 130 | T | A | 2 | CDZ97474 |
| X₁₀₉ | WT | 105 | 429 | C | T | 4 | CDZ97474 |
| X₁₁₀ | WT | 121 | 784 | A | G | 6 | |
| X₁₁₁ | WT | 121 | 1269 | A | T | 6 | |
| X₁₁₂ | WT | 121 | 1402 | C | G | 6 | |
| X₁₁₃ | WT | 138 | 123 | G | T | 6 | |
| X₁₁₄ | WT | 138 | 651 | T | A | 6 | |
| X₁₁₅ | WT | 138 | 657 | A | C | 6 | |
| X₁₁₆ | WT | 149 | 1163 | T | C | 8 | CDZ97597 |
| X₁₁₇ | WT | 149 | 2074 | T | G | 3 | CDZ97598 |
| X₁₁₈ | WT | 159 | 106 | A | C | 6 | |
| X₁₁₉ | WT | 162 | 68192 | C | G | 2 | CDZ97625 |
| X₁₂₀ | WT | 162 | 70405 | A | G | 1 | CDZ97625 |
| X₁₂₁ | WT | 162 | 308369 | T | C | 1 | CDZ97702 |
| X₁₂₂ | WT | 162 | 311666 | A | G | 4 | CDZ97702 |
| X₁₂₃ | WT | 162 | 320785 | G | C | 4 | CDZ97703 |
| X₁₂₄ | WT | 162 | 320786 | T | G | 4 | CDZ97703 |
| X₁₂₅ | WT | 162 | 321460 | C | G | 4 | CDZ97703 |
| X₁₂₆ | WT | 162 | 321463 | A | C | 4 | CDZ97703 |
| X₁₂₇ | WT | 162 | 322591 | G | A | 4 | CDZ97703 |
| X₁₂₈ | WT | 162 | 323448 | T | G | 2 | CDZ97703 |
| X₁₂₉ | WT | 162 | 323451 | T | G | 2 | CDZ97703 |
| X₁₃₀ | WT | 162 | 323735 | A | G | 1 | CDZ97703 |
| X₁₃₁ | WT | 162 | 324114 | T | C | 2 | CDZ97703 |
| X₁₃₂ | WT | 162 | 324139 | C | T | 2 | CDZ97703 |
| X₁₃₃ | WT | 162 | 324568 | A | G | 2 | CDZ97703 |
| X₁₃₄ | WT | 162 | 492101 | G | A | 3 | CDZ97764 |
| X₁₃₅ | WT | 162 | 622253 | A | C | 1 | CDZ97809 |
| X₁₃₆ | WT | 162 | 738675 | G | A | 3 | CDZ97842 |
| X₁₃₇ | WT | 162 | 738686 | C | T | 3 | CDZ97842 |
| X₁₃₈ | WT | 189 | 69196 | T | A | 3 | CDZ97980 |
| X₁₃₉ | WT | 189 | 194647 | A | G | 3 | CDZ98020 |
| X₁₄₀ | WT | 189 | 194665 | A | G | 3 | CDZ98020 |
| X₁₄₁ | WT | 191 | 342 | A | G | 3 | CDZ98107 |
| X₁₄₂ | WT | 191 | 347 | C | T | 3 | CDZ98107 |
| X₁₄₃ | WT | 191 | 427 | C | T | 3 | CDZ98107 |
| X₁₄₄ | WT | 191 | 451 | C | T | 3 | CDZ98107 |
| X₁₄₅ | WT | 191 | 487 | A | G | 3 | CDZ98107 |
| X₁₄₆ | WT | 198 | 202 | C | A | 6 | |
| X₁₄₇ | WT | 198 | 203 | G | A | 6 | |
| X₁₄₈ | WT | 206 | 406 | G | A | 6 | |
| X₁₄₉ | WT | 220 | 116 | C | G | 6 | |
| X₁₅₀ | WT | 223 | 93 | G | A | 4 | CDZ98118 |
| X₁₅₁ | WT | 223 | 102 | A | G | 4 | CDZ98118 |
| X₁₅₂ | WT | 223 | 133 | A | G | 4 | CDZ98118 |
| X₁₅₃ | WT | 223 | 150 | T | C | 4 | CDZ98118 |
| X₁₅₄ | WT | 223 | 155 | A | C | 4 | CDZ98118 |
| X₁₅₅ | WT | 223 | 158 | T | C | 4 | CDZ98118 |
| X₁₅₆ | WT | 223 | 160 | C | T | 4 | CDZ98118 |
| X₁₅₇ | WT | 223 | 175 | G | A | 4 | CDZ98118 |
| X₁₅₈ | WT | 223 | 177 | A | G | 4 | CDZ98118 |
| X₁₅₉ | WT | 223 | 188 | A | G | 4 | CDZ98118 |
| X₁₆₀ | WT | 223 | 192 | C | A | 4 | CDZ98118 |
| X₁₆₁ | WT | 223 | 194 | T | C | 4 | CDZ98118 |
| X₁₆₂ | WT | 223 | 195 | T | G | 4 | CDZ98118 |
| X₁₆₃ | WT | 223 | 197 | T | C | 4 | CDZ98118 |
| X₁₆₄ | WT | 229 | 225 | G | C | 6 | |
| X₁₆₅ | WT | 235 | 3161 | A | G | 6 | |
| X₁₆₆ | WT | 249 | 206 | G | A | 4 | CED84929 |
| X₁₆₇ | WT | 249 | 29505 | T | G | 3 | CED84937 |
| X₁₆₈ | WT | 249 | 41573 | G | A | 3 | CED84940 |
| X₁₆₉ | WT | 249 | 107121 | A | G | 3 | CED84966 |
| X₁₇₀ | WT | 249 | 501510 | T | C | 3 | CED85093 |
| X₁₇₁ | WT | 249 | 969333 | G | T | 3 | CED85238 |
| X₁₇₂ | WT | 249 | 1195367 | G | A | 3 | CED85307 |
| X₁₇₃ | WT | 249 | 1498029 | T | C | 3 | CED85415 |
| X₁₇₄ | WT | 249 | 1498823 | T | C | 2 | CED85414 |
| X₁₇₅ | WT | 249 | 1498829 | C | T | 2 | CED85414 |
| X₁₇₆ | WT | 249 | 1499008 | A | G | 3 | CED85415 |
| X₁₇₇ | WT | 249 | 1502631 | G | T | 2 | CED85416 |
| X₁₇₈ | WT | 249 | 1502641 | T | A | 2 | CED85416 |
| X₁₇₉ | WT | 249 | 1502819 | T | G | 1 | CED85416 |
| X₁₈₀ | WT | 249 | 1505138 | G | A | 3 | CED85416 |
| X₁₈₁ | WT | 249 | 1505634 | T | G | 3 | CED85416 |
| X₁₈₂ | WT | 249 | 1518591 | T | A | 3 | CED85419 |
| X₁₈₃ | WT | 249 | 1519431 | A | G | 3 | CED85419 |
| X₁₈₄ | WT | 249 | 1653615 | T | G | 2 | CED85457 |
| X₁₈₅ | WT | 249 | 1653962 | C | T | 4 | CED85458 |
| X₁₈₆ | WT | 249 | 1679374 | A | G | 3 | CED85461 |
| X₁₈₇ | WT | 249 | 1679375 | A | T | 3 | CED85461 |
| X₁₈₈ | WT | 249 | 1780551 | A | G | 3 | CED85493 |
| X₁₈₉ | WT | 249 | 1780569 | A | G | 3 | CED85493 |
| X₁₉₀ | WT | 249 | 1801965 | G | A | 3 | CED85501 |
| X₁₉₁ | WT | 249 | 2255547 | G | C | 3 | CED85640 |
| X₁₉₂ | WT | 258 | 166 | A | G | 6 | |
| X₁₉₃ | WT | 258 | 576 | A | G | 6 | |
| X₁₉₄ | WT | 258 | 1139 | A | T | 6 | |
| X₁₉₅ | WT | 262 | 4049 | G | A | 1 | CDZ98330 |
| X₁₉₆ | WT | 262 | 136093 | A | T | 1 | CDZ98374 |
| X₁₉₇ | WT | 262 | 539428 | G | A | 3 | CDZ98514 |
| X₁₉₈ | WT | 262 | 539452 | A | G | 3 | CDZ98514 |
| X₁₉₉ | WT | 262 | 539470 | A | G | 3 | CDZ98514 |
| X₂₀₀ | WT | 262 | 628911 | G | C | 3 | CDZ98543 |
| X₂₀₁ | WT | 262 | 638804 | G | C | 3 | CDZ98544 |
| X₂₀₂ | WT | 262 | 638986 | C | G | 3 | CDZ98544 |
| X₂₀₃ | WT | 262 | 641218 | G | C | 4 | CDZ98544 |
| X₂₀₄ | WT | 262 | 653920 | A | G | 4 | CDZ98545 |
| X₂₀₅ | WT | 262 | 655754 | A | T | 4 | CDZ98545 |
| X₂₀₆ | WT | 262 | 655757 | T | C | 4 | CDZ98545 |
| X₂₀₇ | WT | 262 | 941629 | C | T | 1 | CDZ98638 |
| X₂₀₈ | WT | 262 | 1329643 | C | T | 3 | CDZ98760 |
| X₂₀₉ | WT | 262 | 1678838 | C | A | 2 | CDZ98874 |
| X₂₁₀ | WT | 262 | 1716385 | G | A | 3 | CDZ98887 |
| X₂₁₁ | WT | 267 | 93 | G | A | 6 | |
| X₂₁₂ | WT | 267 | 94 | A | G | 6 | |
| X₂₁₃ | WT | 267 | 133 | T | C | 6 | |
| X₂₁₄ | WT | 267 | 134 | C | T | 6 | |
| X₂₁₅ | WT | 267 | 201 | T | C | 6 | |
| X₂₁₆ | WT | 267 | 208 | T | C | 6 | |
| X₂₁₇ | WT | 267 | 233 | A | G | 6 | |
| X₂₁₈ | WT | 267 | 234 | A | C | 6 | |
| X₂₁₉ | WT | 267 | 237 | A | G | 6 | |
| X₂₂₀ | WT | 267 | 254 | G | T | 6 | |
| X₂₂₁ | WT | 267 | 256 | A | G | 6 | |
| X₂₂₂ | WT | 267 | 257 | T | C | 6 | |
| X₂₂₃ | M1 | 22 | 1643 | C | T | 2 | CED80056 |
| X₂₂₄ | M1 | 22 | 2524 | G | A | 4 | CED80056 |
| X₂₂₅ | M1 | 28 | 236 | G | A | 3 | CDZ96150 |
| X₂₂₆ | M1 | 28 | 377 | G | A | 3 | CDZ96150 |
| X₂₂₇ | M1 | 28 | 1506 | C | T | 2 | CDZ96150 |
| X₂₂₈ | M1 | 28 | 1677 | C | T | 4 | CDZ96150 |
| X₂₂₉ | M1 | 43 | 464 | G | A | 2 | CDZ96151 |
| X₂₃₀ | M1 | 43 | 753 | C | T | 2 | CDZ96151 |
| X₂₃₁ | M1 | 43 | 757 | G | A | 1 | CDZ96151 |
| X₂₃₂ | M1 | 43 | 1527 | C | T | 3 | CDZ96151 |
| X₂₃₃ | M1 | 43 | 1748 | G | A | 3 | CDZ96151 |
| X₂₃₄ | M1 | 43 | 1928 | C | T | 3 | CDZ96151 |
| X₂₃₅ | M1 | 62 | 26 | T | A | 4 | CDZ96152 |
| X₂₃₆ | M1 | 62 | 27 | T | C | 4 | CDZ96152 |
| X₂₃₇ | M1 | 62 | 55 | T | A | 4 | CDZ96152 |
| X₂₃₈ | M1 | 62 | 403 | C | T | 1 | CDZ96152 |
| X₂₃₉ | M1 | 62 | 875 | G | A | 2 | CDZ96152 |
| X₂₄₀ | M1 | 102 | 339 | C | T | 4 | CDZ96153 |
| X₂₄₁ | M1 | 102 | 951 | G | A | 4 | CDZ96153 |
| X₂₄₂ | M1 | 102 | 1042 | G | A | 4 | CDZ96153 |
| X₂₄₃ | M1 | 102 | 2334 | G | A | 2 | CDZ96153 |
| X₂₄₄ | M1 | 102 | 2590 | C | T | 2 | CDZ96153 |
| X₂₄₅ | M1 | 102 | 3427 | C | T | 3 | CDZ96153 |
| X₂₄₆ | M1 | 176 | 358 | G | A | 3 | CED80058 |
| X₂₄₇ | M1 | 176 | 1872 | G | A | 4 | CED80058 |
| X₂₄₈ | M1 | 176 | 1980 | G | A | 4 | CED80058 |
| X₂₄₉ | M1 | 179 | 93 | A | G | 3 | CDZ96154 |
| X₂₅₀ | M1 | 179 | 96 | G | A | 3 | CDZ96154 |
| X₂₅₁ | M1 | 179 | 1525 | G | A | 7 | CDZ96154 |
| X₂₅₂ | M1 | 179 | 1780 | C | T | 7 | CDZ96154 |
| X₂₅₃ | M1 | 188 | 815 | C | T | 2 | CED80060 |
| X₂₅₄ | M1 | 188 | 1174 | C | T | 4 | CED80060 |
| X₂₅₅ | M1 | 188 | 2163 | G | A | 4 | CED80060 |
| X₂₅₆ | M1 | 188 | 2170 | G | A | 4 | CED80060 |
| X₂₅₇ | M1 | 247 | 102 | G | A | 4 | CED80061 |
| X₂₅₈ | M1 | 247 | 989 | C | T | 2 | CED80061 |
| X₂₅₉ | M1 | 247 | 1053 | G | A | 2 | CED80061 |
| X₂₆₀ | M1 | 7 | 160 | T | C | 6 | |
| X₂₆₁ | M1 | 8 | 1110 | C | T | 6 | |
| X₂₆₂ | M1 | 11 | 154 | A | C | 6 | |
| X₂₆₃ | M1 | 11 | 158 | C | T | 6 | |
| X₂₆₄ | M1 | 13 | 131 | G | C | 3 | CDZ96158 |
| X₂₆₅ | M1 | 15 | 134 | G | A | 6 | |
| X₂₆₆ | M1 | 15 | 135 | T | C | 6 | |
| X₂₆₇ | M1 | 15 | 139 | G | C | 6 | |
| X₂₆₈ | M1 | 15 | 148 | G | C | 6 | |
| X₂₆₉ | M1 | 15 | 149 | A | G | 6 | |
| X₂₇₀ | M1 | 15 | 165 | G | T | 6 | |
| X₂₇₁ | M1 | 15 | 184 | C | T | 6 | |
| X₂₇₂ | M1 | 15 | 205 | C | G | 6 | |
| X₂₇₃ | M1 | 15 | 214 | G | C | 6 | |
| X₂₇₄ | M1 | 15 | 248 | G | A | 6 | |
| X₂₇₅ | M1 | 15 | 249 | C | G | 6 | |
| X₂₇₆ | M1 | 15 | 252 | C | T | 6 | |
| X₂₇₇ | M1 | 15 | 254 | A | G | 6 | |
| X₂₇₈ | M1 | 15 | 256 | T | C | 6 | |
| X₂₇₉ | M1 | 15 | 327 | T | G | 6 | |
| X₂₈₀ | M1 | 24 | 513 | T | C | 3 | CDZ96160 |
| X₂₈₁ | M1 | 24 | 520 | C | G | 3 | CDZ96160 |
| X₂₈₂ | M1 | 24 | 5850 | C | T | 2 | CDZ96160 |
| X₂₈₃ | M1 | 24 | 68660 | C | T | 3 | CDZ96181 |
| X₂₈₄ | M1 | 24 | 118860 | C | T | 2 | CDZ96200 |
| X₂₈₅ | M1 | 24 | 168850 | C | T | 1 | CDZ96214 |
| X₂₈₆ | M1 | 24 | 180340 | G | A | 3 | CDZ96216 |
| X₂₈₇ | M1 | 24 | 197593 | C | T | 2 | CDZ96224 |
| X₂₈₈ | M1 | 24 | 266697 | G | A | 1 | CDZ96242 |
| X₂₈₉ | M1 | 24 | 278319 | G | A | 3 | CDZ96245 |
| X₂₉₀ | M1 | 24 | 289183 | T | C | 3 | CDZ96250 |
| X₂₉₁ | M1 | 24 | 307114 | G | A | 2 | CDZ96255 |
| X₂₉₂ | M1 | 24 | 340663 | T | C | 3 | CDZ96265 |
| X₂₉₃ | M1 | 24 | 340866 | G | A | 3 | CDZ96265 |
| X₂₉₄ | M1 | 24 | 363770 | C | T | 2 | CDZ96275 |
| X₂₉₅ | M1 | 24 | 382911 | C | T | 2 | CDZ96282 |
| X₂₉₆ | M1 | 24 | 400418 | C | T | 2 | CDZ96287 |
| X₂₉₇ | M1 | 24 | 420108 | G | A | 3 | CDZ96291 |
| X₂₉₈ | M1 | 24 | 474698 | G | A | 2 | CDZ96308 |
| X₂₉₉ | M1 | 26 | 245 | G | A | 6 | |
| X₃₀₀ | M1 | 27 | 445 | C | T | 6 | |
| X₃₀₁ | M1 | 27 | 1012 | A | C | 6 | |
| X₃₀₂ | M1 | 27 | 1013 | T | A | 6 | |
| X₃₀₃ | M1 | 32 | 158 | C | T | 3 | CDZ96332 |
| X₃₀₄ | M1 | 32 | 215 | C | T | 3 | CDZ96332 |
| X₃₀₅ | M1 | 32 | 2438 | C | T | 3 | CDZ96332 |
| X₃₀₆ | M1 | 32 | 2734 | C | T | 1 | CDZ96332 |
| X₃₀₇ | M1 | 32 | 2821 | C | T | 7 | CDZ96332 |
| X₃₀₈ | M1 | 32 | 3067 | C | T | 2 | CDZ96332 |
| X₃₀₉ | M1 | 32 | 3506 | C | T | 4 | CDZ96332 |
| X₃₁₀ | M1 | 32 | 3562 | G | A | 4 | CDZ96332 |
| X₃₁₁ | M1 | 33 | 399 | T | A | 4 | CED82002 |
| X₃₁₂ | M1 | 33 | 24784 | C | T | 2 | CED82008 |
| X₃₁₃ | M1 | 33 | 45488 | C | T | 3 | CED82012 |
| X₃₁₄ | M1 | 33 | 64676 | G | A | 3 | CED82019 |
| X₃₁₅ | M1 | 33 | 79913 | G | A | 1 | CED82024 |
| X₃₁₆ | M1 | 33 | 105276 | G | A | 2 | CED82036 |
| X₃₁₇ | M1 | 33 | 109397 | G | A | 2 | CED82038 |
| X₃₁₈ | M1 | 33 | 219700 | C | T | 2 | CED82074 |
| X₃₁₉ | M1 | 33 | 236149 | C | T | 2 | CED82078 |
| X₃₂₀ | M1 | 33 | 257786 | C | T | 1 | CED82084 |
| X₃₂₁ | M1 | 33 | 260027 | G | A | 3 | CED82084 |
| X₃₂₂ | M1 | 33 | 274627 | G | A | 8 | CED82091 |
| X₃₂₃ | M1 | 33 | 276128 | C | T | 2 | CED82092 |
| X₃₂₄ | M1 | 33 | 283808 | C | T | 2 | CED82093 |
| X₃₂₅ | M1 | 33 | 304408 | C | T | 4 | CED82099 |
| X₃₂₆ | M1 | 33 | 311532 | G | A | 3 | CED82101 |
| X₃₂₇ | M1 | 33 | 312032 | G | A | 3 | CED82101 |
| X₃₂₈ | M1 | 33 | 317713 | G | A | 1 | CED82104 |
| X₃₂₉ | M1 | 33 | 318242 | G | A | 3 | CED82105 |
| X₃₃₀ | M1 | 33 | 325745 | C | T | 2 | CED82108 |
| X₃₃₁ | M1 | 33 | 327840 | C | T | 1 | CED82108 |
| X₃₃₂ | M1 | 33 | 341890 | G | A | 2 | CED82113 |
| X₃₃₃ | M1 | 33 | 348487 | C | T | 2 | CED82115 |
| X₃₃₄ | M1 | 33 | 371277 | G | A | 6 | CED82121- |
| | | | | | | | CED82122 |
| X₃₃₅ | M1 | 33 | 374131 | A | G | 6 | CED82121- |
| | | | | | | | CED82122 |
| X₃₃₆ | M1 | 33 | 374134 | A | G | 6 | CED82121- |
| | | | | | | | CED82122 |
| X₃₃₇ | M1 | 33 | 374137 | A | T | 6 | CED82121- |
| | | | | | | | CED82122 |
| X₃₃₈ | M1 | 33 | 374150 | A | C | 6 | CED82121- |
| | | | | | | | CED82122 |
| X₃₃₉ | M1 | 33 | 375339 | A | G | 6 | CED82121- |
| | | | | | | | CED82122 |
| X₃₄₀ | M1 | 33 | 375366 | T | C | 6 | CED82121- |
| | | | | | | | CED82122 |
| X₃₄₁ | M1 | 33 | 382577 | C | T | 3 | CED82122 |
| X₃₄₂ | M1 | 33 | 383212 | G | A | 3 | CED82122 |
| X₃₄₃ | M1 | 33 | 385139 | G | C | 2 | CED82122 |
| X₃₄₄ | M1 | 33 | 385155 | T | C | 2 | CED82122 |
| X₃₄₅ | M1 | 33 | 385319 | A | C | 2 | CED82122 |
| X₃₄₆ | M1 | 33 | 448815 | G | A | 2 | CED82144 |
| X₃₄₇ | M1 | 33 | 453975 | C | T | 2 | CED82147 |
| X₃₄₈ | M1 | 33 | 455451 | C | T | 3 | CED82146 |
| X₃₄₉ | M1 | 33 | 509127 | C | T | 3 | CED82166 |
| X₃₅₀ | M1 | 33 | 626521 | C | T | 3 | CED82203 |
| X₃₅₁ | M1 | 33 | 639242 | G | A | 2 | CED82208 |
| X₃₅₂ | M1 | 33 | 699423 | C | T | 1 | CED82227 |
| X₃₅₃ | M1 | 33 | 774105 | G | A | 2 | CED82248 |
| X₃₅₄ | M1 | 33 | 792965 | G | A | 1 | CED82256 |
| X₃₅₅ | M1 | 33 | 816048 | C | T | 3 | CED82262 |
| X₃₅₆ | M1 | 33 | 822184 | G | A | 3 | CED82264 |
| X₃₅₇ | M1 | 33 | 917771 | A | T | 7 | CED82294 |
| X₃₅₈ | M1 | 33 | 933316 | C | T | 3 | CED82299 |
| X₃₅₉ | M1 | 33 | 936350 | T | A | 3 | CED82300 |
| X₃₆₀ | M1 | 33 | 936356 | G | A | 3 | CED82300 |
| X₃₆₁ | M1 | 33 | 936571 | A | G | 3 | CED82300 |
| X₃₆₂ | M1 | 33 | 936600 | G | A | 3 | CED82300 |
| X₃₆₃ | M1 | 33 | 936667 | A | G | 3 | CED82300 |
| X₃₆₄ | M1 | 33 | 938992 | C | T | 3 | CED82300 |
| X₃₆₅ | M1 | 33 | 1043825 | C | T | 2 | CED82333 |
| X₃₆₆ | M1 | 33 | 1049699 | G | A | 3 | CED82334 |
| X₃₆₇ | M1 | 33 | 1057631 | G | T | 8 | CED82339 |
| X₃₆₈ | M1 | 33 | 1082006 | G | A | 1 | CED82348 |
| X₃₆₉ | M1 | 33 | 1087834 | G | A | 3 | CED82350 |
| X₃₇₀ | M1 | 33 | 1127676 | G | A | 3 | CED82358 |
| X₃₇₁ | M1 | 33 | 1137501 | G | A | 2 | CED82362 |
| X₃₇₂ | M1 | 33 | 1138444 | C | T | 3 | CED82363 |
| X₃₇₃ | M1 | 33 | 1165914 | G | A | 2 | CED82372 |
| X₃₇₄ | M1 | 33 | 1169025 | C | T | 2 | CED82372 |
| X₃₇₅ | M1 | 33 | 1191727 | C | T | 2 | CED82379 |
| X₃₇₆ | M1 | 33 | 1324395 | G | A | 3 | CED82417 |
| X₃₇₇ | M1 | 33 | 1339376 | C | T | 2 | CED82424 |
| X₃₇₈ | M1 | 33 | 1367015 | C | T | 2 | CED82432 |
| X₃₇₉ | M1 | 33 | 1442014 | G | A | 2 | CED82456 |
| X₃₈₀ | M1 | 33 | 1467702 | C | T | 1 | CED82463 |
| X₃₈₁ | M1 | 33 | 1470375 | C | T | 8 | CED82465 |
| X₃₈₂ | M1 | 33 | 1489288 | G | A | 1 | CED82471 |
| X₃₈₃ | M1 | 33 | 1499347 | G | A | 3 | CED82472 |
| X₃₈₄ | M1 | 33 | 1515148 | G | A | 2 | CED82478 |
| X₃₈₅ | M1 | 33 | 1515369 | G | A | 3 | CED82478 |
| X₃₈₆ | M1 | 33 | 1515652 | C | T | 3 | CED82478 |
| X₃₈₇ | M1 | 33 | 1544767 | A | C | 6 | CED82486 |
| | | | | | | | CED82485- |
| X₃₈₈ | M1 | 33 | 1544951 | C | G | 6 | CED82486 |
| | | | | | | | CED82485- |
| X₃₈₉ | M1 | 33 | 1572498 | C | T | 8 | CED82491 |
| X₃₉₀ | M1 | 33 | 1587443 | C | T | 3 | CED82497 |
| X₃₉₁ | M1 | 33 | 1596242 | C | T | 3 | CED82498 |
| X₃₉₂ | M1 | 33 | 1638726 | G | A | 3 | CED82513 |
| X₃₉₃ | M1 | 33 | 1642659 | G | A | 2 | CED82515 |
| X₃₉₄ | M1 | 33 | 1652749 | C | T | 3 | CED82516 |
| X₃₉₅ | M1 | 33 | 1666106 | C | T | 8 | CED82522 |
| X₃₉₆ | M1 | 33 | 1682149 | C | T | 1 | CED82526 |
| X₃₉₇ | M1 | 33 | 1700000 | G | A | 2 | CED82534 |
| X₃₉₈ | M1 | 33 | 1795298 | G | A | 1 | CED82562 |
| X₃₉₉ | M1 | 33 | 1841263 | G | A | 2 | CED82576 |
| X₄₀₀ | M1 | 33 | 1860278 | G | A | 3 | CED82582 |
| X₄₀₁ | M1 | 33 | 1861675 | C | T | 2 | CED82583 |
| X₄₀₂ | M1 | 33 | 1862200 | G | A | 3 | CED82582 |
| X₄₀₃ | M1 | 33 | 1881896 | T | C | 3 | CED82588 |
| X₄₀₄ | M1 | 33 | 1887401 | C | T | 1 | CED82591 |
| X₄₀₅ | M1 | 33 | 1888706 | C | T | 8 | CED82592 |
| X₄₀₆ | M1 | 33 | 1914838 | C | T | 8 | CED82602 |
| X₄₀₇ | M1 | 33 | 1938614 | G | A | 2 | CED82612 |
| X₄₀₈ | M1 | 33 | 1959142 | G | A | 8 | CED82619 |
| X₄₀₉ | M1 | 33 | 2008504 | C | A | 1 | CED82635 |
| X₄₁₀ | M1 | 33 | 2010230 | C | T | 2 | CED82636 |
| X₄₁₁ | M1 | 33 | 2034962 | G | A | 2 | CED82645 |
| X₄₁₂ | M1 | 33 | 2044014 | G | A | 3 | CED82647 |
| X₄₁₃ | M1 | 33 | 2050847 | G | A | 3 | CED82651 |
| X₄₁₄ | M1 | 36 | 320 | G | A | 6 | |
| X₄₁₅ | M1 | 36 | 1056 | G | A | 6 | |
| X₄₁₆ | M1 | 36 | 1295 | C | T | 6 | |
| X₄₁₇ | M1 | 36 | 1461 | A | T | 6 | |
| X₄₁₈ | M1 | 42 | 804 | C | T | 4 | CDZ96333 |
| X₄₁₉ | M1 | 42 | 1559 | G | A | 4 | CDZ96333 |
| X₄₂₀ | M1 | 48 | 405 | G | A | 6 | |
| X₄₂₁ | M1 | 48 | 563 | C | T | 6 | |
| X₄₂₂ | M1 | 48 | 565 | T | C | 6 | |
| X₄₂₃ | M1 | 48 | 576 | G | A | 6 | |
| X₄₂₄ | M1 | 48 | 580 | T | A | 6 | |
| X₄₂₅ | M1 | 50 | 145 | G | A | 6 | |
| X₄₂₆ | M1 | 52 | 140940 | T | C | 4 | CED82705 |
| X₄₂₇ | M1 | 52 | 144382 | C | T | 3 | CED82709 |
| X₄₂₈ | M1 | 52 | 150382 | C | T | 1 | CED82712 |
| X₄₂₉ | M1 | 52 | 151974 | C | T | 2 | CED82712 |
| X₄₃₀ | M1 | 52 | 183986 | C | T | 8 | CED82722 |
| X₄₃₁ | M1 | 52 | 207354 | C | T | 8 | CED82730 |
| X₄₃₂ | M1 | 52 | 284733 | G | A | 1 | CED82747 |
| X₄₃₃ | M1 | 52 | 316848 | C | T | 2 | CED82758 |
| X₄₃₄ | M1 | 52 | 346628 | G | A | 2 | CED82769 |
| X₄₃₅ | M1 | 52 | 360279 | C | T | 3 | CED82772 |
| X₄₃₆ | M1 | 52 | 390095 | G | A | 3 | CED82784 |
| X₄₃₇ | M1 | 52 | 395374 | G | A | 2 | CED82786 |
| X₄₃₈ | M1 | 52 | 398723 | C | T | 3 | CED82786 |
| X₄₃₉ | M1 | 52 | 398728 | C | T | 3 | CED82786 |
| X₄₄₀ | M1 | 52 | 516267 | C | T | 3 | CED82823 |
| X₄₄₁ | M1 | 52 | 552099 | G | A | 2 | CED82837 |
| X₄₄₂ | M1 | 52 | 552173 | G | A | 1 | CED82837 |
| X₄₄₃ | M1 | 52 | 571124 | G | A | 2 | CED82845 |
| X₄₄₄ | M1 | 52 | 595806 | C | T | 1 | CED82851 |
| X₄₄₅ | M1 | 52 | 631479 | C | T | 1 | CED82860 |
| X₄₄₆ | M1 | 52 | 746548 | G | A | 1 | CED82907 |
| X₄₄₇ | M1 | 52 | 758326 | C | T | 2 | CED82912 |
| X₄₄₈ | M1 | 52 | 817452 | T | A | 2 | CED82928 |
| X₄₄₉ | M1 | 52 | 840755 | C | T | 1 | CED82935 |
| X₄₅₀ | M1 | 52 | 842352 | C | T | 3 | CED82934 |
| X₄₅₁ | M1 | 52 | 849671 | G | A | 1 | CED82940 |
| X₄₅₂ | M1 | 52 | 928854 | C | T | 2 | CED82971 |
| X₄₅₃ | M1 | 52 | 938650 | G | A | 3 | CED82973 |
| X₄₅₄ | M1 | 52 | 967316 | A | T | 2 | CED82984 |
| X₄₅₅ | M1 | 52 | 967701 | T | A | 3 | CED82983 |
| X₄₅₆ | M1 | 52 | 970142 | T | C | 3 | CED82985 |
| X₄₅₇ | M1 | 52 | 978727 | C | T | 3 | CED82988 |
| X₄₅₈ | M1 | 52 | 1003899 | G | A | 2 | CED83001 |
| X₄₅₉ | M1 | 52 | 1010006 | C | T | 2 | CED83002 |
| X₄₆₀ | M1 | 52 | 1029498 | G | A | 1 | CED83007 |
| X₄₆₁ | M1 | 52 | 1043011 | C | T | 1 | CED83012 |
| X₄₆₂ | M1 | 52 | 1067895 | C | T | 1 | CED83020 |
| X₄₆₃ | M1 | 52 | 1158103 | C | T | 3 | CED83051 |
| X₄₆₄ | M1 | 52 | 1207168 | C | T | 2 | CED83065 |
| X₄₆₅ | M1 | 52 | 1219894 | C | T | 3 | CED83071 |
| X₄₆₆ | M1 | 52 | 1290031 | C | T | 3 | CED83096 |
| X₄₆₇ | M1 | 52 | 1291646 | C | T | 2 | CED83098 |
| X₄₆₈ | M1 | 52 | 1363357 | G | A | 3 | CED83122 |
| X₄₆₉ | M1 | 52 | 1363405 | C | T | 1 | CED83123 |
| X₄₇₀ | M1 | 52 | 1379155 | G | A | 2 | CED83128 |
| X₄₇₁ | M1 | 52 | 1389320 | G | A | 3 | CED83130 |
| X₄₇₂ | M1 | 52 | 1399439 | G | A | 2 | CED83134 |
| X₄₇₃ | M1 | 52 | 1474315 | G | A | 2 | CED83164 |
| X₄₇₄ | M1 | 52 | 1474412 | G | A | 3 | CED83166 |
| X₄₇₅ | M1 | 52 | 1481345 | G | A | 3 | CED83165 |
| X₄₇₆ | M1 | 52 | 1520883 | C | T | 3 | CED83179 |
| X₄₇₇ | M1 | 52 | 1526796 | G | A | 2 | CED83181 |
| X₄₇₈ | M1 | 52 | 1583655 | C | T | 2 | CED83206 |
| X₄₇₉ | M1 | 52 | 1621166 | C | T | 2 | CED83219 |
| X₄₈₀ | M1 | 52 | 1639254 | C | T | 1 | CED83227 |
| X₄₈₁ | M1 | 52 | 1708900 | A | G | 3 | CED83249 |
| X₄₈₂ | M1 | 52 | 1715136 | C | T | 8 | CED83250 |
| X₄₈₃ | M1 | 52 | 1715899 | C | T | 2 | CED83250 |
| X₄₈₄ | M1 | 52 | 1716210 | C | T | 3 | CED83250 |
| X₄₈₅ | M1 | 52 | 1760440 | G | A | 2 | CED83266 |
| X₄₈₆ | M1 | 52 | 1785354 | T | C | 3 | CED83272 |
| X₄₈₇ | M1 | 52 | 1788070 | G | A | 4 | CED83273 |
| X₄₈₈ | M1 | 52 | 1793370 | G | A | 3 | CED83275 |
| X₄₈₉ | M1 | 52 | 1807309 | G | A | 3 | CED83283 |
| X₄₉₀ | M1 | 52 | 1809897 | G | A | 3 | CED83285 |
| X₄₉₁ | M1 | 52 | 1861665 | C | T | 2 | CED83301 |
| X₄₉₂ | M1 | 52 | 1861681 | G | A | 2 | CED83301 |
| X₄₉₃ | M1 | 52 | 1871310 | C | T | 2 | CED83304 |
| X₄₉₁ | M1 | 52 | 1874150 | G | T | 3 | CED83305 |
| X₄₉₅ | M1 | 52 | 1893352 | G | A | 2 | CED83313 |
| X₄₉₆ | M1 | 52 | 1963875 | G | A | 3 | CED83335 |
| X₄₉₇ | M1 | 52 | 1987096 | G | A | 4 | CED83341 |
| X₄₉₈ | M1 | 52 | 1995167 | G | A | 3 | CED83342 |
| X₄₉₉ | M1 | 52 | 2029893 | G | A | 3 | CED83351 |
| X₅₀₀ | M1 | 52 | 2041781 | C | T | 8 | CED83355 |
| X₅₀₁ | M1 | 52 | 2047954 | G | A | 2 | CED83358 |
| X₅₀₂ | M1 | 52 | 2048018 | G | A | 2 | CED83358 |
| X₅₀₃ | M1 | 52 | 2050245 | G | A | 3 | CED83359 |
| X₅₀₄ | M1 | 52 | 2071127 | C | T | 3 | CED83365 |
| X₅₀₅ | M1 | 52 | 2081390 | G | A | 1 | CED83367 |
| X₅₀₆ | M1 | 52 | 2093148 | C | T | 3 | CED83368 |
| X₅₀₇ | M1 | 52 | 2120665 | C | T | 4 | CED83376 |
| X₅₀₈ | M1 | 52 | 2136885 | A | G | 1 | CED83382 |
| X₅₀₉ | M1 | 52 | 2158892 | C | T | 3 | CED83392 |
| X₅₁₀ | M1 | 52 | 2162878 | G | A | 2 | CED83392 |
| X₅₁₁ | M1 | 52 | 2178340 | G | A | 8 | CED83397 |
| X₅₁₂ | M1 | 52 | 2265219 | C | T | 2 | CED83425 |
| X₅₁₃ | M1 | 52 | 2266378 | C | T | 3 | CED83423 |
| X₅₁₄ | M1 | 52 | 2308421 | T | C | 3 | CED83439 |
| X₅₁₅ | M1 | 52 | 2327266 | C | T | 3 | CED83445 |
| X₅₁₆ | M1 | 52 | 2330881 | G | A | 4 | CED83447 |
| X₅₁₇ | M1 | 52 | 2364315 | G | A | 4 | CED83455 |
| X₅₁₈ | M1 | 52 | 2400778 | C | T | 4 | CED83463 |
| X₅₁₉ | M1 | 52 | 2415283 | C | T | 2 | CED83469 |
| X₅₂₀ | M1 | 52 | 2469433 | C | T | 3 | CED83486 |
| X₅₂₁ | M1 | 52 | 2531584 | C | T | 2 | CED83507 |
| X₅₂₂ | M1 | 52 | 2566106 | C | T | 3 | CED83520 |
| X₅₂₃ | M1 | 52 | 2575090 | A | G | 3 | CED83525 |
| X₅₂₄ | M1 | 53 | 26291 | G | A | 2 | CDZ96348 |
| X₅₂₅ | M1 | 54 | 4815 | G | A | 1 | CDZ96384 |
| X₅₂₆ | M1 | 54 | 4816 | A | T | 2 | CDZ96384 |
| X₅₂₇ | M1 | 54 | 4817 | G | C | 2 | 2CDZ96384 |
| X₅₂₈ | M1 | 54 | 4821 | G | A | 1 | CDZ96384 |
| X₅₂₉ | M1 | 54 | 72235 | G | A | 2 | CDZ96406 |
| X₅₃₀ | M1 | 54 | 87947 | G | A | 3 | CDZ96410 |
| X₅₃₁ | M1 | 54 | 106086 | G | A | 3 | CDZ96416 |
| X₅₃₂ | M1 | 54 | 119439 | C | T | 3 | CDZ96420 |
| X₅₃₃ | M1 | 54 | 157787 | T | C | 1 | CDZ96435 |
| X₅₃₄ | M1 | 54 | 194230 | G | A | 2 | CDZ96446 |
| X₅₃₅ | M1 | 54 | 202467 | C | T | 1 | CDZ96448 |
| X₅₃₆ | M1 | 54 | 206494 | G | A | 2 | CDZ96450 |
| X₅₃₇ | M1 | 54 | 254295 | C | T | 2 | CDZ96465 |
| X₅₃₈ | M1 | 54 | 274617 | A | T | 3 | CDZ96471 |
| X₅₃₉ | M1 | 54 | 357149 | G | A | 1 | CDZ96496 |
| X₅₄₀ | M1 | 54 | 359671 | G | A | 2 | CDZ96496 |
| X₅₄₁ | M1 | 54 | 370320 | G | A | 2 | CDZ96499 |
| X₅₄₂ | M1 | 54 | 391223 | A | G | 2 | CDZ96509 |
| X₅₄₃ | M1 | 54 | 410031 | C | A | 1 | CDZ96514 |
| X₅₄₄ | M1 | 54 | 427542 | C | T | 2 | CDZ96520 |
| X₅₄₅ | M1 | 54 | 431851 | C | T | 3 | CDZ96520 |
| X₅₄₆ | M1 | 54 | 437080 | G | A | 3 | CDZ96522 |
| X₅₄₇ | M1 | 54 | 478527 | C | T | 2 | CDZ96537 |
| X₅₄₈ | M1 | 54 | 564688 | C | T | 2 | CDZ96566 |
| X₅₄₉ | M1 | 54 | 576174 | G | A | 2 | CDZ96569 |
| X₅₅₀ | M1 | 54 | 583996 | G | A | 3 | CDZ96570 |
| X₅₅₁ | M1 | 54 | 616268 | A | G | 3 | CDZ96581 |
| X₅₅₂ | M1 | 54 | 647579 | C | T | 2 | CDZ96590 |
| X₅₅₃ | M1 | 54 | 667019 | C | T | 4 | CDZ96594 |
| X₅₅₄ | M1 | 54 | 667042 | C | T | 8 | CDZ96595 |
| X₅₅₅ | M1 | 54 | 733193 | T | C | 9 | CDZ96619 |
| X₅₅₆ | M1 | 54 | 743396 | G | A | 1 | CDZ96621 |
| X₅₅₇ | M1 | 58 | 93 | T | C | 6 | |
| X₅₅₈ | M1 | 67 | 111 | G | A | 6 | |
| X₅₅₉ | M1 | 69 | 29006 | G | A | 3 | CED83534 |
| X₅₆₀ | M1 | 69 | 34392 | G | A | 2 | CED83536 |
| X₅₆₁ | M1 | 69 | 99248 | C | T | 2 | CED83559 |
| X₅₆₂ | M1 | 69 | 107920 | C | T | 1 | CED83561 |
| X₅₆₃ | M1 | 69 | 201005 | G | A | 3 | CED83595 |
| X₅₆₄ | M1 | 69 | 293602 | G | A | 3 | CED83626 |
| X₅₆₅ | M1 | 69 | 305997 | C | T | 2 | CED83631 |
| X₅₆₆ | M1 | 69 | 371916 | C | T | 2 | CED83653 |
| X₅₆₇ | M1 | 69 | 415659 | C | T | 2 | CED83665 |
| X₅₆₈ | M1 | 69 | 461021 | C | T | 2 | CED83680 |
| X₅₆₉ | M1 | 69 | 461986 | G | A | 1 | CED83680 |
| X₅₇₀ | M1 | 69 | 472563 | C | T | 3 | CED83681 |
| X₅₇₁ | M1 | 69 | 482073 | G | T | 3 | CED83685 |
| X₅₇₂ | M1 | 69 | 556138 | C | T | 3 | CED83710 |
| X₅₇₃ | M1 | 69 | 585845 | G | A | 2 | CED83722 |
| X₅₇₄ | M1 | 69 | 627928 | C | T | 1 | CED83740 |
| X₅₇₅ | M1 | 69 | 631511 | G | A | 2 | CED83742 |
| X₅₇₆ | M1 | 69 | 637299 | T | C | 2 | CED83744 |
| X₅₇₇ | M1 | 69 | 675579 | G | A | 3 | CED83760 |
| X₅₇₈ | M1 | 69 | 676581 | G | A | 2 | CED83760 |
| X₅₇₉ | M1 | 69 | 676853 | G | A | 3 | CED83759 |
| X₅₈₀ | M1 | 69 | 678406 | C | T | 3 | CED83759 |
| X₅₈₁ | M1 | 69 | 757546 | C | A | 2 | CED83788 |
| X₅₈₂ | M1 | 69 | 828676 | C | T | 2 | CED83805 |
| X₅₈₃ | M1 | 69 | 857539 | C | T | 3 | CED83814 |
| X₅₈₄ | M1 | 69 | 865820 | C | T | 2 | CED83814 |
| X₅₈₅ | M1 | 69 | 869706 | G | A | 8 | CED83815 |
| X₅₈₆ | M1 | 69 | 892199 | G | A | 1 | CED83822 |
| X₅₈₇ | M1 | 69 | 894462 | C | T | 3 | CED83821 |
| X₅₈₈ | M1 | 69 | 898044 | C | T | 1 | CED83823 |
| X₅₈₉ | M1 | 69 | 962369 | G | A | 3 | CED83845 |
| X₅₉₀ | M1 | 69 | 971219 | C | T | 3 | CED83847 |
| X₅₉₁ | M1 | 69 | 988364 | G | A | 2 | CED83857 |
| X₅₉₂ | M1 | 69 | 989781 | G | A | 2 | CED83858 |
| X₅₉₃ | M1 | 69 | 1042212 | G | A | 2 | CED83875 |
| X₅₉₄ | M1 | 69 | 1080578 | G | A | 2 | CED83890 |
| X₅₉₅ | M1 | 69 | 1084824 | G | A | 3 | CED83891 |
| X₅₉₆ | M1 | 69 | 1084835 | C | T | 3 | CED83891 |
| X₅₉₇ | M1 | 69 | 1084848 | A | G | 3 | CED83891 |
| X₅₉₈ | M1 | 69 | 1084866 | A | G | 3 | CED83891 |
| X₅₉₉ | M1 | 69 | 1084931 | C | T | 3 | CED83891 |
| X₆₀₀ | M1 | 69 | 1102164 | C | T | 2 | CED83897 |
| X₆₀₁ | M1 | 69 | 1105560 | C | T | 2 | CED83899 |
| X₆₀₂ | M1 | 69 | 1109785 | C | T | 2 | CED83899 |
| X₆₀₃ | M1 | 69 | 1109813 | A | G | 3 | CED83899 |
| X₆₀₄ | M1 | 69 | 1109818 | A | G | 3 | CED83899 |
| X₆₀₅ | M1 | 69 | 1109819 | T | A | 3 | CED83899 |
| X₆₀₆ | M1 | 69 | 1109823 | T | C | 3 | CED83899 |
| X₆₀₇ | M1 | 69 | 1109830 | A | G | 3 | CED83899 |
| X₆₀₈ | M1 | 69 | 1109831 | C | A | 3 | CED83899 |
| X₆₀₉ | M1 | 69 | 1109835 | A | G | 3 | CED83899 |
| X₆₁₀ | M1 | 69 | 1115486 | C | T | 2 | CED83902 |
| X₆₁₁ | M1 | 69 | 1153118 | G | A | 2 | CED83915 |
| X₆₁₂ | M1 | 69 | 1215253 | G | A | 1 | CED83936 |
| X₆₁₃ | M1 | 69 | 1218409 | G | A | 3 | CED83936 |
| X₆₁₄ | M1 | 69 | 1260087 | G | A | 3 | CED83949 |
| X₆₁₅ | M1 | 69 | 1279557 | G | A | 2 | CED83959 |
| X₆₁₆ | M1 | 69 | 1342909 | G | A | 3 | CED83975 |
| X₆₁₇ | M1 | 69 | 1356844 | C | T | 8 | CED83982 |
| X₆₁₈ | M1 | 69 | 1372486 | C | T | 3 | CED83987 |
| X₆₁₉ | M1 | 69 | 1377243 | C | T | 3 | CED83989 |
| X₆₂₀ | M1 | 69 | 1396045 | G | A | 2 | CED83994 |
| X₆₂₁ | M1 | 69 | 1411237 | C | T | 1 | CED84001 |
| X₆₂₂ | M1 | 69 | 1411421 | C | T | 3 | CED83999 |
| X₆₂₃ | M1 | 69 | 1530586 | C | T | 3 | CED84038 |
| X₆₂₄ | M1 | 69 | 1590302 | G | A | 1 | CED84059 |
| X₆₂₅ | M1 | 69 | 1617492 | A | G | 2 | CED84068 |
| X₆₂₆ | M1 | 69 | 1652288 | C | T | 3 | CED84077 |
| X₆₂₇ | M1 | 69 | 1674261 | C | T | 1 | CED84084 |
| X₆₂₈ | M1 | 69 | 1678475 | C | T | 2 | CED84085 |
| X₆₂₉ | M1 | 69 | 1687394 | G | A | 1 | CED84087 |
| X₆₃₀ | M1 | 69 | 1688555 | C | T | 1 | CED84088 |
| X₆₃₁ | M1 | 69 | 1701017 | G | A | 2 | CED84094 |
| X₆₃₂ | M1 | 69 | 1714728 | G | A | 3 | CED84097 |
| X₆₃₃ | M1 | 69 | 1750423 | C | T | 1 | CED84111 |
| X₆₃₄ | M1 | 69 | 1788929 | G | A | 2 | CED84124 |
| X₆₃₅ | M1 | 69 | 1790823 | C | T | 2 | CED84125 |
| X₆₃₆ | M1 | 69 | 1792597 | C | T | 2 | CED84126 |
| X₆₃₇ | M1 | 69 | 1799816 | C | T | 8 | CED84128 |
| X₆₃₈ | M1 | 69 | 1800584 | G | A | 3 | CED84129 |
| X₆₃₉ | M1 | 69 | 1854739 | G | A | 3 | CED84145 |
| X₆₄₀ | M1 | 69 | 1855951 | C | T | 3 | CED84145 |
| X₆₄₁ | M1 | 69 | 1871563 | G | A | 2 | CED84153 |
| X₆₄₂ | M1 | 69 | 1878663 | C | T | 3 | CED84154 |
| X₆₄₃ | M1 | 69 | 1924621 | C | T | 3 | CED84172 |
| X₆₄₄ | M1 | 69 | 1949938 | G | A | 3 | CED84182 |
| X₆₄₅ | M1 | 69 | 1967529 | C | T | 1 | CED84189 |
| X₆₄₆ | M1 | 69 | 1968848 | A | G | 3 | CED84189 |
| X₆₄₇ | M1 | 69 | 2001469 | C | T | 3 | CED84197 |
| X₆₄₈ | M1 | 69 | 2009058 | G | A | 8 | CED84201 |
| X₆₄₉ | M1 | 69 | 2031440 | G | A | 2 | CED84210 |
| X₆₅₀ | M1 | 69 | 2099452 | C | G | 4 | CED84233 |
| X₆₅₁ | M1 | 69 | 2099556 | C | T | 4 | CED84233 |
| X₆₅₂ | M1 | 69 | 2099559 | A | T | 4 | CED84233 |
| X₆₅₃ | M1 | 69 | 2160207 | C | T | 1 | CED84255 |
| X₆₅₄ | M1 | 69 | 2219444 | G | A | 2 | CED84271 |
| X₆₅₅ | M1 | 69 | 2226317 | C | T | 2 | CED84272 |
| X₆₅₆ | M1 | 69 | 2231926 | G | A | 2 | CED84274 |
| X₆₅₇ | M1 | 69 | 2237950 | C | T | 2 | CED84276 |
| X₆₅₈ | M1 | 69 | 2263333 | G | A | 2 | CED84285 |
| X₆₅₉ | M1 | 69 | 2275703 | G | A | 2 | CED84290 |
| X₆₆₀ | M1 | 69 | 2320079 | T | A | 3 | CED84303 |
| X₆₆₁ | M1 | 69 | 2402826 | C | T | 2 | CED84333 |
| X₆₆₂ | M1 | 69 | 2421550 | C | T | 2 | CED84338 |
| X₆₆₃ | M1 | 69 | 2438727 | C | T | 3 | CED84343 |
| X₆₆₄ | M1 | 69 | 2483433 | G | A | 3 | CED84352 |
| X₆₆₅ | M1 | 72 | 93 | T | C | 6 | |
| X₆₆₆ | M1 | 72 | 584 | G | A | 6 | |
| X₆₆₇ | M1 | 72 | 856 | C | T | 6 | |
| X₆₆₈ | M1 | 72 | 1163 | C | T | 6 | |
| X₆₆₉ | M1 | 73 | 928 | C | T | 4 | CDZ96628 |
| X₆₇₀ | M1 | 77 | 18912 | A | G | 2 | CDZ96635 |
| X₆₇₁ | M1 | 77 | 39842 | G | A | 8 | CDZ96646 |
| X₆₇₂ | M1 | 77 | 47151 | C | T | 2 | CDZ96648 |
| X₆₇₃ | M1 | 77 | 84022 | G | A | 8 | CDZ96659 |
| X₆₇₄ | M1 | 77 | 116691 | G | A | 3 | CDZ96671 |
| X₆₇₅ | M1 | 78 | 6333 | G | A | 8 | CED84360 |
| X₆₇₆ | M1 | 78 | 15591 | C | T | 3 | CED84363 |
| X₆₇₇ | M1 | 78 | 26915 | C | T | 3 | CED84366 |
| X₆₇₈ | M1 | 78 | 35200 | G | A | 2 | CED84371 |
| X₆₇₉ | M1 | 78 | 100169 | G | A | 2 | CED84388 |
| X₆₈₀ | M1 | 78 | 158434 | G | A | 2 | CED84406 |
| X₆₈₁ | M1 | 78 | 158534 | G | A | 2 | CED84406 |
| X₆₈₂ | M1 | 78 | 191358 | G | A | 3 | CED84414 |
| X₆₈₃ | M1 | 78 | 200234 | C | T | 2 | CED84420 |
| X₆₈₄ | M1 | 78 | 238854 | C | T | 3 | CED84430 |
| X₆₈₅ | M1 | 78 | 262614 | A | C | 2 | CED84438 |
| X₆₈₆ | M1 | 78 | 263828 | T | C | 3 | CED84438 |
| X₆₈₇ | M1 | 78 | 263896 | T | C | 3 | CED84438 |
| X₆₈₈ | M1 | 78 | 281454 | C | A | 3 | CED84441 |
| X₆₈₉ | M1 | 78 | 292068 | C | T | 1 | CED84442 |
| X₆₉₀ | M1 | 78 | 298141 | C | G | 3 | CED84443 |
| X₆₉₁ | M1 | 78 | 299166 | G | A | 3 | CED84443 |
| X₆₉₂ | M1 | 78 | 299644 | G | A | 3 | CED84443 |
| X₆₉₃ | M1 | 78 | 302700 | A | G | 2 | CED84443 |
| X₆₉₄ | M1 | 78 | 311586 | C | T | 2 | CED84447 |
| X₆₉₅ | M1 | 78 | 333312 | A | G | 3 | CED84452 |
| X₆₉₆ | M1 | 78 | 376706 | C | T | 3 | CED84464 |
| X₆₉₇ | M1 | 78 | 386356 | C | T | 2 | CED84472 |
| X₆₉₈ | M1 | 78 | 439640 | C | T | 2 | CED84487 |
| X₆₉₉ | M1 | 78 | 480244 | C | T | 1 | CED84502 |
| X₇₀₀ | M1 | 78 | 487303 | C | T | 3 | CED84505 |
| X₇₀₁ | M1 | 78 | 611362 | C | T | 2 | CED84546 |
| X₇₀₂ | M1 | 78 | 626958 | C | A | 4 | CED84549 |
| X₇₀₃ | M1 | 78 | 666005 | C | T | 3 | CED84562 |
| X₇₀₄ | M1 | 78 | 706821 | A | G | 3 | CED84578 |
| X₇₀₅ | M1 | 78 | 708376 | C | T | 2 | CED84580 |
| X₇₀₆ | M1 | 78 | 710966 | G | A | 2 | CED84581 |
| X₇₀₇ | M1 | 78 | 726983 | G | A | 2 | CED84587 |
| X₇₀₈ | M1 | 78 | 763771 | G | A | 3 | CED84600 |
| X₇₀₉ | M1 | 78 | 774252 | G | A | 2 | CED84602 |
| X₇₁₀ | M1 | 78 | 811274 | G | A | 2 | CED84614 |
| X₇₁₁ | M1 | 78 | 895505 | C | T | 2 | CED84642 |
| X₇₁₂ | M1 | 78 | 918865 | C | T | 1 | CED84651 |
| X₇₁₃ | M1 | 78 | 952815 | G | A | 2 | CED84662 |
| X₇₁₄ | M1 | 78 | 952860 | G | A | 2 | CED84662 |
| X₇₁₅ | M1 | 78 | 976799 | C | T | 3 | CED84672 |
| X₇₁₆ | M1 | 78 | 1023381 | G | A | 2 | CED84688 |
| X₇₁₇ | M1 | 78 | 1066463 | C | T | 2 | CED84704 |
| X₇₁₈ | M1 | 78 | 1095322 | C | T | 2 | CED84715 |
| X₇₁₉ | M1 | 78 | 1100041 | G | A | 3 | CED84715 |
| X₇₂₀ | M1 | 78 | 1112587 | C | T | 2 | CED84722 |
| X₇₂₁ | M1 | 78 | 1115511 | G | A | 1 | CED84723 |
| X₇₂₂ | M1 | 78 | 1142438 | G | A | 2 | CED84729 |
| X₇₂₃ | M1 | 78 | 1216573 | C | T | 1 | CED84752 |
| X₇₂₄ | M1 | 78 | 1266077 | G | A | 2 | CED84770 |
| X₇₂₅ | M1 | 78 | 1302286 | C | T | 3 | CED84782 |
| X₇₂₆ | M1 | 78 | 1315312 | C | T | 3 | CED84786 |
| X₇₂₇ | M1 | 78 | 1317124 | G | A | 3 | CED84787 |
| X₇₂₈ | M1 | 78 | 1322274 | G | A | 1 | CED84790 |
| X₇₂₉ | M1 | 78 | 1324423 | T | C | 2 | CED84791 |
| X₇₃₀ | M1 | 78 | 1344640 | C | T | 3 | CED84795 |
| X₇₃₁ | M1 | 78 | 1397982 | G | A | 3 | CED84818 |
| X₇₃₂ | M1 | 78 | 1426722 | C | T | 2 | CED84829 |
| X₇₃₃ | M1 | 78 | 1495995 | C | T | 1 | CED84852 |
| X₇₃₄ | M1 | 78 | 1520586 | C | T | 1 | CED84855 |
| X₇₃₅ | M1 | 78 | 1563246 | C | T | 3 | CED84865 |
| X₇₃₆ | M1 | 78 | 1568326 | C | T | 2 | CED84868 |
| X₇₃₇ | M1 | 78 | 1642170 | G | A | 3 | CED84889 |
| X₇₃₈ | M1 | 78 | 1660408 | G | A | 2 | CED84897 |
| X₇₃₉ | M1 | 78 | 1730707 | C | T | 3 | CED84922 |
| X₇₄₀ | M1 | 78 | 1742796 | G | A | 3 | CED84926 |
| X₇₄₁ | M1 | 78 | 1745162 | C | T | 4 | CED84927 |
| X₇₄₂ | M1 | 79 | 65 | G | A | 3 | CDZ96674 |
| X₇₄₃ | M1 | 79 | 133 | A | G | 3 | CDZ96674 |
| X₇₄₄ | M1 | 79 | 3698 | C | G | 4 | CDZ96674 |
| X₇₄₅ | M1 | 79 | 20544 | A | G | 2 | CDZ96675 |
| X₇₄₆ | M1 | 79 | 57804 | G | A | 2 | CDZ96687 |
| X₇₄₇ | M1 | 79 | 64133 | C | T | 3 | CDZ96688 |
| X₇₄₈ | M1 | 79 | 64658 | C | T | 3 | CDZ96688 |
| X₇₄₉ | M1 | 79 | 65402 | C | T | 3 | CDZ96688 |
| X₇₅₀ | M1 | 79 | 132683 | C | T | 2 | CDZ96713 |
| X₇₅₁ | M1 | 79 | 171814 | C | T | 3 | CDZ96727 |
| X₇₅₂ | M1 | 79 | 307021 | C | T | 3 | CDZ96777 |
| X₇₅₃ | M1 | 79 | 346823 | G | A | 2 | CDZ96789 |
| X₇₅₄ | M1 | 79 | 378247 | C | T | 2 | CDZ96800 |
| X₇₅₅ | M1 | 79 | 409085 | C | T | 8 | CDZ96810 |
| X₇₅₆ | M1 | 79 | 412661 | G | A | 2 | CDZ96811 |
| X₇₅₇ | M1 | 79 | 492523 | C | T | 3 | CDZ96842 |
| X₇₅₈ | M1 | 79 | 508274 | C | T | 8 | CDZ96848 |
| X₇₅₉ | M1 | 79 | 575411 | C | T | 3 | CDZ96868 |
| X₇₆₀ | M1 | 79 | 579674 | G | A | 1 | CDZ96871 |
| X₇₆₁ | M1 | 79 | 617057 | C | T | 2 | CDZ96882 |
| X₇₆₂ | M1 | 79 | 679140 | C | T | 2 | CDZ96904 |
| X₇₆₃ | M1 | 79 | 696174 | G | A | 4 | CDZ96911 |
| X₇₆₄ | M1 | 79 | 710422 | G | A | 2 | CDZ96916 |
| X₇₆₅ | M1 | 79 | 735053 | T | C | 2 | CDZ96928 |
| X₇₆₆ | M1 | 79 | 749596 | G | A | 4 | CDZ96930 |
| X₇₆₇ | M1 | 79 | 759403 | C | T | 3 | CDZ96931 |
| X₇₆₈ | M1 | 79 | 759659 | G | A | 2 | CDZ96931 |
| X₇₆₉ | M1 | 79 | 760458 | G | T | 1 | CDZ96932 |
| X₇₇₀ | M1 | 79 | 760541 | A | G | 2 | CDZ96932 |
| X₇₇₁ | M1 | 79 | 760891 | A | G | 2 | CDZ96932 |
| X₇₇₂ | M1 | 79 | 760904 | T | C | 2 | CDZ96932 |
| X₇₇₃ | M1 | 79 | 761056 | T | C | 3 | CDZ96932 |
| X₇₇₄ | M1 | 79 | 768537 | A | G | 4 | CDZ96933 |
| X₇₇₅ | M1 | 79 | 776112 | A | G | 4 | CDZ96934 |
| X₇₇₆ | M1 | 79 | 786064 | A | G | 3 | CDZ96934 |
| X₇₇₇ | M1 | 79 | 798799 | C | T | 1 | CDZ96939 |
| X₇₇₈ | M1 | 79 | 914302 | C | T | 3 | CDZ96977 |
| X₇₇₉ | M1 | 79 | 940003 | C | T | 2 | CDZ96991 |
| X₇₈₀ | M1 | 79 | 962607 | G | A | 3 | CDZ96997 |
| X₇₈₁ | M1 | 79 | 1000786 | A | G | 1 | CDZ97007 |
| X₇₈₂ | M1 | 79 | 1002991 | G | A | 1 | CDZ97008 |
| X₇₈₃ | M1 | 79 | 1044652 | G | A | 1 | CDZ97023 |
| X₇₈₄ | M1 | 79 | 1056822 | G | T | 3 | CDZ97025 |
| X₇₈₅ | M1 | 79 | 1069426 | C | T | 2 | CDZ97032 |
| X₇₈₆ | M1 | 79 | 1075960 | G | A | 8 | CDZ97034 |
| X₇₈₇ | M1 | 79 | 1086267 | G | A | 2 | CDZ97038 |
| X₇₈₈ | M1 | 79 | 1123288 | C | T | 2 | CDZ97049 |
| X₇₈₉ | M1 | 79 | 1140763 | G | A | 3 | CDZ97053 |
| X₇₉₀ | M1 | 79 | 1191202 | G | A | 3 | CDZ97070 |
| X₇₉₁ | M1 | 79 | 1229129 | G | A | 2 | CDZ97086 |
| X₇₉₂ | M1 | 79 | 1231740 | C | T | 2 | CDZ97087 |
| X₇₉₃ | M1 | 79 | 1265502 | C | T | 1 | CDZ97100 |
| X₇₉₄ | M1 | 79 | 1284476 | C | T | 1 | CDZ97106 |
| X₇₉₅ | M1 | 79 | 1318034 | C | T | 1 | CDZ97117 |
| X₇₉₆ | M1 | 79 | 1336766 | C | T | 4 | CDZ97121 |
| X₇₉₇ | M1 | 79 | 1344403 | C | T | 2 | CDZ97124 |
| X₇₉₈ | M1 | 79 | 1367232 | C | T | 5 | CDZ97129 |
| X₇₉₉ | M1 | 79 | 1387800 | G | A | 3 | CDZ97135 |
| X₈₀₀ | M1 | 79 | 1410287 | C | T | 1 | CDZ97145 |
| X₈₀₁ | M1 | 79 | 1410481 | G | A | 1 | CDZ97145 |
| X₈₀₂ | M1 | 79 | 1423385 | C | T | 1 | CDZ97150 |
| X₈₀₃ | M1 | 79 | 1430954 | G | A | 2 | CDZ97152 |
| X₈₀₄ | M1 | 79 | 1471094 | C | T | 3 | CDZ97163 |
| X₈₀₅ | M1 | 79 | 1540205 | C | T | 2 | CDZ97186 |
| X₈₀₆ | M1 | 79 | 1564902 | C | T | 1 | CDZ97195 |
| X₈₀₇ | M1 | 79 | 1624415 | G | A | 1 | CDZ97217 |
| X₈₀₈ | M1 | 79 | 1674448 | G | A | 4 | CDZ97228 |
| X₈₀₉ | M1 | 79 | 1732022 | G | A | 3 | CDZ97245 |
| X₈₁₀ | M1 | 79 | 1797660 | C | T | 3 | CDZ97265 |
| X₈₁₁ | M1 | 79 | 1797676 | G | A | 3 | CDZ97265 |
| X₈₁₂ | M1 | 79 | 1842448 | G | A | 2 | CDZ97282 |
| X₈₁₃ | M1 | 79 | 1854359 | G | A | 3 | CDZ97285 |
| X₈₁₄ | M1 | 79 | 1855037 | A | G | 3 | CDZ97285 |
| X₈₁₅ | M1 | 79 | 1859220 | A | G | 1 | CDZ97291 |
| X₈₁₆ | M1 | 79 | 1883004 | A | G | 1 | CDZ97298 |
| X₈₁₇ | M1 | 79 | 1883021 | C | A | 2 | CDZ97298 |
| X₈₁₈ | M1 | 79 | 1930688 | G | A | 3 | CDZ97315 |
| X₈₁₉ | M1 | 79 | 1934434 | G | A | 3 | CDZ97316 |
| X₈₂₀ | M1 | 79 | 1977783 | G | A | 3 | CDZ97330 |
| X₈₂₁ | M1 | 79 | 1990424 | G | A | 2 | CDZ97334 |
| X₈₂₂ | M1 | 79 | 2013304 | G | A | 2 | CDZ97344 |
| X₈₂₃ | M1 | 79 | 2013361 | C | T | 8 | CDZ97344 |
| X₈₂₄ | M1 | 79 | 2045917 | C | T | 3 | CDZ97355 |
| X₈₂₅ | M1 | 79 | 2052320 | C | T | 2 | CDZ97361 |
| X₈₂₆ | M1 | 79 | 2073260 | G | T | 3 | CDZ97366 |
| X₈₂₇ | M1 | 79 | 2089423 | C | T | 2 | CDZ97372 |
| X₈₂₈ | M1 | 79 | 2113064 | G | A | 3 | CDZ97381 |
| X₈₂₉ | M1 | 79 | 2121041 | G | A | 3 | CDZ97380 |
| X₈₃₀ | M1 | 79 | 2152573 | C | T | 2 | CDZ97392 |
| X₈₃₁ | M1 | 79 | 2169813 | C | T | 3 | CDZ97396 |
| X₈₃₂ | M1 | 79 | 2172085 | C | T | 3 | CDZ97397 |
| X₈₃₃ | M1 | 79 | 2179936 | G | A | 1 | CDZ97402 |
| X₈₃₄ | M1 | 79 | 2187306 | C | T | 3 | CDZ97404 |
| X₈₃₅ | M1 | 79 | 2188410 | G | A | 2 | CDZ97405 |
| X₈₃₆ | M1 | 79 | 2220254 | C | T | 3 | CDZ97414 |
| X₈₃₇ | M1 | 79 | 2268540 | C | T | 1 | CDZ97435 |
| X₈₃₈ | M1 | 79 | 2271652 | G | C | 2 | CDZ97437 |
| X₈₃₉ | M1 | 79 | 2294761 | G | A | 8 | CDZ97444 |
| X₈₄₀ | M1 | 79 | 2320060 | G | A | 2 | CDZ97454 |
| X₈₄₁ | M1 | 79 | 2339881 | C | G | 3 | CDZ97460 |
| X₈₄₂ | M1 | 79 | 2340326 | G | A | 3 | CDZ97462 |
| X₈₄₃ | M1 | 85 | 462 | G | A | 6 | |
| X₈₄₄ | M1 | 85 | 463 | G | G | 6 | |
| X₈₄₅ | M1 | 85 | 467 | A | T | 6 | |
| X₈₄₆ | M1 | 85 | 512 | A | G | 6 | |
| X₈₄₇ | M1 | 85 | 516 | G | A | 6 | |
| X₈₄₈ | M1 | 85 | 521 | C | T | 6 | |
| X₈₄₉ | M1 | 85 | 522 | A | G | 6 | |
| X₈₅₀ | M1 | 86 | 230 | A | G | 6 | |
| X₈₅₁ | M1 | 88 | 119 | C | T | 3 | CDZ97464 |
| X₈₅₂ | M1 | 88 | 196 | G | A | 3 | CDZ97464 |
| X₈₅₃ | M1 | 88 | 898 | C | T | 4 | CDZ97464 |
| X₈₅₄ | M1 | 99 | 245 | G | A | 6 | |
| X₈₅₅ | M1 | 105 | 258 | A | G | 2 | CDZ97474 |
| X₈₅₆ | M1 | 105 | 429 | C | T | 4 | CDZ97474 |
| X₈₅₇ | M1 | 106 | 278 | A | G | 6 | |
| X₈₅₈ | M1 | 109 | 396 | T | C | 6 | |
| X₈₅₉ | M1 | 115 | 361 | G | A | 6 | |
| X₈₆₀ | M1 | 118 | 396 | C | T | 2 | CDZ97478 |
| X₈₆₁ | M1 | 118 | 870 | G | A | 4 | CDZ97478 |
| X₈₆₂ | M1 | 118 | 1491 | G | A | 4 | CDZ97478 |
| X₈₆₃ | M1 | 124 | 72117 | G | A | 2 | CDZ97501 |
| X₈₆₄ | M1 | 124 | 72760 | G | A | 1 | CDZ97501 |
| X₈₆₅ | M1 | 124 | 94611 | G | A | 1 | CDZ97507 |
| X₈₆₆ | M1 | 124 | 156052 | G | A | 2 | CDZ97524 |
| X₈₆₇ | M1 | 124 | 171458 | G | T | 1 | CDZ97530 |
| X₈₆₈ | M1 | 124 | 179336 | C | T | 1 | CDZ97533 |
| X₈₆₉ | M1 | 124 | 207992 | C | T | 3 | CDZ97541 |
| X₈₇₀ | M1 | 124 | 222249 | C | T | 1 | CDZ97547 |
| X₈₇₁ | M1 | 125 | 35864 | T | C | 3 | CDZ97573 |
| X₈₇₂ | M1 | 129 | 299 | G | A | 3 | CDZ97577 |
| X₈₇₃ | M1 | 129 | 433 | G | A | 3 | CDZ97577 |
| X₈₇₄ | M1 | 129 | 856 | G | A | 2 | CDZ97577 |
| X₈₇₅ | M1 | 129 | 1013 | C | T | 1 | CDZ97577 |
| X₈₇₆ | M1 | 130 | 674 | C | T | 4 | CDZ97578 |
| X₈₇₇ | M1 | 138 | 123 | G | T | 6 | |
| X₈₇₈ | M1 | 141 | 15764 | C | T | 2 | CDZ97587 |
| X₈₇₉ | M1 | 141 | 25126 | C | T | 2 | CDZ97591 |
| X₈₈₀ | M1 | 149 | 1663 | A | G | 3 | CDZ97598 |
| X₈₈₁ | M1 | 149 | 2074 | T | G | 3 | CDZ97598 |
| X₈₈₂ | M1 | 149 | 2453 | C | T | 3 | CDZ97598 |
| X₈₈₃ | M1 | 159 | 106 | A | C | 6 | |
| X₈₈₄ | M1 | 162 | 47699 | G | A | 2 | CDZ97619 |
| X₈₈₅ | M1 | 162 | 70405 | A | G | 1 | CDZ97625 |
| X₈₈₆ | M1 | 162 | 148101 | G | A | 3 | CDZ97648 |
| X₈₈₇ | M1 | 162 | 207179 | C | T | 8 | CDZ97668 |
| X₈₈₈ | M1 | 162 | 209584 | C | T | 3 | CDZ97670 |
| X₈₈₉ | M1 | 162 | 223407 | C | T | 2 | CDZ97674 |
| X₈₉₀ | M1 | 162 | 227242 | G | A | 3 | CDZ97674 |
| X₈₉₁ | M1 | 162 | 233092 | C | T | 3 | CDZ97676 |
| X₈₉₂ | M1 | 162 | 291566 | G | A | 4 | CDZ97695 |
| X₈₉₃ | M1 | 162 | 308369 | T | C | 1 | CDZ97702 |
| X₈₉₄ | M1 | 162 | 318857 | G | A | 4 | CDZ97703 |
| X₈₉₅ | M1 | 162 | 320785 | G | C | 4 | CDZ97703 |
| X₈₉₆ | M1 | 162 | 320786 | T | G | 4 | CDZ97703 |
| X₈₉₇ | M1 | 162 | 321460 | C | G | 4 | CDZ97703 |
| X₈₉₈ | M1 | 162 | 321463 | A | C | 4 | CDZ97703 |
| X₈₉₉ | M1 | 162 | 322591 | G | A | 4 | CDZ97703 |
| X₉₀₀ | M1 | 162 | 323448 | T | G | 2 | CDZ97703 |
| X₉₀₁ | M1 | 162 | 323451 | T | G | 2 | CDZ97703 |
| X₉₀₂ | M1 | 162 | 323480 | T | C | 1 | CDZ97703 |
| X₉₀₃ | M1 | 162 | 323735 | A | G | 1 | CDZ97703 |
| X₉₀₄ | M1 | 162 | 324114 | T | C | 2 | CDZ97703 |
| X₉₀₅ | M1 | 162 | 324139 | C | T | 2 | CDZ97703 |
| X₉₀₆ | M1 | 162 | 324568 | A | G | 2 | CDZ97703 |
| X₉₀₇ | M1 | 162 | 360320 | G | A | 2 | CDZ97714 |
| X₉₀₈ | M1 | 162 | 398165 | C | T | 1 | CDZ97730 |
| X₉₀₉ | M1 | 162 | 414579 | C | T | 8 | CDZ97737 |
| X₉₁₀ | M1 | 162 | 424391 | C | T | 3 | CDZ97740 |
| X₉₁₁ | M1 | 162 | 444123 | T | C | 2 | CDZ97748 |
| X₉₁₂ | M1 | 162 | 467207 | C | T | 3 | CDZ97755 |
| X₉₁₃ | M1 | 162 | 491906 | G | A | 3 | CDZ97764 |
| X₉₁₄ | M1 | 162 | 492101 | G | A | 3 | CDZ97764 |
| X₉₁₅ | M1 | 162 | 501886 | C | T | 8 | CDZ97769 |
| X₉₁₆ | M1 | 162 | 507949 | G | A | 2 | CDZ97771 |
| X₉₁₇ | M1 | 162 | 632311 | G | A | 2 | CDZ97814 |
| X₉₁₈ | M1 | 162 | 633321 | G | A | 2 | CDZ97814 |
| X₉₁₉ | M1 | 162 | 633633 | G | A | 1 | CDZ97814 |
| X₉₂₀ | M1 | 162 | 638083 | C | T | 1 | CDZ97814 |
| X₉₂₁ | M1 | 162 | 640005 | C | T | 2 | CDZ97815 |
| X₉₂₂ | M1 | 162 | 674192 | C | T | 1 | CDZ97824 |
| X₉₂₃ | M1 | 162 | 691535 | C | T | 2 | CDZ97828 |
| X₉₂₄ | M1 | 162 | 738675 | G | A | 3 | CDZ97842 |
| X₉₂₅ | M1 | 162 | 738686 | C | T | 3 | CDZ97842 |
| X₉₂₆ | M1 | 162 | 792386 | G | A | 3 | CDZ97863 |
| X₉₂₇ | M1 | 162 | 808830 | G | A | 3 | CDZ97869 |
| X₉₂₈ | M1 | 162 | 871911 | C | T | 8 | CDZ97890 |
| X₉₂₉ | M1 | 185 | 2337 | C | T | 8 | CDZ97958 |
| X₉₃₀ | M1 | 189 | 32 | G | A | 3 | CDZ97960 |
| X₉₃₁ | M1 | 189 | 1306 | C | T | 3 | CDZ97961 |
| X₉₃₂ | M1 | 189 | 64473 | G | A | 2 | CDZ97979 |
| X₉₃₃ | M1 | 189 | 126573 | G | A | 3 | CDZ97996 |
| X₉₃₄ | M1 | 189 | 127356 | G | A | 3 | CDZ97996 |
| X₉₃₅ | M1 | 189 | 194647 | A | G | 3 | CDZ98020 |
| X₉₃₆ | M1 | 189 | 194665 | A | G | 3 | CDZ98020 |
| X₉₃₇ | M1 | 189 | 212649 | C | T | 2 | CDZ98028 |
| X₉₃₈ | M1 | 189 | 303106 | G | A | 2 | CDZ98057 |
| X₉₃₉ | M1 | 189 | 323680 | C | T | 2 | CDZ98063 |
| X₉₄₀ | M1 | 189 | 332957 | G | A | 3 | CDZ98065 |
| X₉₄₁ | M1 | 189 | 371247 | G | A | 5 | CDZ98078 |
| X₉₄₂ | M1 | 189 | 394551 | C | T | 2 | CDZ98085 |
| X₉₄₃ | M1 | 189 | 452298 | G | A | 2 | CDZ98106 |
| X₉₄₄ | M1 | 191 | 342 | A | G | 3 | CDZ98107 |
| X₉₄₅ | M1 | 191 | 347 | C | T | 3 | CDZ98107 |
| X₉₄₆ | M1 | 191 | 427 | C | T | 3 | CDZ98107 |
| X₉₄₇ | M1 | 191 | 451 | C | T | 3 | CDZ98107 |
| X₉₄₈ | M1 | 191 | 487 | A | G | 3 | CDZ98107 |
| X₉₄₉ | M1 | 197 | 624 | C | T | 3 | CDZ98111 |
| X₉₅₀ | M1 | 198 | 202 | C | A | 6 | |
| X₉₅₁ | M1 | 198 | 203 | G | A | 6 | |
| X₉₅₂ | M1 | 198 | 238 | C | T | 6 | |
| X₉₅₃ | M1 | 198 | 265 | C | T | 6 | |
| X₉₅₄ | M1 | 199 | 688 | C | T | 6 | |
| X₉₅₅ | M1 | 199 | 911 | C | T | 6 | |
| X₉₅₆ | M1 | 199 | 971 | C | T | 6 | |
| X₉₅₇ | M1 | 199 | 1218 | C | T | 6 | |
| X₉₅₈ | M1 | 202 | 171 | C | T | 6 | |
| X₉₅₉ | M1 | 205 | 360 | C | T | 3 | CDZ98112 |
| X₉₆₀ | M1 | 205 | 981 | C | T | 4 | CDZ98112 |
| X₉₆₁ | M1 | 206 | 406 | G | A | 6 | |
| X₉₆₂ | M1 | 208 | 117 | G | A | 6 | |
| X₉₆₃ | M1 | 208 | 476 | G | A | 6 | |
| X₉₆₄ | M1 | 208 | 616 | G | A | 6 | |
| X₉₆₅ | M1 | 208 | 935 | G | A | 6 | |
| X₉₆₆ | M1 | 209 | 312 | C | T | 8 | CDZ98113 |
| X₉₆₇ | M1 | 220 | 116 | C | G | 6 | |
| X₉₆₈ | M1 | 223 | 93 | G | A | 4 | CDZ98118 |
| X₉₆₉ | M1 | 223 | 102 | A | G | 4 | CDZ98118 |
| X₉₇₀ | M1 | 223 | 133 | A | G | 4 | CDZ98118 |
| X₉₇₁ | M1 | 223 | 150 | T | C | 4 | CDZ98118 |
| X₉₇₂ | M1 | 223 | 155 | A | C | 4 | CDZ98118 |
| X₉₇₃ | M1 | 223 | 158 | T | C | 4 | CDZ98118 |
| X₉₇₄ | M1 | 223 | 160 | C | T | 4 | CDZ98118 |
| X₉₇₅ | M1 | 223 | 175 | G | A | 4 | CDZ98118 |
| X₉₇₆ | M1 | 223 | 177 | A | G | 4 | CDZ98118 |
| X₉₇₇ | M1 | 224 | 27 | T | A | 6 | |
| X₉₇₈ | M1 | 225 | 317 | C | T | 6 | |
| X₉₇₉ | M1 | 227 | 202 | G | A | 6 | |
| X₉₈₀ | M1 | 232 | 340 | G | A | 3 | CDZ98119 |
| X₉₈₁ | M1 | 232 | 1379 | C | T | 1 | CDZ98119 |
| X₉₈₂ | M1 | 232 | 1521 | C | T | 2 | CDZ98119 |
| X₉₈₃ | M1 | 232 | 1662 | G | A | 2 | CDZ98119 |
| X₉₈₄ | M1 | 232 | 1761 | C | T | 2 | CDZ98119 |
| X₉₈₅ | M1 | 232 | 2027 | C | T | 4 | CDZ98119 |
| X₉₈₆ | M1 | 232 | 3060 | C | T | 2 | CDZ98120 |
| X₉₈₇ | M1 | 232 | 3284 | C | T | 4 | CDZ98119 |
| X₉₈₈ | M1 | 232 | 4437 | G | A | 2 | CDZ98121 |
| X₉₈₉ | M1 | 232 | 4561 | C | T | 3 | CDZ98120 |
| X₉₉₀ | M1 | 242 | 7334 | C | T | 2 | CDZ98125 |
| X₉₉₁ | M1 | 242 | 41710 | G | A | 3 | CDZ98131 |
| X₉₉₂ | M1 | 242 | 50262 | G | A | 8 | CDZ98135 |
| X₉₉₃ | M1 | 242 | 88037 | G | A | 2 | CDZ98147 |
| X₉₉₄ | M1 | 242 | 106805 | G | A | 3 | CDZ98152 |
| X₉₉₅ | M1 | 242 | 107587 | G | A | 4 | CDZ98153 |
| X₉₉₆ | M1 | 242 | 119446 | T | C | 1 | CDZ98156 |
| X₉₉₇ | M1 | 242 | 149113 | C | T | 2 | CDZ98165 |
| X₉₉₈ | M1 | 242 | 150461 | C | T | 3 | CDZ98164 |
| X₉₉₉ | M1 | 242 | 168689 | G | A | 1 | CDZ98172 |
| X₁₀₀₀ | M1 | 242 | 213986 | G | A | 8 | CDZ98185 |
| X₁₀₀₁ | M1 | 242 | 227271 | C | T | 3 | CDZ98191 |
| X₁₀₀₂ | M1 | 242 | 233088 | G | A | 2 | CDZ98193 |
| X₁₀₀₃ | M1 | 242 | 254710 | A | G | 9 | CDZ98200 |
| X₁₀₀₄ | M1 | 242 | 309675 | G | A | 2 | CDZ98216 |
| X₁₀₀₅ | M1 | 242 | 310353 | G | A | 2 | CDZ98216 |
| X₁₀₀₆ | M1 | 242 | 357209 | G | A | 1 | CDZ98233 |
| X₁₀₀₇ | M1 | 242 | 404132 | G | A | 3 | CDZ98248 |
| X₁₀₀₈ | M1 | 242 | 405825 | G | A | 3 | CDZ98250 |
| X₁₀₀₉ | M1 | 242 | 412676 | G | A | 3 | CDZ98249 |
| X₁₀₁₀ | M1 | 242 | 439891 | T | A | 2 | CDZ98259 |
| X₁₀₁₁ | M1 | 242 | 472562 | C | T | 3 | CDZ98266 |
| X₁₀₁₂ | M1 | 242 | 485936 | G | A | 4 | CDZ98270 |
| X₁₀₁₃ | M1 | 242 | 492389 | G | A | 2 | CDZ98274 |
| X₁₀₁₄ | M1 | 242 | 514780 | C | T | 2 | CDZ98282 |
| X₁₀₁₅ | M1 | 242 | 542663 | G | A | 3 | CDZ98290 |
| X₁₀₁₆ | M1 | 242 | 545031 | G | A | 3 | CDZ98293 |
| X₁₀₁₇ | M1 | 242 | 559999 | G | A | 2 | CDZ98297 |
| X₁₀₁₈ | M1 | 242 | 577367 | G | A | 3 | CDZ98302 |
| X₁₀₁₉ | M1 | 242 | 602456 | G | A | 2 | CDZ98308 |
| X₁₀₂₀ | M1 | 242 | 602531 | G | A | 2 | CDZ98308 |
| X₁₀₂₁ | M1 | 242 | 604704 | C | T | 2 | CDZ98309 |
| X₁₀₂₂ | M1 | 249 | 206 | G | A | 4 | CED84929 |
| X₁₀₂₃ | M1 | 249 | 7968 | A | T | 3 | CED84930 |
| X₁₀₂₄ | M1 | 249 | 42295 | C | T | 2 | CED84942 |
| X₁₀₂₅ | M1 | 249 | 72016 | C | T | 3 | CED84950 |
| X₁₀₂₆ | M1 | 249 | 142920 | G | A | 1 | CED84978 |
| X₁₀₂₇ | M1 | 249 | 157550 | C | T | 8 | CED84983 |
| X₁₀₂₈ | M1 | 249 | 159819 | C | T | 1 | CED84984 |
| X₁₀₂₉ | M1 | 249 | 191304 | C | T | 2 | CED84988 |
| X₁₀₃₀ | M1 | 249 | 269707 | G | A | 2 | CED85013 |
| X₁₀₃₁ | M1 | 249 | 272075 | C | T | 8 | CED85013 |
| X₁₀₃₂ | M1 | 249 | 289154 | C | T | 2 | CED85018 |
| X₁₀₃₃ | M1 | 249 | 305975 | G | A | 2 | CED85023 |
| X₁₀₃₄ | M1 | 249 | 342990 | G | A | 2 | CED85036 |
| X₁₀₃₅ | M1 | 249 | 371535 | G | A | 2 | CED85048 |
| X₁₀₃₆ | M1 | 249 | 377814 | G | A | 3 | CED85051 |
| X₁₀₃₇ | M1 | 249 | 485782 | C | T | 3 | CED85089 |
| X₁₀₃₈ | M1 | 249 | 487588 | G | A | 2 | CED85090 |
| X₁₀₃₉ | M1 | 249 | 500195 | C | T | 8 | CED85093 |
| X₁₀₄₀ | M1 | 249 | 501310 | C | T | 3 | CED85093 |
| X₁₀₄₁ | M1 | 249 | 501510 | T | C | 3 | CED85093 |
| X₁₀₄₂ | M1 | 249 | 509901 | C | T | 1 | CED85096 |
| X₁₀₄₃ | M1 | 249 | 532943 | A | G | 3 | CED85099 |
| X₁₀₄₄ | M1 | 249 | 565916 | C | T | 4 | CED85113 |
| X₁₀₄₅ | M1 | 249 | 568518 | C | T | 2 | CED85115 |
| X₁₀₄₆ | M1 | 249 | 574798 | C | T | 1 | CED85117 |
| X₁₀₄₇ | M1 | 249 | 598579 | C | T | 2 | CED85125 |
| X₁₀₄₈ | M1 | 249 | 637944 | G | A | 1 | CED85135 |
| X₁₀₄₉ | M1 | 249 | 654772 | C | T | 4 | CED85141 |
| X₁₀₅₀ | M1 | 249 | 660408 | G | A | 2 | CED85144 |
| X₁₀₅₁ | M1 | 249 | 715551 | G | A | 3 | CED85163 |
| X₁₀₅₂ | M1 | 249 | 772481 | G | A | 3 | CED85180 |
| X₁₀₅₃ | M1 | 249 | 854220 | G | A | 2 | CED85201 |
| X₁₀₅₄ | M1 | 249 | 871689 | G | A | 5 | CED85204 |
| X₁₀₅₅ | M1 | 249 | 889853 | G | A | 1 | CED85211 |
| X₁₀₅₆ | M1 | 249 | 911274 | C | T | 2 | CED85218 |
| X₁₀₅₇ | M1 | 249 | 927876 | C | T | 4 | CED85222 |
| X₁₀₅₈ | M1 | 249 | 932606 | C | T | 3 | CED85223 |
| X₁₀₅₉ | M1 | 249 | 945434 | C | T | 3 | CED85227 |
| X₁₀₆₀ | M1 | 249 | 945727 | C | T | 3 | CED85227 |
| X₁₀₆₁ | M1 | 249 | 969333 | G | T | 3 | CED85238 |
| X₁₀₆₂ | M1 | 249 | 977170 | C | T | 2 | CED85242 |
| X₁₀₆₃ | M1 | 249 | 989520 | C | T | 3 | CED85243 |
| X₁₀₆₄ | M1 | 249 | 1014098 | C | T | 2 | CED85252 |
| X₁₀₆₅ | M1 | 249 | 1014926 | C | T | 2 | CED85252 |
| X₁₀₆₆ | M1 | 249 | 1021827 | C | T | 2 | CED85254 |
| X₁₀₆₇ | M1 | 249 | 1050123 | C | T | 2 | CED85262 |
| X₁₀₆₈ | M1 | 249 | 1076166 | C | T | 1 | CED85270 |
| X₁₀₆₉ | M1 | 249 | 1114790 | G | A | 1 | CED85283 |
| X₁₀₇₀ | M1 | 249 | 1127638 | C | T | 2 | CED85286 |
| X₁₀₇₁ | M1 | 249 | 1144309 | G | A | 3 | CED85291 |
| X₁₀₇₂ | M1 | 249 | 1155955 | C | T | 3 | CED85297 |
| X₁₀₇₃ | M1 | 249 | 1176977 | G | A | 1 | CED85303 |
| X₁₀₇₄ | M1 | 249 | 1195367 | G | A | 3 | CED85307 |
| X₁₀₇₅ | M1 | 249 | 1213338 | C | T | 3 | CED85314 |
| X₁₀₇₆ | M1 | 249 | 1230068 | C | T | 2 | CED85319 |
| X₁₀₇₇ | M1 | 249 | 1286733 | G | A | 3 | CED85336 |
| X₁₀₇₈ | M1 | 249 | 1299472 | C | T | 1 | CED85343 |
| X₁₀₇₉ | M1 | 249 | 1331428 | G | A | 3 | CED85352 |
| X₁₀₈₀ | M1 | 249 | 1350079 | G | A | 2 | CED85357 |
| X₁₀₈₁ | M1 | 249 | 1359399 | G | A | 1 | CED85360 |
| X₁₀₈₂ | M1 | 249 | 1391183 | C | T | 2 | CED85372 |
| X₁₀₈₃ | M1 | 249 | 1452855 | C | T | 2 | CED85396 |
| X₁₀₈₄ | M1 | 249 | 1452994 | C | T | 3 | CED85394 |
| X₁₀₈₅ | M1 | 249 | 1471661 | C | T | 1 | CED85402 |
| X₁₀₈₆ | M1 | 249 | 1486828 | G | A | 1 | CED85411 |
| X₁₀₈₇ | M1 | 249 | 1486831 | T | C | 1 | CED85411 |
| X₁₀₈₈ | M1 | 249 | 1498029 | T | C | 3 | CED85415 |
| X₁₀₈₉ | M1 | 249 | 1498823 | T | C | 2 | CED85414 |
| X₁₀₉₀ | M1 | 249 | 1498829 | C | T | 2 | CED85414 |
| X₁₀₉₁ | M1 | 249 | 1499741 | G | A | 2 | CED85415 |
| X₁₀₉₂ | M1 | 249 | 1502631 | G | T | 2 | CED85416 |
| X₁₀₉₃ | M1 | 249 | 1502641 | T | A | 2 | CED85416 |
| X₁₀₉₄ | M1 | 249 | 1502819 | T | G | 1 | CED85416 |
| X₁₀₉₅ | M1 | 249 | 1505138 | G | A | 3 | CED85416 |
| X₁₀₉₆ | M1 | 249 | 1518591 | T | A | 3 | CED85419 |
| X₁₀₉₇ | M1 | 249 | 1519431 | A | G | 3 | CED85419 |
| X₁₀₉₈ | M1 | 249 | 1520169 | C | T | 1 | CED85420 |
| X₁₀₉₉ | M1 | 249 | 1567124 | G | A | 3 | CED85432 |
| X₁₁₀₀ | M1 | 249 | 1599907 | C | T | 3 | CED85444 |
| X₁₁₀₁ | M1 | 249 | 1619036 | G | A | 2 | CED85450 |
| X₁₁₀₂ | M1 | 249 | 1653615 | T | G | 2 | CED85457 |
| X₁₁₀₃ | M1 | 249 | 1653962 | C | T | 4 | CED85458 |
| X₁₁₀₄ | M1 | 249 | 1666185 | C | T | 3 | CED85460 |
| X₁₁₀₅ | M1 | 249 | 1726421 | G | A | 2 | CED85476 |
| X₁₁₀₆ | M1 | 249 | 1726777 | C | T | 3 | CED85474 |
| X₁₁₀₇ | M1 | 249 | 1729264 | C | T | 1 | CED85476 |
| X₁₁₀₈ | M1 | 249 | 1741408 | C | T | 1 | CED85480 |
| X₁₁₀₉ | M1 | 249 | 1760715 | C | T | 3 | CED85489 |
| X₁₁₁₀ | M1 | 249 | 1780551 | A | G | 3 | CED85493 |
| X₁₁₁₁ | M1 | 249 | 1780569 | A | G | 3 | CED85493 |
| X₁₁₁₂ | M1 | 249 | 1786050 | C | T | 3 | CED85496 |
| X₁₁₁₃ | M1 | 249 | 1801965 | G | A | 3 | CED85501 |
| X₁₁₁₄ | M1 | 249 | 1803575 | C | T | 2 | CED85502 |
| X₁₁₁₅ | M1 | 249 | 1804835 | G | A | 2 | CED85502 |
| X₁₁₁₆ | M1 | 249 | 1834426 | G | A | 2 | CED85511 |
| X₁₁₁₇ | M1 | 249 | 1862072 | C | T | 1 | CED85520 |
| X₁₁₁₈ | M1 | 249 | 1880762 | G | A | 1 | CED85525 |
| X₁₁₁₉ | M1 | 249 | 1944026 | G | A | 1 | CED85545 |
| X₁₁₂₀ | M1 | 249 | 1963639 | G | T | 2 | CED85550 |
| X₁₁₂₁ | M1 | 249 | 1981230 | G | A | 3 | CED85557 |
| X₁₁₂₂ | M1 | 249 | 1988505 | C | T | 3 | CED85560 |
| X₁₁₂₃ | M1 | 249 | 2010712 | G | A | 3 | CED85564 |
| X₁₁₂₄ | M1 | 249 | 2015272 | G | A | 2 | CED85567 |
| X₁₁₂₅ | M1 | 249 | 2027477 | G | A | 1 | CED85573 |
| X₁₁₂₆ | M1 | 249 | 2032298 | C | T | 2 | CED85575 |
| X₁₁₂₇ | M1 | 249 | 2063221 | G | A | 2 | CED85586 |
| X₁₁₂₈ | M1 | 249 | 2080239 | G | A | 3 | CED85590 |
| X₁₁₂₉ | M1 | 249 | 2110956 | C | T | 1 | CED85603 |
| X₁₁₃₀ | M1 | 249 | 2124517 | C | T | 2 | CED85607 |
| X₁₁₃₁ | M1 | 249 | 2183695 | G | A | 2 | CED85623 |
| X₁₁₃₂ | M1 | 249 | 2198205 | G | A | 8 | CED85628 |
| X₁₁₃₃ | M1 | 249 | 2223626 | G | A | 1 | CED85633 |
| X₁₁₃₄ | M1 | 249 | 2255547 | G | C | 3 | CED85640 |
| X₁₁₃₅ | M1 | 251 | 874 | G | A | 6 | |
| X₁₁₃₆ | M1 | 252 | 512 | C | T | 6 | |
| X₁₁₃₇ | M1 | 252 | 524 | C | T | 6 | |
| X₁₁₃₈ | M1 | 258 | 267 | G | A | 6 | |
| X₁₁₃₉ | M1 | 258 | 1139 | A | T | 6 | |
| X₁₁₄₀ | M1 | 259 | 91 | G | C | 6 | |
| X₁₁₄₁ | M1 | 260 | 156 | G | A | 6 | |
| X₁₁₄₂ | M1 | 262 | 4049 | G | A | 1 | CDZ98330 |
| X₁₁₄₃ | M1 | 262 | 20959 | G | A | 1 | CDZ98336 |
| X₁₁₄₄ | M1 | 262 | 30347 | G | A | 2 | CDZ98338 |
| X₁₁₄₅ | M1 | 262 | 30359 | G | A | 2 | CDZ98338 |
| X₁₁₄₆ | M1 | 262 | 63941 | G | A | 3 | CDZ98349 |
| X₁₁₄₇ | M1 | 262 | 81226 | G | A | 2 | CDZ98358 |
| X₁₁₄₈ | M1 | 262 | 96076 | C | T | 8 | CDZ98364 |
| X₁₁₄₉ | M1 | 262 | 130174 | C | T | 3 | CDZ98372 |
| X₁₁₅₀ | M1 | 262 | 148151 | C | T | 3 | CDZ98375 |
| X₁₁₅₁ | M1 | 262 | 148199 | G | A | 2 | CDZ98376 |
| X₁₁₅₂ | M1 | 262 | 164438 | G | A | 2 | CDZ98383 |
| X₁₁₅₃ | M1 | 262 | 191816 | C | T | 2 | CDZ98393 |
| X₁₁₅₄ | M1 | 262 | 201531 | G | A | 8 | CDZ98396 |
| X₁₁₅₅ | M1 | 262 | 221937 | C | T | 3 | CDZ98403 |
| X₁₁₅₆ | M1 | 262 | 225924 | G | A | 3 | CDZ98404 |
| X₁₁₅₇ | M1 | 262 | 242371 | C | T | 3 | CDZ98411 |
| X₁₁₅₈ | M1 | 262 | 250756 | A | G | 3 | CDZ98412 |
| X₁₁₅₉ | M1 | 262 | 319302 | G | A | 1 | CDZ98436 |
| X₁₁₆₀ | M1 | 262 | 350852 | C | T | 8 | CDZ98449 |
| X₁₁₆₁ | M1 | 262 | 359947 | A | G | 1 | CDZ98451 |
| X₁₁₆₂ | M1 | 262 | 366171 | G | A | 3 | CDZ98452 |
| X₁₁₆₃ | M1 | 262 | 380519 | C | T | 4 | CDZ98457 |
| X₁₁₆₄ | M1 | 262 | 383215 | C | T | 8 | CDZ98459 |
| X₁₁₆₅ | M1 | 262 | 390030 | C | T | 2 | CDZ98460 |
| X₁₁₆₆ | M1 | 262 | 397539 | G | A | 3 | CDZ98463 |
| X₁₁₆₇ | M1 | 262 | 420102 | G | A | 2 | CDZ98468 |
| X₁₁₆₈ | M1 | 262 | 444331 | G | A | 2 | CDZ98477 |
| X₁₁₆₉ | M1 | 262 | 446956 | C | T | 2 | CDZ98477 |
| X₁₁₇₀ | M1 | 262 | 451669 | C | T | 3 | CDZ98478 |
| X₁₁₇₁ | M1 | 262 | 498239 | C | T | 8 | CDZ98496 |
| X₁₁₇₂ | M1 | 262 | 503840 | G | A | 2 | CDZ98499 |
| X₁₁₇₃ | M1 | 262 | 525946 | C | T | 2 | CDZ98509 |
| X₁₁₇₄ | M1 | 262 | 539452 | A | G | 3 | CDZ98514 |
| X₁₁₇₅ | M1 | 262 | 539470 | A | G | 3 | CDZ98514 |
| X₁₁₇₆ | M1 | 262 | 552414 | C | T | 1 | CDZ98518 |
| X₁₁₇₇ | M1 | 262 | 557280 | G | A | 2 | CDZ98518 |
| X₁₁₇₈ | M1 | 262 | 560713 | G | A | 8 | CDZ98519 |
| X₁₁₇₉ | M1 | 262 | 562795 | C | T | 2 | CDZ98521 |
| X₁₁₈₀ | M1 | 262 | 567591 | G | A | 2 | CDZ98524 |
| X₁₁₈₁ | M1 | 262 | 567801 | G | A | 2 | CDZ98524 |
| X₁₁₈₂ | M1 | 262 | 573667 | C | T | 2 | CDZ98526 |
| X₁₁₈₃ | M1 | 262 | 618198 | G | A | 3 | CDZ98538 |
| X₁₁₈₄ | M1 | 262 | 627705 | C | T | 3 | CDZ98542 |
| X₁₁₈₅ | M1 | 262 | 638804 | G | C | 3 | CDZ98544 |
| X₁₁₈₆ | M1 | 262 | 639962 | A | G | 4 | CDZ98544 |
| X₁₁₈₇ | M1 | 262 | 640066 | A | G | 4 | CDZ98544 |
| X₁₁₈₈ | M1 | 262 | 653920 | A | G | 4 | CDZ98545 |
| X₁₁₈₉ | M1 | 262 | 656031 | C | A | 4 | CDZ98545 |
| X₁₁₉₀ | M1 | 262 | 668764 | C | T | 3 | CDZ98545 |
| X₁₁₉₁ | M1 | 262 | 670988 | C | T | 2 | CDZ98547 |
| X₁₁₉₂ | M1 | 262 | 691577 | C | T | 2 | CDZ98551 |
| X₁₁₉₃ | M1 | 262 | 707203 | C | T | 2 | CDZ98556 |
| X₁₁₉₄ | M1 | 262 | 751209 | C | T | 2 | CDZ98572 |
| X₁₁₉₅ | M1 | 262 | 771330 | G | A | 2 | CDZ98578 |
| X₁₁₉₆ | M1 | 262 | 822734 | G | A | 2 | CDZ98597 |
| X₁₁₉₇ | M1 | 262 | 831789 | C | T | 1 | CDZ98601 |
| X₁₁₉₈ | M1 | 262 | 835874 | C | T | 3 | CDZ98601 |
| X₁₁₉₉ | M1 | 262 | 856616 | G | A | 8 | CDZ98612 |
| X₁₂₀₀ | M1 | 262 | 865999 | G | A | 3 | CDZ98613 |
| X₁₂₀₁ | M1 | 262 | 971713 | G | A | 3 | CDZ98649 |
| X₁₂₀₂ | M1 | 262 | 1076581 | G | A | 3 | CDZ98679 |
| X₁₂₀₃ | M1 | 262 | 1140198 | C | T | 2 | CDZ98701 |
| X₁₂₀₄ | M1 | 262 | 1209662 | G | A | 2 | CDZ98723 |
| X₁₂₀₅ | M1 | 262 | 1225705 | C | T | 2 | CDZ98730 |
| X₁₂₀₆ | M1 | 262 | 1226072 | C | T | 2 | CDZ98730 |
| X₁₂₀₇ | M1 | 262 | 1229407 | G | A | 3 | CDZ98732 |
| X₁₂₀₈ | M1 | 262 | 1233054 | G | A | 1 | CDZ98733 |
| X₁₂₀₉ | M1 | 262 | 1262331 | C | T | 3 | CDZ98740 |
| X₁₂₁₀ | M1 | 262 | 1277604 | G | A | 1 | CDZ98747 |
| X₁₂₁₁ | M1 | 262 | 1284428 | G | A | 1 | CDZ98748 |
| X₁₂₁₂ | M1 | 262 | 1305361 | G | A | 3 | CDZ98753 |
| X₁₂₁₃ | M1 | 262 | 1329643 | C | T | 3 | CDZ98760 |
| X₁₂₁₄ | M1 | 262 | 1332176 | C | T | 2 | CDZ98761 |
| X₁₂₁₅ | M1 | 262 | 1349561 | G | A | 2 | CDZ98766 |
| X₁₂₁₆ | M1 | 262 | 1351116 | A | G | 1 | CDZ98766 |
| X₁₂₁₇ | M1 | 262 | 1367361 | C | T | 2 | CDZ98772 |
| X₁₂₁₈ | M1 | 262 | 1408928 | G | A | 3 | CDZ98786 |
| X₁₂₁₉ | M1 | 262 | 1424293 | G | A | 2 | CDZ98791 |
| X₁₂₂₀ | M1 | 26 | 1455677 | G | A | 5 | CDZ98804 |
| X₁₂₂₁ | M1 | 262 | 1546246 | C | T | 3 | CDZ98833 |
| X₁₂₂₂ | M1 | 262 | 1549845 | C | T | 2 | CDZ98837 |
| X₁₂₂₃ | M1 | 262 | 1550311 | C | T | 3 | CDZ98836 |
| X₁₂₂₄ | M1 | 262 | 1550456 | C | T | 1 | CDZ98837 |
| X₁₂₂₅ | M1 | 262 | 1615052 | G | T | 2 | CDZ98855 |
| X₁₂₂₆ | M1 | 262 | 1615762 | G | A | 2 | CDZ98855 |
| X₁₂₂₇ | M1 | 262 | 1684375 | G | A | 2 | CDZ98876 |
| X₁₂₂₈ | M1 | 262 | 1692423 | T | C | 3 | CDZ98877 |
| X₁₂₂₉ | M1 | 262 | 1694625 | C | T | 3 | CDZ98878 |
| X₁₂₃₀ | M1 | 262 | 1695377 | C | T | 3 | CDZ98878 |
| X₁₂₃₁ | M1 | 262 | 1709112 | G | A | 3 | CDZ98884 |
| X₁₂₃₂ | M1 | 262 | 1711527 | G | A | 1 | CDZ98886 |
| X₁₂₃₃ | M1 | 262 | 1712334 | G | A | 2 | CDZ98886 |
| X₁₂₃₄ | M1 | 262 | 1713238 | G | A | 4 | CDZ98885 |
| X₁₂₃₅ | M1 | 262 | 1716385 | G | A | 3 | CDZ98887 |
| X₁₂₃₆ | M1 | 266 | 85 | C | T | 6 | |
| X₁₂₃₇ | M1 | 266 | 252 | C | T | 6 | |
| X₁₂₃₈ | M2 | 22 | 1643 | C | T | 2 | CED80056 |
| X₁₂₃₉ | M2 | 22 | 2524 | G | A | 4 | CED80056 |
| X₁₂₄₀ | M2 | 28 | 236 | G | A | 3 | CDZ96150 |
| X₁₂₄₁ | M2 | 28 | 377 | G | A | 3 | CDZ96150 |
| X₁₂₄₂ | M2 | 28 | 1506 | C | T | 2 | CDZ96150 |
| X₁₂₄₃ | M2 | 28 | 1677 | C | T | 4 | CDZ96150 |
| X₁₂₄₄ | M2 | 43 | 464 | G | A | 2 | CDZ96151 |
| X₁₂₄₅ | M2 | 43 | 753 | C | T | 2 | CDZ96151 |
| X₁₂₄₆ | M2 | 43 | 757 | G | A | 1 | CDZ96151 |
| X₁₂₄₇ | M2 | 43 | 1527 | C | T | 3 | CDZ96151 |
| X₁₂₄₈ | M2 | 43 | 1748 | G | A | 3 | CDZ96151 |
| X₁₂₄₉ | M2 | 43 | 1928 | C | T | 3 | CDZ96151 |
| X₁₂₅₀ | M2 | 62 | 26 | T | A | 4 | CDZ96152 |
| X₁₂₅₁ | M2 | 62 | 27 | T | C | 4 | CDZ96152 |
| X₁₂₅₂ | M2 | 62 | 55 | T | A | 4 | CDZ96152 |
| X₁₂₅₃ | M2 | 62 | 403 | C | T | 1 | CDZ96152 |
| X₁₂₅₄ | M2 | 62 | 875 | G | A | 2 | CDZ96152 |
| X₁₂₅₅ | M2 | 102 | 339 | C | T | 4 | CDZ96153 |
| X₁₂₅₆ | M2 | 102 | 951 | G | A | 4 | CDZ96153 |
| X₁₂₅₇ | M2 | 102 | 1042 | G | A | 4 | CDZ96153 |
| X₁₂₅₈ | M2 | 102 | 2334 | G | A | 2 | CDZ96153 |
| X₁₂₅₉ | M2 | 102 | 2590 | C | T | 2 | CDZ96153 |
| X₁₂₆₀ | M2 | 102 | 3427 | C | T | 3 | CDZ96153 |
| X₁₂₆₁ | M2 | 176 | 358 | G | A | 3 | CED80058 |
| X₁₂₆₂ | M2 | 176 | 1872 | G | A | 4 | CED80058 |
| X₁₂₆₃ | M2 | 176 | 1980 | G | A | 4 | CED80058 |
| X₁₂₆₄ | M2 | 176 | 2335 | A | G | 4 | CED80058 |
| X₁₂₆₅ | M2 | 176 | 2349 | G | A | 4 | CED80058 |
| X₁₂₆₆ | M2 | 179 | 1525 | G | A | 7 | CDZ96154 |
| X₁₂₆₇ | M2 | 179 | 1780 | C | T | 7 | CDZ96154 |
| X₁₂₆₈ | M2 | 188 | 815 | C | T | 2 | CED80060 |
| X₁₂₆₉ | M2 | 188 | 1174 | C | T | 4 | CED80060 |
| X₁₂₇₀ | M2 | 188 | 2163 | G | A | 4 | CED80060 |
| X₁₂₇₁ | M2 | 188 | 2170 | G | A | 4 | CED80060 |
| X₁₂₇₂ | M2 | 247 | 102 | G | A | 4 | CED80061 |
| X₁₂₇₃ | M2 | 247 | 989 | C | T | 2 | CED80061 |
| X₁₂₇₄ | M2 | 247 | 1053 | G | A | 2 | CED80061 |
| X₁₂₇₅ | M2 | 3 | 142 | C | T | 6 | |
| X₁₂₇₆ | M2 | 7 | 160 | T | C | 6 | |
| X₁₂₇₇ | M2 | 8 | 1110 | C | T | 6 | |
| X₁₂₇₈ | M2 | 11 | 154 | A | C | 6 | |
| X₁₂₇₉ | M2 | 11 | 158 | C | T | 6 | |
| X₁₂₈₀ | M2 | 15 | 28 | C | G | 6 | |
| X₁₂₈₁ | M2 | 24 | 513 | T | C | 3 | CDZ96160 |
| X₁₂₈₂ | M2 | 24 | 520 | C | G | 3 | CDZ96160 |
| X₁₂₈₃ | M2 | 24 | 5850 | C | T | 2 | CDZ96160 |
| X₁₂₈₄ | M2 | 24 | 85162 | G | A | 2 | CDZ96190 |
| X₁₂₈₅ | M2 | 24 | 169574 | C | T | 3 | CDZ96213 |
| X₁₂₈₆ | M2 | 24 | 180340 | G | A | 3 | CDZ96216 |
| X₁₂₈₇ | M2 | 24 | 197593 | C | T | 2 | CDZ96224 |
| X₁₂₈₈ | M2 | 24 | 236940 | G | A | 3 | CDZ96232 |
| X₁₂₈₉ | M2 | 24 | 266697 | G | A | 1 | CDZ96242 |
| X₁₂₉₀ | M2 | 24 | 278319 | G | A | 3 | CDZ96245 |
| X₁₂₉₁ | M2 | 24 | 307114 | G | A | 2 | CDZ96255 |
| X₁₂₉₂ | M2 | 24 | 340663 | T | C | 3 | CDZ96265 |
| X₁₂₉₃ | M2 | 24 | 363770 | C | T | 2 | CDZ96275 |
| X₁₂₉₄ | M2 | 24 | 420108 | G | A | 3 | CDZ96291 |
| X₁₂₉₅ | M2 | 24 | 470687 | G | A | 3 | CDZ96308 |
| X₁₂₉₆ | M2 | 24 | 473232 | A | G | 2 | CDZ96308 |
| X₁₂₉₇ | M2 | 24 | 491396 | C | T | 3 | CDZ96313 |
| X₁₂₉₈ | M2 | 27 | 445 | C | T | 6 | |
| X₁₂₉₉ | M2 | 27 | 1012 | A | C | 6 | |
| X₁₃₀₀ | M2 | 27 | 1013 | T | A | 6 | |
| X₁₃₀₁ | M2 | 32 | 158 | C | T | 3 | CDZ96332 |
| X₁₃₀₂ | M2 | 32 | 215 | C | T | 3 | CDZ96332 |
| X₁₃₀₃ | M2 | 32 | 2438 | C | T | 3 | CDZ96332 |
| X₁₃₀₄ | M2 | 32 | 2734 | C | T | 1 | CDZ96332 |
| X₁₃₀₅ | M2 | 32 | 2821 | C | T | 7 | CDZ96332 |
| X₁₃₀₆ | M2 | 32 | 3067 | C | T | 2 | CDZ96332 |
| X₁₃₀₇ | M2 | 32 | 3506 | C | T | 4 | CDZ96332 |
| X₁₃₀₈ | M2 | 32 | 3562 | G | A | 4 | CDZ96332 |
| X₁₃₀₉ | M2 | 33 | 399 | T | A | 4 | CED82002 |
| X₁₃₁₀ | M2 | 33 | 24784 | C | T | 2 | CED82008 |
| X₁₃₁₁ | M2 | 33 | 45488 | C | T | 3 | CED82012 |
| X₁₃₁₂ | M2 | 33 | 79913 | G | A | 1 | CED82024 |
| X₁₃₁₃ | M2 | 33 | 109397 | G | A | 2 | CED82038 |
| X₁₃₁₄ | M2 | 33 | 109494 | G | A | 2 | CED82038 |
| X₁₃₁₅ | M2 | 33 | 182417 | G | A | 3 | CED82062 |
| X₁₃₁₆ | M2 | 33 | 192563 | C | T | 2 | CED82066 |
| X₁₃₁₇ | M2 | 33 | 257786 | C | T | 1 | CED82084 |
| X₁₃₁₈ | M2 | 33 | 260027 | G | A | 3 | CED82084 |
| X₁₃₁₉ | M2 | 33 | 274627 | G | A | 8 | CED82091 |
| X₁₃₂₀ | M2 | 33 | 283808 | C | T | 2 | CED82093 |
| X₁₃₂₁ | M2 | 33 | 311532 | G | A | 3 | CED82101 |
| X₁₃₂₂ | M2 | 33 | 318242 | G | A | 3 | CED82105 |
| X₁₃₂₃ | M2 | 33 | 325745 | C | T | 2 | CED82108 |
| X₁₃₂₄ | M2 | 33 | 327840 | C | T | 1 | CED82108 |
| X₁₃₂₅ | M2 | 33 | 341890 | G | A | 2 | CED82113 |
| X₁₃₂₆ | M2 | 33 | 374131 | A | G | 6 | CED82121- |
| | | | | | | | CED82122 |
| X₁₃₂₇ | M2 | 33 | 374134 | A | G | 6 | CED82121- |
| | | | | | | | CED82122 |
| X₁₃₂₈ | M2 | 33 | 374137 | A | T | 6 | CED82121- |
| | | | | | | | CED82122 |
| X₁₃₂₉ | M2 | 33 | 374141 | C | T | 6 | CED82121- |
| | | | | | | | CED82122 |
| X₁₃₃₀ | M2 | 33 | 374150 | A | C | 6 | CED82121- |
| | | | | | | | CED82122 |
| X₁₃₃₁ | M2 | 33 | 375339 | A | G | 6 | CED82121- |
| | | | | | | | CED82122 |
| X₁₃₃₂ | M2 | 33 | 375366 | T | C | 6 | CED82121- |
| | | | | | | | CED82122 |
| X₁₃₃₃ | M2 | 33 | 382804 | G | A | 3 | CED82122 |
| X₁₃₃₄ | M2 | 33 | 385139 | G | C | 2 | CED82122 |
| X₁₃₃₅ | M2 | 33 | 385319 | A | C | 2 | CED82122 |
| X₁₃₃₆ | M2 | 33 | 386225 | G | A | 3 | CED82124 |
| X₁₃₃₇ | M2 | 33 | 397625 | C | T | 3 | CED82125 |
| X₁₃₃₈ | M2 | 33 | 448815 | G | A | 2 | CED82144 |
| X₁₃₃₉ | M2 | 33 | 453975 | C | T | 2 | CED82147 |
| X₁₃₄₀ | M2 | 33 | 455451 | C | T | 3 | CED82146 |
| X₁₃₄₁ | M2 | 33 | 509127 | C | T | 3 | CED82166 |
| X₁₃₄₂ | M2 | 33 | 543070 | C | T | 3 | CED82179 |
| X₁₃₄₃ | M2 | 33 | 606302 | G | T | 5 | CED82200 |
| X₁₃₄₄ | M2 | 33 | 643436 | G | A | 3 | CED82208 |
| X₁₃₄₅ | M2 | 33 | 652012 | G | A | 2 | CED82212 |
| X₁₃₄₆ | M2 | 33 | 690180 | C | T | 1 | CED82224 |
| X₁₃₄₇ | M2 | 33 | 693516 | C | T | 2 | CED82225 |
| X₁₃₄₈ | M2 | 33 | 699423 | C | T | 1 | CED82227 |
| X₁₃₄₉ | M2 | 33 | 774105 | G | A | 2 | CED82248 |
| X₁₃₅₀ | M2 | 33 | 790955 | C | T | 3 | CED82253 |
| X₁₃₅₁ | M2 | 33 | 812031 | G | T | 2 | CED82262 |
| X₁₃₅₂ | M2 | 33 | 816048 | C | T | 3 | CED82262 |
| X₁₃₅₃ | M2 | 33 | 822243 | C | T | 2 | CED82267 |
| X₁₃₅₄ | M2 | 33 | 850373 | G | A | 1 | CED82278 |
| X₁₃₅₅ | M2 | 33 | 929585 | T | C | 1 | CED82297 |
| X₁₃₅₆ | M2 | 33 | 936350 | T | A | 3 | CED82300 |
| X₁₃₅₇ | M2 | 33 | 936356 | G | A | 3 | CED82300 |
| X₁₃₅₈ | M2 | 33 | 936571 | A | G | 3 | CED82300 |
| X₁₃₅₉ | M2 | 33 | 936600 | G | A | 3 | CED82300 |
| X₁₃₆₀ | M2 | 33 | 982324 | C | T | 4 | CED82312 |
| X₁₃₆₁ | M2 | 33 | 983105 | G | A | 3 | CED82315 |
| X₁₃₆₂ | M2 | 33 | 995886 | G | A | 1 | CED82318 |
| X₁₃₆₃ | M2 | 33 | 1049699 | G | A | 3 | CED82334 |
| X₁₃₆₄ | M2 | 33 | 1061503 | C | A | 2 | CED82340 |
| X₁₃₆₅ | M2 | 33 | 1086609 | G | A | 1 | CED82349 |
| X₁₃₆₆ | M2 | 33 | 1087773 | G | A | 2 | CED82349 |
| X₁₃₆₇ | M2 | 33 | 1087834 | G | A | 3 | CED82350 |
| X₁₃₆₈ | M2 | 33 | 1122362 | C | T | 2 | CED82358 |
| X₁₃₆₉ | M2 | 33 | 1126814 | G | A | 2 | CED82358 |
| X₁₃₇₀ | M2 | 33 | 1137501 | G | A | 2 | CED82362 |
| X₁₃₇₁ | M2 | 33 | 1138444 | C | T | 3 | CED82363 |
| X₁₃₇₂ | M2 | 33 | 1151553 | C | T | 2 | CED82367 |
| X₁₃₇₃ | M2 | 33 | 1165914 | G | A | 2 | CED82372 |
| X₁₃₇₄ | M2 | 33 | 1191727 | C | T | 2 | CED82379 |
| X₁₃₇₅ | M2 | 33 | 1277762 | G | A | 1 | CED82402 |
| X₁₃₇₆ | M2 | 33 | 1311181 | G | A | 3 | CED82413 |
| X₁₃₇₇ | M2 | 33 | 1318841 | C | T | 3 | CED82414 |
| X₁₃₇₈ | M2 | 33 | 1324395 | G | A | 3 | CED82417 |
| X₁₃₇₉ | M2 | 33 | 1333932 | G | A | 3 | CED82421 |
| X₁₃₈₀ | M2 | 33 | 1339376 | C | T | 2 | CED82424 |
| X₁₃₈₁ | M2 | 33 | 1399499 | C | T | 3 | CED82444 |
| X₁₃₈₂ | M2 | 33 | 1399524 | C | T | 3 | CED82444 |
| X₁₃₈₃ | M2 | 33 | 1468155 | G | A | 2 | CED82464 |
| X₁₃₈₄ | M2 | 33 | 1480984 | G | A | 3 | CED82466 |
| X₁₃₈₅ | M2 | 33 | 1499347 | G | A | 3 | CED82472 |
| X₁₃₈₆ | M2 | 33 | 1502644 | G | A | 2 | CED82474 |
| X₁₃₈₇ | M2 | 33 | 1515369 | G | A | 3 | CED82478 |
| X₁₃₈₈ | M2 | 33 | 1544767 | A | C | 6 | CED82485- |
| | | | | | | | CED82486 |
| X₁₃₈₉ | M2 | 33 | 1544951 | C | G | 6 | CED82485- |
| | | | | | | | CED82486 |
| X₁₃₉₀ | M2 | 33 | 1572498 | C | T | 8 | CED82491 |
| X₁₃₉₁ | M2 | 33 | 1587443 | C | T | 3 | CED82497 |
| X₁₃₉₂ | M2 | 33 | 1596242 | C | T | 3 | CED82498 |
| X₁₃₉₃ | M2 | 33 | 1638726 | G | A | 3 | CED82513 |
| X₁₃₉₄ | M2 | 33 | 1642659 | G | A | 2 | CED82515 |
| X₁₃₉₅ | M2 | 33 | 1666039 | G | A | 3 | CED82521 |
| X₁₃₉₆ | M2 | 33 | 1698181 | G | A | 3 | CED82531 |
| X₁₃₉₇ | M2 | 33 | 1700000 | G | A | 2 | CED82534 |
| X₁₃₉₈ | M2 | 33 | 1714108 | G | A | 1 | CED82537 |
| X₁₃₉₉ | M2 | 33 | 1714997 | G | A | 2 | CED82538 |
| X₁₄₀₀ | M2 | 33 | 1838447 | G | A | 4 | CED82575 |
| X₁₄₀₁ | M2 | 33 | 1848935 | C | T | 1 | CED82579 |
| X₁₄₀₂ | M2 | 33 | 1860278 | G | A | 3 | CED82582 |
| X₁₄₀₃ | M2 | 33 | 1861675 | C | T | 2 | CED82583 |
| X₁₄₀₄ | M2 | 33 | 1887401 | C | T | 1 | CED82591 |
| X₁₄₀₅ | M2 | 33 | 1938614 | G | A | 2 | CED82612 |
| X₁₄₀₆ | M2 | 33 | 1959142 | G | A | 8 | CED82619 |
| X₁₄₀₇ | M2 | 33 | 2010230 | C | T | 2 | CED82636 |
| X₁₄₀₈ | M2 | 33 | 2013946 | C | A | 2 | CED82637 |
| X₁₄₀₉ | M2 | 33 | 2014235 | C | T | 2 | CED82637 |
| X₁₄₁₀ | M2 | 33 | 2033881 | C | T | 1 | CED82645 |
| X₁₄₁₁ | M2 | 33 | 2054662 | G | A | 1 | CED82654 |
| X₁₄₁₂ | M2 | 36 | 320 | G | A | 6 | |
| X₁₄₁₃ | M2 | 36 | 1056 | G | A | 6 | |
| X₁₄₁₄ | M2 | 36 | 1295 | C | T | 6 | |
| X₁₄₁₅ | M2 | 36 | 1461 | A | T | 6 | |
| X₁₄₁₆ | M2 | 42 | 804 | C | T | 4 | CDZ96333 |
| X₁₄₁₇ | M2 | 42 | 1559 | G | A | 4 | CDZ96333 |
| X₁₄₁₈ | M2 | 48 | 563 | C | T | 6 | |
| X₁₄₁₉ | M2 | 48 | 565 | T | C | 6 | |
| X₁₄₂₀ | M2 | 48 | 576 | G | A | 6 | |
| X₁₄₂₁ | M2 | 48 | 580 | T | A | 6 | |
| K₁₄₂₂ | M2 | 48 | 720 | A | G | 6 | |
| X₁₄₂₃ | M2 | 50 | 145 | G | A | 6 | |
| X₁₄₂₄ | M2 | 52 | 3042 | A | G | 3 | CED82664 |
| X₁₄₂₅ | M2 | 52 | 63859 | C | T | 2 | CED82686 |
| X₁₄₂₆ | M2 | 52 | 144382 | C | T | 3 | CED82709 |
| X₁₄₂₇ | M2 | 52 | 151974 | C | T | 2 | CED82712 |
| X₁₄₂₈ | M2 | 52 | 164586 | C | T | 2 | CED82716 |
| X₁₄₂₉ | M2 | 52 | 183986 | C | T | 8 | CED82722 |
| X₁₄₃₀ | M2 | 52 | 203253 | A | G | 3 | CED82730 |
| X₁₄₃₁ | M2 | 52 | 207354 | C | T | 8 | CED82730 |
| X₁₄₃₂ | M2 | 52 | 214949 | C | G | 3 | CED82731 |
| X₁₄₃₃ | M2 | 52 | 223289 | A | G | 6 | CED82732- |
| | | | | | | | CED82733 |
| X₁₄₃₄ | M2 | 52 | 241012 | A | G | 3 | CED82734 |
| X₁₄₃₅ | M2 | 52 | 268499 | G | A | 4 | CED82740 |
| X₁₄₃₆ | M2 | 52 | 284733 | G | A | 1 | CED82747 |
| X₁₄₃₇ | M2 | 52 | 316848 | C | T | 2 | CED82758 |
| X₁₄₃₈ | M2 | 52 | 344346 | G | A | 3 | CED82767 |
| X₁₄₃₉ | M2 | 52 | 358601 | G | A | 3 | CED82772 |
| X₁₄₄₀ | M2 | 52 | 360279 | C | T | 3 | CED82772 |
| X₁₄₄₁ | M2 | 52 | 390095 | G | A | 3 | CED82784 |
| X₁₄₄₂ | M2 | 52 | 395374 | G | A | 2 | CED82786 |
| X₁₄₄₃ | M2 | 52 | 398723 | C | T | 3 | CED82786 |
| X₁₄₄₄ | M2 | 52 | 398728 | C | T | 3 | CED82786 |
| X₁₄₄₅ | M2 | 52 | 516267 | C | T | 3 | CED82823 |
| X₁₄₄₆ | M2 | 52 | 552099 | G | A | 2 | CED82837 |
| X₁₄₄₇ | M2 | 52 | 552173 | G | A | 1 | CED82837 |
| X₁₄₄₈ | M2 | 52 | 571124 | G | A | 2 | CED82845 |
| X₁₄₄₉ | M2 | 52 | 629532 | A | T | 3 | CED82860 |
| X₁₄₅₀ | M2 | 52 | 679670 | G | A | 3 | CED82877 |
| X₁₄₅₁ | M2 | 52 | 700204 | G | A | 8 | CED82888 |
| X₁₄₅₂ | M2 | 52 | 725138 | C | T | 5 | CED82899 |
| X₁₄₅₃ | M2 | 52 | 746548 | G | A | 1 | CED82907 |
| X₁₄₅₄ | M2 | 52 | 749772 | G | A | 1 | CED82908 |
| X₁₄₅₅ | M2 | 52 | 758326 | C | T | 2 | CED82912 |
| X₁₄₅₆ | M2 | 52 | 817452 | T | A | 2 | CED82928 |
| X₁₄₅₇ | M2 | 52 | 818592 | A | G | 3 | CED82929 |
| X₁₄₅₈ | M2 | 52 | 837237 | C | T | 2 | CED82934 |
| X₁₄₅₉ | M2 | 52 | 840755 | C | T | 1 | CED82935 |
| X₁₄₆₀ | M2 | 52 | 849671 | G | A | 1 | CED82940 |
| X₁₄₆₁ | M2 | 52 | 861376 | C | T | 8 | CED82946 |
| X₁₄₆₂ | M2 | 52 | 868578 | C | T | 2 | CED82948 |
| X₁₄₆₃ | M2 | 52 | 870083 | G | A | 2 | CED82949 |
| X₁₄₆₄ | M2 | 52 | 890412 | C | T | 3 | CED82956 |
| X₁₄₆₅ | M2 | 52 | 928854 | C | T | 2 | CED82971 |
| X₁₄₆₆ | M2 | 52 | 938650 | G | A | 3 | CED82973 |
| X₁₄₆₇ | M2 | 52 | 967316 | A | T | 2 | CED82984 |
| X₁₄₆₈ | M2 | 52 | 967701 | T | A | 3 | CED82983 |
| X₁₄₆₉ | M2 | 52 | 1003899 | G | A | 2 | CED83001 |
| X₁₄₇₀ | M2 | 52 | 1029498 | G | A | 1 | CED83007 |
| X₁₄₇₁ | M2 | 52 | 1043011 | C | T | 1 | CED83012 |
| X₁₄₇₂ | M2 | 52 | 1067895 | C | T | 1 | CED83020 |
| X₁₄₇₃ | M2 | 52 | 1093730 | C | T | 3 | CED83025 |
| X₁₄₇₄ | M2 | 52 | 1151398 | G | A | 3 | CED83046 |
| X₁₄₇₅ | M2 | 52 | 1158103 | C | T | 3 | CED83051 |
| X₁₄₇₆ | M2 | 52 | 1219894 | C | T | 3 | CED83071 |
| X₁₄₇₇ | M2 | 52 | 1290031 | C | T | 3 | CED83096 |
| X₁₄₇₈ | M2 | 52 | 1292343 | G | A | 1 | CED83098 |
| X₁₄₇₉ | M2 | 52 | 1336560 | G | A | 2 | CED83113 |
| X₁₄₈₀ | M2 | 52 | 1363357 | G | A | 3 | CED83122 |
| X₁₄₈₁ | M2 | 52 | 1363405 | C | T | 1 | CED83123 |
| X₁₄₈₂ | M2 | 52 | 1365822 | C | T | 1 | CED83124 |
| X₁₄₈₃ | M2 | 52 | 1372536 | G | T | 2 | CED83125 |
| X₁₄₈₄ | M2 | 52 | 1379155 | G | A | 2 | CED83128 |
| X₁₄₈₅ | M2 | 52 | 1381652 | C | T | 1 | CED83129 |
| X₁₄₈₆ | M2 | 52 | 1392238 | C | T | 3 | CED83130 |
| X₁₄₈₇ | M2 | 52 | 1399439 | G | A | 2 | CED83134 |
| X₁₄₈₈ | M2 | 52 | 1465985 | G | A | 3 | CED83159 |
| X₁₄₈₉ | M2 | 52 | 1509004 | G | A | 2 | CED83177 |
| X₁₄₉₀ | M2 | 52 | 1526796 | G | A | 2 | CED83181 |
| X₁₄₉₁ | M2 | 52 | 1562633 | C | T | 2 | CED83195 |
| X₁₄₉₂ | M2 | 52 | 1583655 | C | T | 2 | CED83206 |
| X₁₄₉₃ | M2 | 52 | 1688685 | C | T | 2 | CED83243 |
| X₁₄₉₄ | M2 | 52 | 1708900 | A | G | 3 | CED83249 |
| X₁₄₉₅ | M2 | 52 | 1708985 | C | T | 8 | CED83248 |
| X₁₄₉₆ | M2 | 52 | 1715136 | C | T | 8 | CED83250 |
| X₁₄₉₇ | M2 | 52 | 1716210 | C | T | 3 | CED83250 |
| X₁₄₉₈ | M2 | 52 | 1760440 | G | A | 2 | CED83266 |
| X₁₄₉₉ | M2 | 52 | 1793370 | G | A | 3 | CED83275 |
| X₁₅₀₀ | M2 | 52 | 1796780 | G | A | 3 | CED83279 |
| X₁₅₀₁ | M2 | 52 | 1807309 | G | A | 3 | CED83283 |
| X₁₅₀₂ | M2 | 52 | 1809897 | G | A | 3 | CED83285 |
| X₁₅₀₃ | M2 | 52 | 1826635 | G | A | 1 | CED83289 |
| X₁₅₀₄ | M2 | 52 | 1833707 | C | A | 3 | CED83292 |
| X₁₅₀₅ | M2 | 52 | 1871310 | C | T | 2 | CED83304 |
| X₁₅₀₆ | M2 | 52 | 1874150 | G | T | 3 | CED83305 |
| X₁₅₀₇ | M2 | 52 | 1888989 | C | T | 2 | CED83312 |
| X₁₅₀₈ | M2 | 52 | 1893352 | G | A | 2 | CED83313 |
| X₁₅₀₉ | M2 | 52 | 1915927 | G | A | 3 | CED83315 |
| X₁₅₁₀ | M2 | 52 | 1956479 | C | T | 3 | CED83330 |
| X₁₅₁₁ | M2 | 52 | 1963875 | G | A | 3 | CED83335 |
| X₁₅₁₂ | M2 | 52 | 1968215 | A | G | 1 | CED83335 |
| X₁₅₁₃ | M2 | 52 | 1987096 | G | A | 4 | CED83341 |
| X₁₅₁₄ | M2 | 52 | 2029893 | G | A | 3 | CED83351 |
| X₁₅₁₅ | M2 | 52 | 2041781 | C | T | 8 | CED83355 |
| X₁₅₁₆ | M2 | 52 | 2050245 | G | A | 3 | CED83359 |
| X₁₅₁₇ | M2 | 52 | 2081390 | G | A | 1 | CED83367 |
| X₁₅₁₈ | M2 | 52 | 2120665 | C | T | 4 | CED83376 |
| X₁₅₁₉ | M2 | 52 | 2136885 | A | G | 1 | CED83382 |
| X₁₅₂₀ | M2 | 52 | 2162878 | G | A | 2 | CED83392 |
| X₁₅₂₁ | M2 | 52 | 2207855 | G | A | 1 | CED83406 |
| X₁₅₂₂ | M2 | 52 | 2258192 | C | T | 2 | CED83422 |
| X₁₅₂₃ | M2 | 52 | 2265219 | C | T | 2 | CED83425 |
| X₁₅₂₄ | M2 | 52 | 2266378 | C | T | 3 | CED83423 |
| X₁₅₂₅ | M2 | 52 | 2298758 | G | A | 8 | CED83435 |
| X₁₅₂₆ | M2 | 52 | 2308404 | G | T | 3 | CED83439 |
| X₁₅₂₇ | M2 | 52 | 2308421 | T | C | 3 | CED83439 |
| X₁₅₂₈ | M2 | 52 | 2327266 | C | T | 3 | CED83445 |
| X₁₅₂₉ | M2 | 52 | 2341484 | C | T | 3 | CED83451 |
| X₁₅₃₀ | M2 | 52 | 2373120 | C | T | 2 | CED83456 |
| X₁₅₃₁ | M2 | 52 | 2400778 | C | T | 4 | CED83463 |
| X₁₅₃₂ | M2 | 52 | 2443575 | G | A | 2 | CED83476 |
| X₁₅₃₃ | M2 | 52 | 2543220 | C | T | 3 | CED83509 |
| X₁₅₃₄ | M2 | 53 | 18836 | T | A | 3 | CDZ96344 |
| X₁₅₃₅ | M2 | 53 | 26291 | G | A | 2 | CDZ96348 |
| X₁₅₃₆ | M2 | 54 | 4815 | G | A | 1 | CDZ96384 |
| X₁₅₃₇ | M2 | 54 | 4816 | A | T | 2 | CDZ96384 |
| X₁₅₃₈ | M2 | 54 | 4817 | G | C | 2 | CDZ96384 |
| X₁₅₃₉ | M2 | 54 | 4821 | G | A | 1 | CDZ96384 |
| X₁₅₄₀ | M2 | 54 | 31207 | G | A | 2 | CDZ96392 |
| X₁₅₄₁ | M2 | 54 | 87947 | G | A | 3 | CDZ96410 |
| X₁₅₄₂ | M2 | 54 | 93810 | G | A | 2 | CDZ96414 |
| X₁₅₄₃ | M2 | 54 | 106086 | G | A | 3 | CDZ96416 |
| X₁₅₄₄ | M2 | 54 | 129380 | C | T | 2 | CDZ96423 |
| X₁₅₄₅ | M2 | 54 | 194230 | G | A | 2 | CDZ96446 |
| X₁₅₄₆ | M2 | 54 | 202467 | C | T | 1 | CDZ96448 |
| X₁₅₄₇ | M2 | 54 | 206494 | G | A | 2 | CDZ96450 |
| X₁₅₄₈ | M2 | 54 | 207737 | C | T | 1 | CDZ96450 |
| X₁₅₄₉ | M2 | 54 | 237973 | C | T | 8 | CDZ96461 |
| X₁₅₅₀ | M2 | 54 | 240326 | G | A | 1 | CDZ96462 |
| X₁₅₅₁ | M2 | 54 | 245840 | G | A | 3 | CDZ96464 |
| X₁₅₅₂ | M2 | 54 | 254295 | C | T | 2 | CDZ96465 |
| X₁₅₅₃ | M2 | 54 | 274617 | A | T | 3 | CDZ96471 |
| X₁₅₅₄ | M2 | 54 | 354688 | C | T | 3 | CDZ96493 |
| X₁₅₅₅ | M2 | 54 | 359671 | G | A | 2 | CDZ96496 |
| X₁₅₅₆ | M2 | 54 | 370320 | G | A | 2 | CDZ96499 |
| X₁₅₅₇ | M2 | 54 | 391223 | A | G | 2 | CDZ96509 |
| X₁₅₅₈ | M2 | 54 | 427542 | C | T | 2 | CDZ96520 |
| X₁₅₅₉ | M2 | 54 | 431851 | C | T | 3 | CDZ96520 |
| X₁₅₆₀ | M2 | 54 | 478527 | C | T | 2 | CDZ96537 |
| X₁₅₆₁ | M2 | 54 | 509857 | G | A | 1 | CDZ96544 |
| X₁₅₆₂ | M2 | 54 | 555986 | G | A | 2 | CDZ96563 |
| X₁₅₆₃ | M2 | 54 | 583996 | G | A | 3 | CDZ96570 |
| X₁₅₆₄ | M2 | 54 | 616268 | A | G | 3 | CDZ96581 |
| X₁₅₆₅ | M2 | 54 | 733193 | T | C | 9 | CDZ96619 |
| X₁₅₆₆ | M2 | 54 | 743396 | G | A | 1 | CDZ96621 |
| X₁₅₆₇ | M2 | 58 | 93 | T | C | 6 | |
| X₁₅₆₈ | M2 | 64 | 2113 | G | A | 4 | CDZ96626 |
| X₁₅₆₉ | M2 | 67 | 111 | G | A | 6 | |
| X₁₅₇₀ | M2 | 69 | 19892 | A | C | 3 | CED83533 |
| X₁₅₇₁ | M2 | 69 | 19893 | G | A | 3 | CED83533 |
| X₁₅₇₂ | M2 | 69 | 19917 | T | G | 3 | CED83533 |
| X₁₅₇₃ | M2 | 69 | 19920 | T | C | 3 | CED83533 |
| X₁₅₇₄ | M2 | 69 | 19926 | A | G | 3 | CED83533 |
| X₁₅₇₅ | M2 | 69 | 29006 | G | A | 3 | CED83534 |
| X₁₅₇₆ | M2 | 69 | 29188 | C | T | 3 | CED83534 |
| X₁₅₇₇ | M2 | 69 | 50642 | C | T | 8 | CED83543 |
| X₁₅₇₈ | M2 | 69 | 61047 | C | T | 2 | CED83547 |
| X₁₅₇₉ | M2 | 69 | 82710 | G | A | 3 | CED83554 |
| X₁₅₈₀ | M2 | 69 | 84820 | G | A | 1 | CED83555 |
| X₁₅₈₁ | M2 | 69 | 103317 | C | T | 2 | CED83559 |
| X₁₅₈₂ | M2 | 69 | 107920 | C | T | 1 | CED83561 |
| X₁₅₈₃ | M2 | 69 | 179873 | C | T | 3 | CED83585 |
| X₁₅₈₄ | M2 | 69 | 196810 | G | A | 2 | CED83594 |
| X₁₅₈₅ | M2 | 69 | 201005 | G | A | 3 | CED83595 |
| X₁₅₈₆ | M2 | 69 | 258091 | G | A | 2 | CED83614 |
| X₁₅₈₇ | M2 | 69 | 305997 | C | T | 2 | CED83631 |
| X₁₅₈₈ | M2 | 69 | 314003 | C | T | 1 | CED83634 |
| X₁₅₈₉ | M2 | 69 | 371916 | C | T | 2 | CED83653 |
| X₁₅₉₀ | M2 | 69 | 384418 | G | A | 2 | CED83656 |
| X₁₅₉₁ | M2 | 69 | 415659 | C | T | 2 | CED83665 |
| X₁₅₉₂ | M2 | 69 | 461986 | G | A | 1 | CED83680 |
| X₁₅₉₃ | M2 | 69 | 467686 | C | T | 2 | CED83681 |
| X₁₅₉₄ | M2 | 69 | 472563 | C | T | 3 | CED83681 |
| X₁₅₉₅ | M2 | 69 | 534495 | C | T | 2 | CED83704 |
| X₁₅₉₆ | M2 | 69 | 534506 | C | A | 2 | CED83704 |
| X₁₅₉₇ | M2 | 69 | 556138 | C | T | 3 | CED83710 |
| X₁₅₉₈ | M2 | 69 | 560348 | G | A | 1 | CED83713 |
| X₁₅₉₉ | M2 | 69 | 585845 | G | A | 2 | CED83722 |
| X₁₆₀₀ | M2 | 69 | 631511 | G | A | 2 | CED83742 |
| X₁₆₀₁ | M2 | 69 | 637299 | T | C | 2 | CED83744 |
| X₁₆₀₂ | M2 | 69 | 675579 | G | A | 3 | CED83760 |
| X₁₆₀₃ | M2 | 69 | 676581 | G | A | 2 | CED83760 |
| X₁₆₀₄ | M2 | 69 | 676853 | G | A | 3 | CED83759 |
| X₁₆₀₅ | M2 | 69 | 678406 | C | T | 3 | CED83759 |
| X₁₆₀₆ | M2 | 69 | 681141 | G | A | 2 | CED83762 |
| X₁₆₀₇ | M2 | 69 | 682770 | C | T | 2 | CED83763 |
| X₁₆₀₈ | M2 | 69 | 703602 | C | T | 2 | CED83770 |
| X₁₆₀₉ | M2 | 69 | 741255 | C | T | 1 | CED83781 |
| X₁₆₁₀ | M2 | 69 | 743019 | C | T | 1 | CED83782 |
| X₁₆₁₁ | M2 | 69 | 744021 | C | T | 3 | CED83780 |
| X₁₆₁₂ | M2 | 69 | 786726 | C | T | 2 | CED83794 |
| X₁₆₁₃ | M2 | 69 | 833538 | A | T | 4 | CED83805 |
| X₁₆₁₄ | M2 | 69 | 833558 | C | T | 4 | CED83805 |
| X₁₆₁₅ | M2 | 69 | 865820 | C | T | 2 | CED83814 |
| X₁₆₁₆ | M2 | 69 | 869706 | G | A | 8 | CED83815 |
| X₁₆₁₇ | M2 | 69 | 870338 | G | A | 2 | CED83815 |
| X₁₆₁₈ | M2 | 69 | 892199 | G | A | 1 | CED83822 |
| X₁₆₁₉ | M2 | 69 | 894019 | G | A | 3 | CED83821 |
| X₁₆₂₀ | M2 | 69 | 894462 | C | T | 3 | CED83821 |
| X₁₆₂₁ | M2 | 69 | 900223 | G | C | 1 | CED83824 |
| X₁₆₂₂ | M2 | 69 | 949982 | C | T | 2 | CED83842 |
| X₁₆₂₃ | M2 | 69 | 971219 | C | T | 3 | CED83847 |
| X₁₆₂₄ | M2 | 69 | 988364 | G | A | 2 | CED83857 |
| X₁₆₂₅ | M2 | 69 | 1042212 | G | A | 2 | CED83875 |
| X₁₆₂₆ | M2 | 69 | 1054397 | C | T | 3 | CED83879 |
| X₁₆₂₇ | M2 | 69 | 1080212 | C | T | 3 | CED83889 |
| X₁₆₂₈ | M2 | 69 | 1084824 | G | A | 3 | CED83891 |
| X₁₆₂₉ | M2 | 69 | 1084835 | C | T | 3 | CED83891 |
| X₁₆₃₀ | M2 | 69 | 1084848 | A | G | 3 | CED83891 |
| X₁₆₃₁ | M2 | 69 | 1084866 | A | G | 3 | CED83891 |
| X₁₆₃₂ | M2 | 69 | 1084931 | C | T | 3 | CED83891 |
| X₁₆₃₃ | M2 | 69 | 1089068 | G | A | 2 | CED83893 |
| X₁₆₃₄ | M2 | 69 | 1102164 | C | T | 2 | CED83897 |
| X₁₆₃₅ | M2 | 69 | 1105560 | C | T | 2 | CED83899 |
| X₁₆₃₆ | M2 | 69 | 1109785 | C | T | 3 | CED83899 |
| X₁₆₃₇ | M2 | 69 | 1109813 | A | G | 3 | CED83899 |
| X₁₆₃₈ | M2 | 69 | 1109818 | A | G | 3 | CED83899 |
| X₁₆₃₉ | M2 | 69 | 1109819 | T | A | 3 | CED83899 |
| X₁₆₄₀ | M2 | 69 | 1109823 | T | C | 3 | CED83899 |
| X₁₆₄₁ | M2 | 69 | 1109830 | A | G | 3 | CED83899 |
| X₁₆₄₂ | M2 | 69 | 1109831 | C | A | 3 | CED83899 |
| X₁₆₄₃ | M2 | 69 | 1109835 | A | G | 3 | CED83899 |
| X₁₆₄₄ | M2 | 69 | 1111789 | C | T | 3 | CED83899 |
| X₁₆₄₅ | M2 | 69 | 1115486 | C | T | 2 | CED83902 |
| X₁₆₄₆ | M2 | 69 | 1153118 | G | A | 2 | CED83915 |
| X₁₆₄₇ | M2 | 69 | 1161041 | A | G | 1 | CED83918 |
| X₁₆₄₈ | M2 | 69 | 1179032 | G | A | 1 | CED83923 |
| X₁₆₄₉ | M2 | 69 | 1199155 | C | T | 8 | CED83929 |
| X₁₆₅₀ | M2 | 69 | 1212727 | G | A | 4 | CED83933 |
| X₁₆₅₁ | M2 | 69 | 1218409 | G | A | 3 | CED83936 |
| X₁₆₅₂ | M2 | 69 | 1260087 | G | A | 3 | CED83949 |
| X₁₆₅₃ | M2 | 69 | 1327216 | C | A | 5 | CED83970 |
| X₁₆₅₄ | M2 | 69 | 1342909 | G | A | 3 | CED83975 |
| X₁₆₅₅ | M2 | 69 | 1411237 | C | T | 1 | CED84001 |
| X₁₆₅₆ | M2 | 69 | 1411421 | C | T | 3 | CED83999 |
| X₁₆₅₇ | M2 | 69 | 1430120 | C | T | 2 | CED84006 |
| X₁₆₅₈ | M2 | 69 | 1530586 | C | T | 3 | CED84038 |
| X₁₆₅₉ | M2 | 69 | 1590302 | G | A | 1 | CED84059 |
| X₁₆₆₀ | M2 | 69 | 1652288 | C | T | 3 | CED84077 |
| X₁₆₆₁ | M2 | 69 | 1674261 | C | T | 1 | CED84084 |
| X₁₆₆₂ | M2 | 69 | 1688555 | C | T | 1 | CED84088 |
| X₁₆₆₃ | M2 | 69 | 1706650 | G | A | 8 | CED84095 |
| X₁₆₆₄ | M2 | 69 | 1714728 | G | A | 3 | CED84097 |
| X₁₆₆₅ | M2 | 69 | 1735172 | G | A | 2 | CED84108 |
| X₁₆₆₆ | M2 | 69 | 1790823 | C | T | 2 | CED84125 |
| X₁₆₆₇ | M2 | 69 | 1792597 | C | T | 2 | CED84126 |
| X₁₆₆₈ | M2 | 69 | 1800584 | G | A | 3 | CED84129 |
| X₁₆₆₉ | M2 | 69 | 1803813 | G | A | 3 | CED84128 |
| X₁₆₇₀ | M2 | 69 | 1842064 | C | T | 3 | CED84140 |
| X₁₆₇₁ | M2 | 69 | 1854739 | G | A | 3 | CED84145 |
| X₁₆₇₂ | M2 | 69 | 1878663 | C | T | 3 | CED84154 |
| X₁₆₇₃ | M2 | 69 | 1924621 | C | T | 3 | CED84172 |
| X₁₆₇₄ | M2 | 69 | 1950597 | C | T | 3 | CED84182 |
| X₁₆₇₅ | M2 | 69 | 1957485 | C | T | 2 | CED84187 |
| X₁₆₇₆ | M2 | 69 | 1967529 | C | T | 1 | CED84189 |
| X₁₆₇₇ | M2 | 69 | 1968848 | A | G | 3 | CED84189 |
| X₁₆₇₈ | M2 | 69 | 2001469 | C | T | 3 | CED84197 |
| X₁₆₇₉ | M2 | 69 | 2009058 | G | A | 8 | CED84201 |
| X₁₆₈₀ | M2 | 69 | 2156050 | C | T | 3 | CED84252 |
| X₁₆₈₁ | M2 | 69 | 2160207 | C | T | 1 | CED84255 |
| X₁₆₈₂ | M2 | 69 | 2219444 | G | A | 2 | CED84271 |
| X₁₆₈₃ | M2 | 69 | 2226317 | C | T | 2 | CED84272 |
| X₁₆₈₄ | M2 | 69 | 2237950 | C | T | 2 | CED84276 |
| X₁₆₈₅ | M2 | 69 | 2255001 | G | A | 2 | CED84282 |
| X₁₆₈₆ | M2 | 69 | 2264484 | G | A | 4 | CED84284 |
| X₁₆₈₇ | M2 | 69 | 2275703 | G | A | 2 | CED84290 |
| X₁₆₈₈ | M2 | 69 | 2283903 | G | A | 2 | CED84293 |
| X₁₆₈₉ | M2 | 69 | 2348437 | C | T | 2 | CED84315 |
| X₁₆₉₀ | M2 | 69 | 2366082 | C | T | 1 | CED84318 |
| X₁₆₉₁ | M2 | 69 | 2368149 | G | A | 2 | CED84320 |
| X₁₆₉₂ | M2 | 69 | 2438727 | C | T | 3 | CED84343 |
| X₁₆₉₃ | M2 | 69 | 2439763 | A | G | 3 | CED84343 |
| X₁₆₉₄ | M2 | 69 | 2483433 | G | A | 3 | CED84352 |
| X₁₆₉₅ | M2 | 70 | 22 | T | C | 6 | |
| A₁₆₉₆ | M2 | 72 | 93 | T | C | 6 | |
| X₁₆₉₇ | M2 | 72 | 584 | G | A | 6 | |
| X₁₆₉₈ | M2 | 72 | 856 | C | T | 6 | |
| X₁₆₉₉ | M2 | 72 | 1163 | C | T | 6 | |
| X₁₇₀₀ | M2 | 73 | 174 | C | T | 3 | CDZ96628 |
| X₁₇₀₁ | M2 | 77 | 18912 | A | G | 2 | CDZ96635 |
| X₁₇₀₂ | M2 | 77 | 34978 | G | T | 3 | CDZ96642 |
| X₁₇₀₃ | M2 | 77 | 39665 | G | C | 2 | CDZ96646 |
| X₁₇₀₄ | M2 | 77 | 39842 | G | A | 8 | CDZ96646 |
| X₁₇₀₅ | M2 | 77 | 49497 | G | A | 3 | CDZ96648 |
| X₁₇₀₆ | M2 | 77 | 84022 | G | A | 8 | CDZ96659 |
| X₁₇₀₇ | M2 | 78 | 1865 | C | T | 3 | CED84359 |
| X₁₇₀₈ | M2 | 78 | 6333 | G | A | 8 | CED84360 |
| X₁₇₀₉ | M2 | 78 | 16110 | C | T | 3 | CED84363 |
| X₁₇₁₀ | M2 | 78 | 21716 | C | T | 4 | CED84364 |
| X₁₇₁₁ | M2 | 78 | 26915 | C | T | 3 | CED84366 |
| X₁₇₁₂ | M2 | 78 | 66886 | G | A | 2 | CED84381 |
| X₁₇₁₃ | M2 | 78 | 89958 | C | T | 3 | CED84387 |
| X₁₇₁₄ | M2 | 78 | 127873 | G | A | 3 | CED84395 |
| X₁₇₁₅ | M2 | 78 | 158434 | G | A | 2 | CED84406 |
| X₁₇₁₆ | M2 | 78 | 238854 | C | T | 3 | CED84430 |
| X₁₇₁₇ | M2 | 78 | 258716 | A | G | 2 | CED84437 |
| X₁₇₁₈ | M2 | 78 | 263828 | T | C | 3 | CED84438 |
| X₁₇₁₉ | M2 | 78 | 263896 | T | C | 3 | CED84438 |
| X₁₇₂₀ | M2 | 78 | 281454 | C | A | 3 | CED84441 |
| X₁₇₂₁ | M2 | 78 | 298141 | C | G | 3 | CED84443 |
| X₁₇₂₂ | M2 | 78 | 299644 | G | A | 3 | CED84443 |
| X₁₇₂₃ | M2 | 78 | 301815 | T | C | 3 | CED84443 |
| X₁₇₂₄ | M2 | 78 | 302816 | T | C | 8 | CED84443 |
| X₁₇₂₅ | M2 | 78 | 311576 | G | T | 1 | CED84447 |
| X₁₇₂₆ | M2 | 78 | 328831 | C | A | 1 | CED84450 |
| X₁₇₂₇ | M2 | 78 | 333312 | A | G | m | CED84452 |
| X₁₇₂₈ | M2 | 78 | 402094 | T | A | 1 | CED84476 |
| X₁₇₂₉ | M2 | 78 | 404944 | G | A | 3 | CED84475 |
| X₁₇₃₀ | M2 | 78 | 424723 | A | G | 2 | CED84482 |
| X₁₇₃₁ | M2 | 78 | 444292 | C | T | 2 | CED84490 |
| X₁₇₃₂ | M2 | 78 | 492399 | C | T | 3 | CED84504 |
| X₁₇₃₃ | M2 | 78 | 534530 | C | T | 1 | CED84520 |
| X₁₇₃₄ | M2 | 78 | 619735 | T | C | 3 | CED84547 |
| X₁₇₃₅ | M2 | 78 | 626958 | C | A | 4 | CED84549 |
| X₁₇₃₆ | M2 | 78 | 636848 | C | T | 3 | CED84551 |
| X₁₇₃₇ | M2 | 78 | 646777 | C | T | 2 | CED84556 |
| X₁₇₃₈ | M2 | 78 | 658932 | G | A | 1 | CED84561 |
| X₁₇₃₉ | M2 | 78 | 666005 | C | T | 3 | CED84562 |
| X₁₇₄₀ | M2 | 78 | 708376 | C | T | 2 | CED84580 |
| X₁₇₄₁ | M2 | 78 | 720093 | G | A | 4 | CED84583 |
| X₁₇₄₂ | M2 | 78 | 763771 | G | A | 3 | CED84600 |
| X₁₇₄₃ | M2 | 78 | 774252 | G | A | 2 | CED84602 |
| X₁₇₄₄ | M2 | 78 | 814066 | T | C | 3 | CED84613 |
| X₁₇₄₅ | M2 | 78 | 875825 | C | T | 3 | CED84633 |
| X₁₇₄₆ | M2 | 78 | 952815 | G | A | 2 | CED84662 |
| X₁₇₄₇ | M2 | 78 | 952860 | G | A | 2 | CED84662 |
| X₁₇₄₈ | M2 | 78 | 1023381 | G | A | 2 | CED84688 |
| X₁₇₄₉ | M2 | 78 | 1032138 | G | A | 3 | CED84693 |
| X₁₇₅₀ | M2 | 78 | 1066463 | C | T | 2 | CED84704 |
| X₁₇₅₁ | M2 | 78 | 1111002 | G | A | 2 | CED84721 |
| X₁₇₅₂ | M2 | 78 | 1115511 | G | A | 1 | CED84723 |
| X₁₇₅₃ | M2 | 78 | 1118856 | C | T | 2 | CED84724 |
| X₁₇₅₄ | M2 | 78 | 1142438 | G | A | 2 | CED84729 |
| X₁₇₅₅ | M2 | 78 | 1213556 | G | A | 2 | CED84752 |
| X₁₇₅₆ | M2 | 78 | 1216573 | C | T | 1 | CED84752 |
| X₁₇₅₇ | M2 | 78 | 1302286 | C | T | 3 | CED84782 |
| X₁₇₅₈ | M2 | 78 | 1315918 | C | T | 3 | CED84786 |
| X₁₇₅₉ | M2 | 78 | 1317124 | G | A | 3 | CED84787 |
| X₁₇₆₀ | M2 | 78 | 1344640 | C | T | 3 | CED84795 |
| X₁₇₆₁ | M2 | 78 | 1394095 | T | C | 3 | CED84815 |
| X₁₇₆₂ | M2 | 78 | 1426722 | C | T | 2 | CED84829 |
| X₁₇₆₃ | M2 | 78 | 1493542 | C | T | 2 | CED84851 |
| X₁₇₆₄ | M2 | 78 | 1495995 | C | T | 1 | CED84852 |
| X₁₇₆₅ | M2 | 78 | 1532973 | G | A | 2 | CED84857 |
| X₁₇₆₆ | M2 | 78 | 1568326 | C | T | 2 | CED84868 |
| X₁₇₆₇ | M2 | 78 | 1621099 | C | A | 3 | CED84883 |
| X₁₇₆₈ | M2 | 78 | 1642170 | G | A | 3 | CED84889 |
| X₁₇₆₉ | M2 | 78 | 1660408 | G | A | 2 | CED84897 |
| X₁₇₇₀ | M2 | 78 | 1694684 | C | T | 2 | CED84912 |
| X₁₇₇₁ | M2 | 78 | 1705462 | G | A | 1 | CED84915 |
| X₁₇₇₂ | M2 | 78 | 1721661 | G | A | 3 | CED84921 |
| X₁₇₇₃ | M2 | 78 | 1742796 | G | A | 3 | CED84926 |
| X₁₇₇₄ | M2 | 79 | 426 | T | C | 1 | CDZ96674 |
| X₁₇₇₅ | M2 | 79 | 473 | T | C | 2 | CDZ96674 |
| X₁₇₇₆ | M2 | 79 | 474 | C | T | 1 | CDZ96674 |
| X₁₇₇₇ | M2 | 79 | 47085 | G | A | 3 | CDZ96684 |
| X₁₇₇₈ | M2 | 79 | 57804 | G | A | 2 | CDZ96687 |
| X₁₇₇₉ | M2 | 79 | 64658 | C | T | 3 | CDZ96688 |
| X₁₇₈₀ | M2 | 79 | 65402 | C | T | 3 | CDZ96688 |
| X₁₇₈₁ | M2 | 79 | 86234 | T | C | 3 | CDZ96695 |
| X₁₇₈₂ | M2 | 79 | 132683 | C | T | 2 | CDZ96713 |
| X₁₇₈₃ | M2 | 79 | 147578 | G | A | 2 | CDZ96719 |
| X₁₇₈₄ | M2 | 79 | 168708 | C | T | 8 | CDZ96727 |
| X₁₇₈₅ | M2 | 79 | 171814 | C | T | 3 | CDZ96727 |
| X₁₇₈₆ | M2 | 79 | 243722 | C | T | 1 | CDZ96755 |
| X₁₇₈₇ | M2 | 79 | 281783 | C | T | 2 | CDZ96768 |
| X₁₇₈₈ | M2 | 79 | 296092 | G | A | 1 | CDZ96772 |
| X₁₇₈₉ | M2 | 79 | 307021 | C | T | 3 | CDZ96777 |
| X₁₇₉₀ | M2 | 79 | 318883 | G | A | 3 | CDZ96779 |
| X₁₇₉₁ | M2 | 79 | 346823 | G | A | 2 | CDZ96789 |
| X₁₇₉₂ | M2 | 79 | 406184 | G | A | 3 | CDZ96808 |
| X₁₇₉₃ | M2 | 79 | 412057 | T | C | 1 | CDZ96811 |
| X₁₇₉₄ | M2 | 79 | 412661 | G | A | 2 | CDZ96811 |
| X₁₇₉₅ | M2 | 79 | 430749 | T | C | 3 | CDZ96815 |
| X₁₇₉₆ | M2 | 79 | 480327 | A | C | 2 | CDZ96837 |
| X₁₇₉₇ | M2 | 79 | 492523 | C | T | 3 | CDZ96842 |
| X₁₇₉₈ | M2 | 79 | 573293 | C | T | 3 | CDZ96868 |
| X₁₇₉₉ | M2 | 79 | 575411 | C | T | 3 | CDZ96868 |
| X₁₈₀₀ | M2 | 79 | 579674 | G | A | 1 | CDZ96871 |
| X₁₈₀₁ | M2 | 79 | 617057 | C | T | 2 | CDZ96882 |
| X₁₈₀₂ | M2 | 79 | 679140 | C | T | 2 | CDZ96904 |
| X₁₈₀₃ | M2 | 79 | 686946 | C | T | 3 | CDZ96907 |
| X₁₈₀₄ | M2 | 79 | 696174 | G | A | 4 | CDZ96911 |
| X₁₈₀₅ | M2 | 79 | 702824 | G | A | 3 | CDZ96914 |
| X₁₈₀₆ | M2 | 79 | 702827 | C | T | 3 | CDZ96914 |
| X₁₈₀₇ | M2 | 79 | 735053 | T | C | 3 | CDZ96928 |
| X₁₈₀₈ | M2 | 79 | 747717 | A | G | 3 | CDZ96929 |
| X₁₈₀₉ | M2 | 79 | 758025 | G | A | 3 | CDZ96931 |
| X₁₈₁₀ | M2 | 79 | 759403 | C | T | 3 | CDZ96931 |
| X₁₈₁₁ | M2 | 79 | 759589 | G | A | 4 | CDZ96932 |
| X₁₈₁₂ | M2 | 79 | 759659 | G | A | 2 | CDZ96931 |
| X₁₈₁₃ | M2 | 79 | 760005 | A | G | 4 | CDZ96932 |
| X₁₈₁₄ | M2 | 79 | 760430 | T | C | 2 | CDZ96932 |
| X₁₈₁₅ | M2 | 79 | 760458 | G | T | 1 | CDZ96932 |
| X₁₈₁₆ | M2 | 79 | 760541 | A | G | 2 | CDZ96932 |
| X₁₈₁₇ | M2 | 79 | 760891 | A | G | 2 | CDZ96932 |
| X₁₈₁₈ | M2 | 79 | 760904 | T | C | 2 | CDZ96932 |
| X₁₈₁₉ | M2 | 79 | 760988 | G | T | 2 | CDZ96932 |
| X₁₈₂₀ | M2 | 79 | 761056 | T | C | 3 | CDZ96932 |
| X₁₈₂₁ | M2 | 79 | 761339 | T | G | 3 | CDZ96932 |
| X₁₈₂₂ | M2 | 79 | 761352 | T | A | 3 | CDZ96932 |
| X₁₈₂₃ | M2 | 79 | 761355 | T | C | 3 | CDZ96932 |
| X₁₈₂₄ | M2 | 79 | 768537 | A | G | 4 | CDZ96933 |
| X₁₈₂₅ | M2 | 79 | 776112 | A | G | 4 | CDZ96934 |
| X₁₈₂₆ | M2 | 79 | 776150 | G | A | 4 | CDZ96934 |
| X₁₈₂₇ | M2 | 79 | 780012 | T | C | 4 | CDZ96934 |
| X₁₈₂₈ | M2 | 79 | 786064 | A | G | 3 | CDZ96934 |
| X₁₈₂₉ | M2 | 79 | 798799 | C | T | 1 | CDZ96939 |
| X₁₈₃₀ | M2 | 79 | 914302 | C | T | 3 | CDZ96977 |
| X₁₈₃₁ | M2 | 79 | 922582 | G | A | 1 | CDZ96983 |
| X₁₈₃₂ | M2 | 79 | 933234 | G | A | 3 | CDZ96987 |
| X₁₈₃₃ | M2 | 79 | 973493 | C | T | 4 | CDZ97000 |
| X₁₈₃₄ | M2 | 79 | 995732 | G | A | 1 | CDZ97006 |
| X₁₈₃₅ | M2 | 79 | 1000786 | A | G | 1 | CDZ97007 |
| X₁₈₃₆ | M2 | 79 | 1021855 | G | A | 3 | CDZ97016 |
| X₁₈₃₇ | M2 | 79 | 1044652 | G | A | 1 | CDZ97023 |
| X₁₈₃₈ | M2 | 79 | 1052968 | C | T | 3 | CDZ97024 |
| X₁₈₃₉ | M2 | 79 | 1107695 | C | T | 2 | CDZ97046 |
| X₁₈₄₀ | M2 | 79 | 1123288 | C | T | 2 | CDZ97049 |
| X₁₈₄₁ | M2 | 79 | 1140763 | G | A | 3 | CDZ97053 |
| X₁₈₄₂ | M2 | 79 | 1149291 | G | A | 3 | CDZ97056 |
| X₁₈₄₃ | M2 | 79 | 1151678 | C | T | 1 | CDZ97060 |
| X₁₈₄₄ | M2 | 79 | 1209208 | G | A | 3 | CDZ97077 |
| X₁₈₄₅ | M2 | 79 | 1229129 | G | A | 2 | CDZ97086 |
| X₁₈₄₆ | M2 | 79 | 1231740 | C | T | 2 | CDZ97087 |
| X₁₈₄₇ | M2 | 79 | 1286163 | T | C | 3 | CDZ97106 |
| X₁₈₄₈ | M2 | 79 | 1287496 | C | T | 1 | CDZ97107 |
| X₁₈₄₉ | M2 | 79 | 1302166 | G | A | 3 | CDZ97112 |
| X₁₈₅₀ | M2 | 79 | 1318034 | C | T | 1 | CDZ97117 |
| X₁₈₅₁ | M2 | 79 | 1336766 | C | T | 4 | CDZ97121 |
| X₁₈₅₂ | M2 | 79 | 1387800 | G | A | 3 | CDZ97135 |
| X₁₈₅₃ | M2 | 79 | 1394034 | G | A | 1 | CDZ97137 |
| X₁₈₅₄ | M2 | 79 | 1430954 | G | A | 2 | CDZ97152 |
| X₁₈₅₅ | M2 | 79 | 1447480 | G | A | 2 | CDZ97156 |
| X₁₈₅₆ | M2 | 79 | 1471094 | C | T | 3 | CDZ97163 |
| X₁₈₅₇ | M2 | 79 | 1472351 | C | T | 2 | CDZ97165 |
| X₁₈₅₈ | M2 | 79 | 1540205 | C | T | 2 | CDZ97186 |
| X₁₈₅₉ | M2 | 79 | 1570526 | C | T | 2 | CDZ97198 |
| X₁₈₆₀ | M2 | 79 | 1624415 | G | A | 1 | CDZ97217 |
| X₁₈₆₁ | M2 | 79 | 1674448 | G | A | 4 | CDZ97228 |
| X₁₈₆₂ | M2 | 79 | 1694516 | C | T | 3 | CDZ97233 |
| X₁₈₆₃ | M2 | 79 | 1724009 | G | A | 2 | CDZ97243 |
| X₁₈₆₄ | M2 | 79 | 1788096 | G | A | 2 | CDZ97262 |
| X₁₈₆₅ | M2 | 79 | 1797660 | C | T | 3 | CDZ97265 |
| X₁₈₆₆ | M2 | 79 | 1797676 | G | A | 3 | CDZ97265 |
| X₁₈₆₇ | M2 | 79 | 1842448 | G | A | 2 | CDZ97282 |
| X₁₈₆₈ | M2 | 79 | 1842834 | G | A | 2 | CDZ97282 |
| X₁₈₆₉ | M2 | 79 | 1855037 | A | G | 3 | CDZ97285 |
| X₁₈₇₀ | M2 | 79 | 1855421 | G | A | 3 | CDZ97285 |
| X₁₈₇₁ | M2 | 79 | 1859220 | A | G | 1 | CDZ97291 |
| X₁₈₇₂ | M2 | 79 | 1869889 | C | T | 3 | CDZ97293 |
| X₁₈₇₃ | M2 | 79 | 1912360 | G | A | 2 | CDZ97307 |
| X₁₈₇₄ | M2 | 79 | 1977783 | G | A | 3 | CDZ97330 |
| X₁₈₇₅ | M2 | 79 | 2001789 | C | T | 2 | CDZ97339 |
| X₁₈₇₆ | M2 | 79 | 2002072 | C | T | 1 | CDZ97339 |
| X₁₈₇₇ | M2 | 79 | 2013361 | C | T | 8 | CDZ97344 |
| X₁₈₇₈ | M2 | 79 | 2024243 | G | A | 2 | CDZ97349 |
| X₁₈₇₉ | M2 | 79 | 2027861 | C | T | 8 | CDZ97350 |
| X₁₈₈₀ | M2 | 79 | 2066016 | C | T | 1 | CDZ97366 |
| X₁₈₈₁ | M2 | 79 | 2115870 | G | A | 1 | CDZ97380 |
| X₁₈₈₂ | M2 | 79 | 2121041 | G | A | 3 | CDZ97380 |
| X₁₈₈₃ | M2 | 79 | 2152573 | C | T | 2 | CDZ97392 |
| X₁₈₈₄ | M2 | 79 | 2187306 | C | T | 3 | CDZ97404 |
| X₁₈₈₅ | M2 | 79 | 2188410 | G | A | 2 | CDZ97405 |
| X₁₈₈₆ | M2 | 79 | 2268540 | C | T | 1 | CDZ97435 |
| X₁₈₈₇ | M2 | 79 | 2293228 | C | G | 3 | CDZ97442 |
| X₁₈₈₈ | M2 | 79 | 2317043 | G | A | 1 | CDZ97452 |
| X₁₈₈₉ | M2 | 79 | 2320060 | G | A | 2 | CDZ97454 |
| X₁₈₉₀ | M2 | 79 | 2323713 | C | T | 2 | CDZ97455 |
| X₁₈₉₁ | M2 | 79 | 2339881 | C | G | 3 | CDZ97460 |
| X₁₈₉₂ | M2 | 79 | 2340326 | G | A | 3 | CDZ97462 |
| X₁₈₉₃ | M2 | 79 | 2340636 | T | C | 3 | CDZ97462 |
| X₁₈₉₄ | M2 | 85 | 421 | G | A | 6 | |
| X₁₈₉₅ | M2 | 85 | 425 | C | T | 6 | |
| X₁₈₉₆ | M2 | 85 | 462 | G | A | 6 | |
| X₁₈₉₇ | M2 | 85 | 463 | A | G | 6 | |
| X₁₈₉₈ | M2 | 85 | 467 | A | T | 6 | |
| X₁₈₉₉ | M2 | 85 | 512 | A | G | 6 | |
| X₁₉₀₀ | M2 | 85 | 516 | G | A | 6 | |
| X₁₉₀₁ | M2 | 85 | 521 | C | T | 6 | |
| X₁₉₀₂ | M2 | 85 | 522 | A | G | 6 | |
| X₁₉₀₃ | M2 | 88 | 119 | C | T | 3 | CDZ97464 |
| X₁₉₀₄ | M2 | 88 | 196 | G | A | 3 | CDZ97464 |
| X₁₉₀₅ | M2 | 88 | 898 | C | T | 4 | CDZ97464 |
| X₁₉₀₆ | M2 | 99 | 245 | G | A | 6 | |
| X₁₉₀₇ | M2 | 103 | 768 | C | T | 6 | |
| X₁₉₀₈ | M2 | 106 | 278 | A | G | 6 | |
| X₁₉₀₉ | M2 | 109 | 396 | T | C | 6 | |
| X₁₉₁₀ | M2 | 115 | 361 | G | A | 6 | |
| X₁₉₁₁ | M2 | 118 | 396 | C | T | 2 | CDZ97478 |
| X₁₉₁₂ | M2 | 118 | 870 | G | A | 4 | CDZ97478 |
| X₁₉₁₃ | M2 | 118 | 1491 | G | A | 4 | CDZ97478 |
| X₁₉₁₄ | M2 | 121 | 907 | T | C | 6 | |
| X₁₉₁₅ | M2 | 121 | 1010 | G | A | 6 | |
| X₁₉₁₆ | M2 | 124 | 35211 | G | A | 2 | CDZ97488 |
| X₁₉₁₇ | M2 | 124 | 72117 | G | A | 2 | CDZ97501 |
| X₁₉₁₈ | M2 | 124 | 72760 | G | A | 1 | CDZ97501 |
| X₁₉₁₉ | M2 | 124 | 94611 | G | A | 1 | CDZ97507 |
| X₁₉₂₀ | M2 | 124 | 96777 | C | T | 2 | CDZ97508 |
| X₁₉₂₁ | M2 | 124 | 138045 | C | T | 4 | CDZ97519 |
| X₁₉₂₂ | M2 | 124 | 156052 | G | A | 2 | CDZ97524 |
| X₁₉₂₃ | M2 | 124 | 206541 | G | A | 2 | CDZ97541 |
| X₁₉₂₄ | M2 | 124 | 222249 | C | T | 1 | CDZ97547 |
| X₁₉₂₅ | M2 | 125 | 35864 | T | C | 3 | CDZ97573 |
| X₁₉₂₆ | M2 | 129 | 299 | G | A | 3 | CDZ97577 |
| X₁₉₂₇ | M2 | 129 | 433 | G | A | 3 | CDZ97577 |
| X₁₉₂₈ | M2 | 129 | 856 | G | A | 2 | CDZ97577 |
| X₁₉₂₉ | M2 | 129 | 1013 | C | T | 1 | CDZ97577 |
| X₁₉₃₀ | M2 | 130 | 674 | C | T | 4 | CDZ97578 |
| X₁₉₃₁ | M2 | 141 | 15764 | C | T | 2 | CDZ97587 |
| X₁₉₃₂ | M2 | 145 | 296 | A | G | 6 | |
| X₁₉₃₃ | M2 | 145 | 704 | T | G | 6 | |
| X₁₉₃₄ | M2 | 149 | 1663 | A | G | 3 | CDZ97598 |
| X₁₉₃₅ | M2 | 149 | 2074 | T | G | 3 | CDZ97598 |
| X₁₉₃₆ | M2 | 159 | 106 | A | C | 6 | |
| X₁₉₃₇ | M2 | 162 | 70405 | A | G | 1 | CDZ97625 |
| X₁₉₃₈ | M2 | 162 | 96194 | G | A | 3 | CDZ97631 |
| X₁₉₃₉ | M2 | 162 | 143415 | G | T | 3 | CDZ97647 |
| X₁₉₄₀ | M2 | 162 | 223407 | C | T | 2 | CDZ97674 |
| X₁₉₄₁ | M2 | 162 | 238126 | C | T | 3 | CDZ97680 |
| X₁₉₄₂ | M2 | 162 | 308369 | T | C | 1 | CDZ97702 |
| X₁₉₄₃ | M2 | 162 | 321070 | C | T | 4 | CDZ97703 |
| X₁₉₄₄ | M2 | 162 | 321073 | A | G | 4 | CDZ97703 |
| X₁₉₄₅ | M2 | 162 | 321460 | C | G | 4 | CDZ97703 |
| X₁₉₄₆ | M2 | 162 | 321463 | A | C | 4 | CDZ97703 |
| X₁₉₄₇ | M2 | 162 | 322591 | G | A | 4 | CDZ97703 |
| X₁₉₄₈ | M2 | 162 | 323473 | C | T | 2 | CDZ97703 |
| X₁₉₄₉ | M2 | 162 | 323480 | T | C | 1 | CDZ97703 |
| X₁₉₅₀ | M2 | 162 | 323735 | A | G | 1 | CDZ97703 |
| X₁₉₅₁ | M2 | 162 | 324114 | T | C | 2 | CDZ97703 |
| X₁₉₅₂ | M2 | 162 | 324139 | C | T | 2 | CDZ97703 |
| X₁₉₅₃ | M2 | 162 | 324568 | A | G | 2 | CDZ97703 |
| X₁₉₅₄ | M2 | 162 | 351016 | C | T | 2 | CDZ97711 |
| X₁₉₅₅ | M2 | 162 | 360320 | G | A | 2 | CDZ97714 |
| X₁₉₅₆ | M2 | 162 | 361986 | T | C | 3 | CDZ97714 |
| X₁₉₅₇ | M2 | 162 | 398165 | C | T | 1 | CDZ97730 |
| X₁₉₅₈ | M2 | 162 | 408274 | C | T | 1 | CDZ97733 |
| X₁₉₅₉ | M2 | 162 | 414579 | C | T | 8 | CDZ97737 |
| X₁₉₆₀ | M2 | 162 | 423180 | C | T | 1 | CDZ97740 |
| X₁₉₆₁ | M2 | 162 | 424391 | C | T | 3 | CDZ97740 |
| X₁₉₆₂ | M2 | 162 | 444123 | T | C | 2 | CDZ97748 |
| X₁₉₆₃ | M2 | 162 | 453998 | G | T | 1 | CDZ97751 |
| X₁₉₆₄ | M2 | 162 | 467207 | C | T | 3 | CDZ97755 |
| X₁₉₆₅ | M2 | 162 | 469139 | G | A | 3 | CDZ97757 |
| X₁₉₆₆ | M2 | 162 | 476928 | C | T | 1 | CDZ97760 |
| X₁₉₆₇ | M2 | 162 | 480722 | G | A | 2 | CDZ97761 |
| X₁₉₆₈ | M2 | 162 | 481093 | G | A | 2 | CDZ97761 |
| X₁₉₆₉ | M2 | 162 | 487433 | G | A | 2 | CDZ97763 |
| X₁₉₇₀ | M2 | 162 | 491906 | G | A | 3 | CDZ97764 |
| X₁₉₇₁ | M2 | 162 | 492101 | G | A | 3 | CDZ97764 |
| X₁₉₇₂ | M2 | 162 | 501886 | C | T | 8 | CDZ97769 |
| X₁₉₇₃ | M2 | 162 | 541612 | G | A | 2 | CDZ97784 |
| X₁₉₇₄ | M2 | 162 | 618658 | C | T | 2 | CDZ97808 |
| X₁₉₇₅ | M2 | 162 | 632311 | G | A | 2 | CDZ97814 |
| X₁₉₇₆ | M2 | 162 | 633321 | G | A | 2 | CDZ97814 |
| X₁₉₇₇ | M2 | 162 | 633633 | G | A | 1 | CDZ97814 |
| X₁₉₇₈ | M2 | 162 | 640005 | C | T | 2 | CDZ97815 |
| X₁₉₇₉ | M2 | 162 | 680645 | G | A | 8 | CDZ97826 |
| X₁₉₈₀ | M2 | 162 | 696331 | T | A | 3 | CDZ97828 |
| X₁₉₈₁ | M2 | 162 | 703725 | G | A | 2 | CDZ97831 |
| X₁₉₈₂ | M2 | 162 | 738675 | G | A | 3 | CDZ97842 |
| X₁₉₈₃ | M2 | 162 | 738686 | C | T | 3 | CDZ97842 |
| X₁₉₈₄ | M2 | 162 | 801198 | C | T | 3 | CDZ97864 |
| X₁₉₈₅ | M2 | 162 | 808830 | G | A | 3 | CDZ97869 |
| X₁₉₈₆ | M2 | 162 | 825209 | G | A | 2 | CDZ97877 |
| X₁₉₈₇ | M2 | 162 | 871911 | C | T | 8 | CDZ97890 |
| X₁₉₈₈ | M2 | 162 | 914850 | C | T | 3 | CDZ97904 |
| X₁₉₈₉ | M2 | 162 | 971882 | G | A | 2 | CDZ97924 |
| X₁₉₉₀ | M2 | 164 | 58 | C | T | 6 | |
| X₁₉₉₁ | M2 | 164 | 62 | C | T | 6 | |
| X₁₉₉₂ | M2 | 175 | 385 | A | C | 6 | |
| X₁₉₉₃ | M2 | 185 | 758 | C | T | 4 | CDZ97958 |
| X₁₉₉₄ | M2 | 189 | 1306 | C | T | 3 | CDZ97961 |
| X₁₉₉₅ | M2 | 189 | 58121 | G | A | 3 | CDZ97976 |
| X₁₉₉₆ | M2 | 189 | 88726 | C | T | 1 | CDZ97985 |
| X₁₉₉₇ | M2 | 189 | 108326 | C | T | 3 | CDZ97991 |
| X₁₉₉₈ | M2 | 189 | 126573 | G | A | 3 | CDZ97996 |
| X₁₉₉₉ | M2 | 189 | 142919 | G | T | 4 | CDZ98002 |
| X₂₀₀₀ | M2 | 189 | 194647 | A | G | 3 | CDZ98020 |
| X₂₀₀₁ | M2 | 189 | 194665 | A | G | 3 | CDZ98020 |
| X₂₀₀₂ | M2 | 189 | 212408 | G | A | 2 | CDZ98028 |
| X₂₀₀₃ | M2 | 189 | 257670 | C | T | 1 | CDZ98041 |
| X₂₀₀₄ | M2 | 189 | 274346 | C | T | 3 | CDZ98046 |
| X₂₀₀₅ | M2 | 189 | 298487 | C | T | 1 | CDZ98056 |
| X₂₀₀₆ | M2 | 189 | 323680 | C | T | 2 | CDZ98063 |
| X₂₀₀₇ | M2 | 189 | 328678 | G | T | 3 | CDZ98063 |
| X₂₀₀₈ | M2 | 189 | 332957 | G | A | 3 | CDZ98065 |
| X₂₀₀₉ | M2 | 189 | 371247 | G | A | 5 | CDZ98078 |
| X₂₀₁₀ | M2 | 189 | 400292 | T | C | 3 | CDZ98086 |
| X₂₀₁₁ | M2 | 191 | 342 | A | G | 3 | CDZ98107 |
| X₂₀₁₂ | M2 | 191 | 347 | C | T | 3 | CDZ98107 |
| X₂₀₁₃ | M2 | 191 | 427 | C | T | 3 | CDZ98107 |
| X₂₀₁₄ | M2 | 191 | 451 | C | T | 3 | CDZ98107 |
| X₂₀₁₅ | M2 | 191 | 487 | A | G | 3 | CDZ98107 |
| X₂₀₁₆ | M2 | 197 | 624 | C | T | 3 | CDZ98111 |
| X₂₀₁₇ | M2 | 198 | 202 | C | A | 6 | |
| X₂₀₁₈ | M2 | 198 | 203 | G | A | 6 | |
| X₂₀₁₉ | M2 | 198 | 238 | C | T | 6 | |
| X₂₀₂₀ | M2 | 198 | 265 | C | T | 6 | |
| X₂₀₂₁ | M2 | 198 | 452 | G | A | 6 | |
| X₂₀₂₂ | M2 | 199 | 688 | C | T | 6 | |
| X₂₀₂₃ | M2 | 199 | 911 | C | T | 6 | |
| X₂₀₂₄ | M2 | 199 | 971 | C | T | 6 | |
| X₂₀₂₅ | M2 | 199 | 1218 | C | T | 6 | |
| X₂₀₂₆ | M2 | 202 | 171 | C | T | 6 | |
| X₂₀₂₇ | M2 | 205 | 360 | C | T | 3 | CDZ98112 |
| X₂₀₂₈ | M2 | 205 | 981 | C | T | 4 | CDZ98112 |
| X₂₀₂₉ | M2 | 208 | 117 | G | A | 6 | |
| X₂₀₃₀ | M2 | 208 | 476 | G | A | 6 | |
| X₂₀₃₁ | M2 | 208 | 616 | G | A | 6 | |
| X₂₀₃₂ | M2 | 208 | 935 | G | A | 6 | |
| X₂₀₃₃ | M2 | 209 | 312 | C | T | 8 | CDZ98113 |
| X₂₀₃₄ | M2 | 223 | 93 | G | A | 4 | CDZ98118 |
| X₂₀₃₅ | M2 | 223 | 102 | A | G | 4 | CDZ98118 |
| X₂₀₃₆ | M2 | 223 | 133 | A | G | 4 | CDZ98118 |
| X₂₀₃₇ | M2 | 223 | 150 | T | C | 4 | CDZ98118 |
| X₂₀₃₈ | M2 | 223 | 155 | A | C | 4 | CDZ98118 |
| X₂₀₃₉ | M2 | 223 | 158 | T | C | 4 | CDZ98118 |
| X₂₀₄₀ | M2 | 223 | 160 | C | T | 4 | CDZ98118 |
| X₂₀₄₁ | M2 | 223 | 175 | G | A | 4 | CDZ98118 |
| X₂₀₄₂ | M2 | 223 | 177 | A | G | 4 | CDZ98118 |
| X₂₀₄₃ | M2 | 223 | 188 | A | G | 4 | CDZ98118 |
| X₂₀₄₄ | M2 | 223 | 192 | C | A | 4 | CDZ98118 |
| X₂₀₄₅ | M2 | 223 | 194 | T | C | 4 | CDZ98118 |
| X₂₀₄₆ | M2 | 223 | 195 | T | G | 4 | CDZ98118 |
| X₂₀₄₇ | M2 | 223 | 197 | T | C | 4 | CDZ98118 |
| X₂₀₄₈ | M2 | 223 | 202 | G | C | 4 | CDZ98118 |
| X₂₀₄₉ | M2 | 223 | 205 | C | T | 4 | CDZ98118 |
| X₂₀₅₀ | M2 | 223 | 360 | C | T | 2 | CDZ98118 |
| X₂₀₅₁ | M2 | 223 | 506 | A | G | 7 | CDZ98118 |
| X₂₀₅₂ | M2 | 223 | 519 | T | C | 7 | CDZ98118 |
| X₂₀₅₃ | M2 | 224 | 27 | T | A | 6 | |
| X₂₀₅₄ | M2 | 224 | 126 | T | C | 6 | |
| X₂₀₅₅ | M2 | 224 | 130 | A | | 6 | |
| X₂₀₅₆ | M2 | 225 | 317 | C | T | 6 | |
| X₂₀₅₇ | M2 | 227 | 202 | G | A | 6 | |
| X₂₀₅₈ | M2 | 229 | 225 | G | C | 6 | |
| X₂₀₅₉ | M2 | 232 | 340 | G | A | 3 | CDZ98119 |
| X₂₀₆₀ | M2 | 232 | 1379 | C | T | 1 | CDZ98119 |
| X₂₀₆₁ | M2 | 232 | 1521 | C | T | 2 | CDZ98119 |
| X₂₀₆₂ | M2 | 232 | 1662 | G | A | 2 | CDZ98119 |
| X₂₀₆₃ | M2 | 232 | 1761 | C | T | 2 | CDZ98119 |
| X₂₀₆₄ | M2 | 232 | 2027 | C | T | 4 | CDZ98119 |
| X₂₀₆₅ | M2 | 232 | 3060 | C | T | 2 | CDZ98120 |
| X₂₀₆₆ | M2 | 232 | 3284 | C | T | 4 | CDZ98119 |
| X₂₀₆₇ | M2 | 232 | 4437 | G | A | 2 | CDZ98121 |
| X₂₀₆₈ | M2 | 232 | 4561 | C | T | 3 | CDZ98120 |
| X₂₀₆₉ | M2 | 237 | 210 | T | C | 6 | |
| X₂₀₇₀ | M2 | 242 | 7334 | C | T | 2 | CDZ98125 |
| X₂₀₇₁ | M2 | 242 | 41710 | G | A | 3 | CDZ98131 |
| X₂₀₇₂ | M2 | 242 | 50262 | G | A | 8 | CDZ98135 |
| X₂₀₇₃ | M2 | 242 | 88037 | G | A | 2 | CDZ98147 |
| X₂₀₇₄ | M2 | 242 | 106805 | G | A | 3 | CDZ98152 |
| X₂₀₇₅ | M2 | 242 | 107587 | G | A | 4 | CDZ98153 |
| X₂₀₇₆ | M2 | 242 | 147104 | G | A | 2 | CDZ98164 |
| X₂₀₇₇ | M2 | 24 | 155049 | C | T | 1 | CDZ98168 |
| X₂₀₇₈ | M2 | 242 | 179344 | A | T | 3 | CDZ98173 |
| X₂₀₇₉ | M2 | 242 | 189498 | G | A | 3 | CDZ98176 |
| X₂₀₈₀ | M2 | 242 | 194983 | C | T | 8 | CDZ98179 |
| X₂₀₈₁ | M2 | 242 | 213399 | C | T | 2 | CDZ98185 |
| X₂₀₈₂ | M2 | 242 | 213986 | G | A | 8 | CDZ98185 |
| X₂₀₈₃ | M2 | 242 | 220015 | G | A | 2 | CDZ98187 |
| X₂₀₈₄ | M2 | 242 | 227271 | C | T | 3 | CDZ98191 |
| X₂₀₈₅ | M2 | 242 | 233088 | G | A | 2 | CDZ98193 |
| X₂₀₈₆ | M2 | 242 | 309675 | G | A | 2 | CDZ98216 |
| X₂₀₈₇ | M2 | 242 | 310353 | G | A | 2 | CDZ98216 |
| X₂₀₈₈ | M2 | 242 | 404132 | G | A | 3 | CDZ98248 |
| X₂₀₈₉ | M2 | 242 | 405825 | G | A | 3 | CDZ98250 |
| X₂₀₉₀ | M2 | 242 | 412676 | G | A | 3 | CDZ98249 |
| X₂₀₉₁ | M2 | 242 | 485936 | G | A | 4 | CDZ98270 |
| X₂₀₉₂ | M2 | 242 | 492389 | G | A | 2 | CDZ98274 |
| X₂₀₉₃ | M2 | 242 | 514780 | C | T | 2 | CDZ98282 |
| X₂₀₉₄ | M2 | 242 | 542663 | G | A | 3 | CDZ98290 |
| X₂₀₉₅ | M2 | 242 | 559999 | G | A | 2 | CDZ98297 |
| X₂₀₉₆ | M2 | 242 | 577367 | G | A | 3 | CDZ98302 |
| X₂₀₉₇ | M2 | 242 | 602456 | G | A | 2 | CDZ98308 |
| X₂₀₉₈ | M2 | 242 | 602531 | G | A | 2 | CDZ98308 |
| X₂₀₉₉ | M2 | 242 | 604704 | C | T | 2 | CDZ98309 |
| X₂₁₀₀ | M2 | 246 | 329 | C | G | 2 | CDZ98328 |
| X₂₁₀₁ | M2 | 246 | 331 | T | C | 1 | CDZ98328 |
| X₂₁₀₂ | M2 | 249 | 2757 | C | T | [symbol] | CED84929 |
| X₂₁₀₃ | M2 | 249 | 2763 | A | T | [symbol] | CED84929 |
| X₂₁₀₄ | M2 | 249 | 42295 | C | T | [symbol] | CED84942 |
| X₂₁₀₅ | M2 | 249 | 72016 | C | T | [symbol] | CED84950 |
| X₂₁₀₆ | M2 | 249 | 104500 | C | T | [symbol] | CED84966 |
| X₂₁₀₇ | M2 | 249 | 110060 | C | T | [symbol] | CED84968 |
| X₂₁₀₈ | M2 | 249 | 142920 | G | A | [symbol] | CED84978 |
| X₂₁₀₉ | M2 | 249 | 157550 | C | T | [symbol] | CED84983 |
| X₂₁₁₀ | M2 | 249 | 191304 | C | T | [symbol] | CED84988 |
| X₂₁₁₁ | M2 | 249 | 239775 | G | A | [symbol] | CED85004 |
| X₂₁₁₂ | M2 | 249 | 272075 | C | T | [symbol] | CED85013 |
| X₂₁₁₃ | M2 | 249 | 289154 | C | T | [symbol] | CED85018 |
| X₂₁₁₄ | M2 | 249 | 294161 | G | A | [symbol] | CED85018 |
| X₂₁₁₅ | M2 | 249 | 294853 | C | T | [symbol] | CED85019 |
| X₂₁₁₆ | M2 | 249 | 305975 | G | A | [symbol] | CED85023 |
| X₂₁₁₇ | M2 | 249 | 326271 | C | T | [symbol] | CED85029 |
| X₂₁₁₈ | M2 | 249 | 376065 | A | G | [symbol] | CED85052 |
| X₂₁₁₉ | M2 | 249 | 381260 | C | T | [symbol] | CED85054 |
| X₂₁₂₀ | M2 | 249 | 390024 | G | A | [symbol] | CED85059 |
| X₂₁₂₁ | M2 | 249 | 412062 | T | C | [symbol] | CED85064 |
| X₂₁₂₂ | M2 | 249 | 469645 | G | A | [symbol] | CED85087 |
| X₂₁₂₃ | M2 | 249 | 485782 | C | T | [symbol] | CED85089 |
| X₂₁₂₄ | M2 | 249 | 487588 | G | A | [symbol] | CED85090 |
| X₂₁₂₅ | M2 | 249 | 500195 | C | T | [symbol] | CED85093 |
| X₂₁₂₆ | M2 | 249 | 501310 | C | T | [symbol] | CED85093 |
| X₂₁₂₇ | M2 | 249 | 501510 | T | C | [symbol] | CED85093 |
| X₂₁₂₈ | M2 | 249 | 532943 | A | G | [symbol] | CED85099 |
| X₂₁₂₉ | M2 | 249 | 561512 | C | A | [symbol] | CED85112 |
| X₂₁₃₀ | M2 | 249 | 561605 | C | T | [symbol] | CED85112 |
| X₂₁₃₁ | M2 | 249 | 568518 | C | T | [symbol] | CED85115 |
| X₂₁₃₂ | M2 | 249 | 598579 | C | T | [symbol] | CED85125 |
| X₂₁₃₃ | M2 | 249 | 626627 | G | A | [symbol] | CED85132 |
| X₂₁₃₄ | M2 | 249 | 637944 | G | A | [symbol] | CED85135 |
| X₂₁₃₅ | M2 | 249 | 657434 | C | T | [symbol] | CED85143 |
| X₂₁₃₆ | M2 | 249 | 660408 | G | A | [symbol] | CED85144 |
| X₂₁₃₇ | M2 | 249 | 662251 | A | T | [symbol] | CED85144 |
| X₂₁₃₈ | M2 | 249 | 746655 | C | T | [symbol] | CED85172 |
| X₂₁₃₉ | M2 | 249 | 772481 | G | A | [symbol] | CED85180 |
| X₂₁₄₀ | M2 | 249 | 849958 | C | T | [symbol] | CED85201 |
| X₂₁₄₁ | M2 | 249 | 854220 | G | A | [symbol] | CED85201 |
| X₂₁₄₂ | M2 | 249 | 911274 | C | T | [symbol] | CED85218 |
| X₂₁₄₃ | M2 | 249 | 927876 | C | T | [symbol] | CED85222 |
| X₂₁₄₄ | M2 | 249 | 932606 | C | T | [symbol] | CED85223 |
| X₂₁₄₅ | M2 | 249 | 945434 | C | T | [symbol] | CED85227 |
| X₂₁₄₆ | M2 | 249 | 945727 | C | T | [symbol] | CED85227 |
| X₂₁₄₇ | M2 | 249 | 969333 | G | T | [symbol] | CED85238 |
| X₂₁₄₈ | M2 | 249 | 972975 | G | A | [symbol] | CED85240 |
| X₂₁₄₉ | M2 | 249 | 977170 | C | T | [symbol] | CED85242 |
| X₂₁₅₀ | M2 | 249 | 989520 | C | T | [symbol] | CED85243 |
| X₂₁₅₁ | M2 | 249 | 1014098 | C | T | [symbol] | CED85252 |
| X₂₁₅₂ | M2 | 249 | 1050123 | C | T | [symbol] | CED85262 |
| X₂₁₅₃ | M2 | 249 | 1062282 | G | A | [symbol] | CED85266 |
| X₂₁₅₄ | M2 | 249 | 1063615 | C | T | [symbol] | CED85265 |
| X₂₁₅₅ | M2 | 249 | 1064359 | C | T | [symbol] | CED85265 |
| X₂₁₅₆ | M2 | 249 | 1067266 | G | A | [symbol] | CED85267 |
| X₂₁₅₇ | M2 | 249 | 1072127 | C | T | [symbol] | CED85268 |
| X₂₁₅₈ | M2 | 249 | 1076166 | C | T | [symbol] | CED85270 |
| X₂₁₅₉ | M2 | 249 | 1144309 | G | A | [symbol] | CED85291 |
| X₂₁₆₀ | M2 | 249 | 1176977 | G | A | [symbol] | CED85303 |
| X₂₁₆₁ | M2 | 249 | 1195367 | G | A | [symbol] | CED85307 |
| X₂₁₆₂ | M2 | 249 | 1203953 | G | A | [symbol] | CED85311 |
| X₂₁₆₃ | M2 | 249 | 1230068 | C | T | [symbol] | CED85319 |
| X₂₁₆₄ | M2 | 249 | 1234239 | C | T | [symbol] | CED85319 |
| X₂₁₆₅ | M2 | 249 | 1263893 | C | T | [symbol] | CED85327 |
| X₂₁₆₆ | M2 | 249 | 1286733 | G | A | [symbol] | CED85336 |
| X₂₁₆₇ | M2 | 249 | 1299472 | C | T | [symbol] | CED85343 |
| X₂₁₆₈ | M2 | 249 | 1305184 | G | A | [symbol] | CED85345 |
| X₂₁₆₉ | M2 | 249 | 1359399 | G | A | [symbol] | CED85360 |
| X₂₁₇₀ | M2 | 249 | 1457529 | G | A | [symbol] | CED85398 |
| X₂₁₇₁ | M2 | 249 | 1473930 | C | T | [symbol] | CED85404 |
| X₂₁₇₂ | M2 | 249 | 1473937 | G | A | [symbol] | CED85404 |
| X₂₁₇₃ | M2 | 249 | 1475200 | G | A | [symbol] | CED85404 |
| X₂₁₇₄ | M2 | 249 | 1475590 | G | A | [symbol] | CED85404 |
| X₂₁₇₅ | M2 | 249 | 1486325 | G | A | [symbol] | CED85409 |
| X₂₁₇₆ | M2 | 249 | 1498029 | T | C | [symbol] | CED85415 |
| X₂₁₇₇ | M2 | 249 | 1502631 | G | T | [symbol] | CED85416 |
| X₂₁₇₈ | M2 | 249 | 1502641 | T | A | [symbol] | CED85416 |
| X₂₁₇₉ | M2 | 249 | 1502819 | T | G | [symbol] | CED85416 |
| X₂₁₈₀ | M2 | 249 | 1505138 | G | A | [symbol] | CED85416 |
| X₂₁₈₁ | M2 | 249 | 1505634 | T | G | [symbol] | CED85416 |
| X₂₁₈₂ | M2 | 249 | 1507424 | C | T | [symbol] | CED85418 |
| X₂₁₈₃ | M2 | 249 | 1519431 | A | G | [symbol] | CED85419 |
| X₂₁₈₄ | M2 | 249 | 1520089 | C | T | [symbol] | CED85420 |
| X₂₁₈₅ | M2 | 249 | 1520565 | C | A | [symbol] | CED85420 |
| X₂₁₈₆ | M2 | 249 | 1520566 | C | T | [symbol] | CED85420 |
| X₂₁₈₇ | M2 | 249 | 1531574 | C | T | [symbol] | CED85423 |
| X₂₁₈₈ | M2 | 249 | 1555472 | C | T | [symbol] | CED85428 |
| X₂₁₈₉ | M2 | 249 | 1567124 | G | A | [symbol] | CED85432 |
| X₂₁₉₀ | M2 | 249 | 1619036 | G | A | [symbol] | CED85450 |
| X₂₁₉₁ | M2 | 249 | 1623151 | G | A | [symbol] | CED85451 |
| X₂₁₉₂ | M2 | 249 | 1653615 | T | G | [symbol] | CED85457 |
| X₂₁₉₃ | M2 | 249 | 1653962 | C | T | [symbol] | CED85458 |
| X₂₁₉₄ | M2 | 249 | 1679109 | T | A | [symbol] | CED85461 |
| X₂₁₉₅ | M2 | 249 | 1726777 | C | T | [symbol] | CED85474 |
| X₂₁₉₆ | M2 | 249 | 1734722 | G | A | [symbol] | CED85477 |
| X₂₁₉₇ | M2 | 249 | 1737431 | C | T | [symbol] | CED85478 |
| X₂₁₉₈ | M2 | 249 | 1780551 | A | G | [symbol] | CED85493 |
| X₂₁₉₉ | M2 | 249 | 1780569 | A | G | [symbol] | CED85493 |
| X₂₂₀₀ | M2 | 249 | 1801965 | G | A | [symbol] | CED85501 |
| X₂₂₀₁ | M2 | 249 | 1803575 | C | T | [symbol] | CED85502 |
| X₂₂₀₂ | M2 | 249 | 1804835 | G | A | [symbol] | CED85502 |
| X₂₂₀₃ | M2 | 249 | 1835770 | G | A | [symbol] | CED85509 |
| X₂₂₀₄ | M2 | 249 | 1862072 | C | T | [symbol] | CED85520 |
| X₂₂₀₅ | M2 | 249 | 1880762 | G | A | [symbol] | CED85525 |
| X₂₂₀₆ | M2 | 249 | 1902250 | G | T | [symbol] | CED85535 |
| X₂₂₀₇ | M2 | 249 | 1915336 | C | T | [symbol] | CED85537 |
| X₂₂₀₈ | M2 | 249 | 1944026 | G | A | [symbol] | CED85545 |
| X₂₂₀₉ | M2 | 249 | 1951259 | G | A | [symbol] | CED85547 |
| X₂₂₁₀ | M2 | 249 | 1988505 | C | T | [symbol] | CED85560 |
| X₂₂₁₁ | M2 | 249 | 2015272 | G | A | [symbol] | CED85567 |
| X₂₂₁₂ | M2 | 249 | 2027477 | G | A | [symbol] | CED85573 |
| X₂₂₁₃ | M2 | 249 | 2032298 | C | T | [symbol] | CED85575 |
| X₂₂₁₄ | M2 | 249 | 2054064 | C | T | [symbol] | CED85583 |
| X₂₂₁₅ | M2 | 249 | 2082550 | A | G | [symbol] | CED85591 |
| X₂₂₁₆ | M2 | 249 | 2110956 | C | T | [symbol] | CED85603 |
| X₂₂₁₇ | M2 | 249 | 2131353 | C | T | [symbol] | CED85609 |
| X₂₂₁₈ | M2 | 249 | 2147501 | C | T | [symbol] | CED85612 |
| X₂₂₁₉ | M2 | 249 | 2198205 | G | A | [symbol] | CED85628 |
| X₂₂₂₀ | M2 | 249 | 2223626 | G | A | [symbol] | CED85633 |
| X₂₂₂₁ | M2 | 249 | 2254072 | G | A | [symbol] | CED85640 |
| X₂₂₂₂ | M2 | 249 | 2255547 | G | C | [symbol] | CED85640 |
| X₂₂₂₃ | M2 | 251 | 1135 | G | A | [symbol] | |
| X₂₂₂₄ | M2 | 252 | 512 | C | T | [symbol] | |
| X₂₂₂₅ | M2 | 252 | 524 | C | T | [symbol] | |
| X₂₂₂₆ | M2 | 258 | 166 | A | G | [symbol] | |
| X₂₂₂₇ | M2 | 258 | 1139 | A | T | [symbol] | |
| X₂₂₂₈ | M2 | 258 | 1394 | G | A | [symbol] | |
| X₂₂₂₉ | M2 | 259 | 91 | G | C | [symbol] | |
| X₂₂₃₀ | M2 | 260 | 156 | G | A | [symbol] | |
| X₂₂₃₁ | M2 | 262 | 4049 | G | A | [symbol] | CDZ98330 |
| X₂₂₃₂ | M2 | 262 | 12289 | C | T | [symbol] | CDZ98333 |
| X₂₂₃₃ | M2 | 262 | 16863 | C | T | [symbol] | CDZ98334 |
| X₂₂₃₄ | M2 | 262 | 20959 | G | A | [symbol] | CDZ98336 |
| X₂₂₃₅ | M2 | 262 | 30347 | G | A | [symbol] | CDZ98338 |
| X₂₂₃₆ | M2 | 262 | 30359 | G | A | [symbol] | CDZ98338 |
| X₂₂₃₇ | M2 | 262 | 63941 | G | A | [symbol] | CDZ98349 |
| X₂₂₃₈ | M2 | 262 | 108865 | C | T | [symbol] | CDZ98369 |
| X₂₂₃₉ | M2 | 262 | 143387 | C | T | [symbol] | CDZ98375 |
| X₂₂₄₀ | M2 | 262 | 148151 | C | T | [symbol] | CDZ98375 |
| X₂₂₄₁ | M2 | 262 | 148199 | G | A | [symbol] | CDZ98376 |
| X₂₂₄₂ | M2 | 262 | 164438 | G | A | [symbol] | CDZ98383 |
| X₂₂₄₃ | M2 | 262 | 201531 | G | A | [symbol] | CDZ98396 |
| X₂₂₄₄ | M2 | 262 | 236880 | G | A | [symbol] | CDZ98406 |
| X₂₂₄₅ | M2 | 262 | 242371 | C | T | [symbol] | CDZ98411 |
| X₂₂₄₆ | M2 | 262 | 252708 | G | A | [symbol] | CDZ98414 |
| X₂₂₄₇ | M2 | 262 | 319302 | G | A | [symbol] | CDZ98436 |
| X₂₂₄₈ | M2 | 262 | 345538 | C | T | [symbol] | CDZ98448 |
| X₂₂₄₉ | M2 | 262 | 350852 | C | T | [symbol] | CDZ98449 |
| X₂₂₅₀ | M2 | 262 | 380519 | C | T | [symbol] | CDZ98457 |
| X₂₂₅₁ | M2 | 262 | 397539 | G | A | [symbol] | CDZ98463 |
| X₂₂₅₂ | M2 | 262 | 414403 | C | T | [symbol] | CDZ98467 |
| X₂₂₅₃ | M2 | 262 | 420102 | G | A | [symbol] | CDZ98468 |
| X₂₂₅₄ | M2 | 262 | 444331 | G | A | [symbol] | CDZ98477 |
| X₂₂₅₅ | M2 | 262 | 446956 | C | T | [symbol] | CDZ98477 |
| X₂₂₅₆ | M2 | 262 | 510643 | G | A | [symbol] | CDZ98502 |
| X₂₂₅₇ | M2 | 262 | 525946 | C | T | [symbol] | CDZ98509 |
| X₂₂₅₈ | M2 | 262 | 539428 | G | A | [symbol] | CDZ98514 |
| X₂₂₅₉ | M2 | 262 | 539452 | A | G | [symbol] | CDZ98514 |
| X₂₂₆₀ | M2 | 262 | 539470 | A | G | [symbol] | CDZ98514 |
| X₂₂₆₁ | M2 | 262 | 539588 | A | G | [symbol] | CDZ98514 |
| X₂₂₆₂ | M2 | 262 | 552414 | C | T | [symbol] | CDZ98518 |
| X₂₂₆₃ | M2 | 262 | 557280 | G | A | [symbol] | CDZ98518 |
| X₂₂₆₄ | M2 | 262 | 560713 | G | A | [symbol] | CDZ98519 |
| X₂₂₆₅ | M2 | 262 | 562795 | C | T | [symbol] | CDZ98521 |
| X₂₂₆₆ | M2 | 262 | 567591 | G | A | [symbol] | CDZ98524 |
| X₂₂₆₇ | M2 | 262 | 567801 | G | A | [symbol] | CDZ98524 |
| X₂₂₆₈ | M2 | 262 | 618198 | G | A | [symbol] | CDZ98538 |
| X₂₂₆₉ | M2 | 262 | 638804 | G | C | [symbol] | CDZ98544 |
| X₂₂₇₀ | M2 | 262 | 638986 | C | G | [symbol] | CDZ98544 |
| X₂₂₇₁ | M2 | 262 | 639006 | C | T | [symbol] | CDZ98544 |
| X₂₂₇₂ | M2 | 262 | 639962 | A | G | [symbol] | CDZ98544 |
| X₂₂₇₃ | M2 | 262 | 640066 | A | G | [symbol] | CDZ98544 |
| X₂₂₇₄ | M2 | 262 | 655754 | A | T | [symbol] | CDZ98545 |
| X₂₂₇₅ | M2 | 262 | 655757 | T | C | [symbol] | CDZ98545 |
| X₂₂₇₆ | M2 | 262 | 656031 | C | A | [symbol] | CDZ98545 |
| X₂₂₇₇ | M2 | 262 | 656323 | C | G | [symbol] | CDZ98545 |
| X₂₂₇₈ | M2 | 262 | 668764 | C | T | [symbol] | CDZ98545 |
| X₂₂₇₉ | M2 | 262 | 691577 | C | T | [symbol] | CDZ98551 |
| X₂₂₈₀ | M2 | 262 | 729852 | G | A | [symbol] | CDZ98564 |
| X₂₂₈₁ | M2 | 262 | 751209 | C | T | [symbol] | CDZ98572 |
| X₂₂₈₂ | M2 | 262 | 801626 | G | A | [symbol] | CDZ98589 |
| X₂₂₈₃ | M2 | 262 | 822734 | G | A | [symbol] | CDZ98597 |
| X₂₂₈₄ | M2 | 262 | 825723 | A | G | [symbol] | CDZ98598 |
| X₂₂₈₅ | M2 | 262 | 835874 | C | T | [symbol] | CDZ98601 |
| X₂₂₈₆ | M2 | 262 | 856616 | G | A | [symbol] | CDZ98612 |
| X₂₂₈₇ | M2 | 262 | 865999 | G | A | [symbol] | CDZ98613 |
| X₂₂₈₈ | M2 | 262 | 882258 | G | A | [symbol] | CDZ98619 |
| X₂₂₈₉ | M2 | 262 | 971713 | G | A | [symbol] | CDZ98649 |
| X₂₂₉₀ | M2 | 262 | 976074 | C | T | [symbol] | CDZ98650 |
| X₂₂₉₁ | M2 | 262 | 1011054 | G | A | [symbol] | CDZ98659 |
| X₂₂₉₂ | M2 | 262 | 1044256 | G | A | [symbol] | CDZ98669 |
| X₂₂₉₃ | M2 | 262 | 1051389 | C | T | [symbol] | CDZ98670 |
| X₂₂₉₄ | M2 | 262 | 1209662 | G | A | [symbol] | CDZ98723 |
| X₂₂₉₅ | M2 | 262 | 1225705 | C | T | [symbol] | CDZ98730 |
| X₂₂₉₆ | M2 | 262 | 1226072 | C | T | [symbol] | CDZ98730 |
| X₂₂₉₇ | M2 | 262 | 1229407 | G | A | [symbol] | CDZ98732 |
| X₂₂₉₈ | M2 | 262 | 1277604 | G | A | [symbol] | CDZ98747 |
| X₂₂₉₉ | M2 | 262 | 1284428 | G | A | [symbol] | CDZ98748 |
| X₂₃₀₀ | M2 | 262 | 1305361 | G | A | [symbol] | CDZ98753 |
| X₂₃₀₁ | M2 | 262 | 1329643 | C | T | [symbol] | CDZ98760 |
| X₂₃₀₂ | M2 | 262 | 1332176 | C | T | [symbol] | CDZ98761 |
| X₂₃₀₃ | M2 | 262 | 1339924 | C | T | [symbol] | CDZ98763 |
| X₂₃₀₄ | M2 | 262 | 1351116 | A | G | [symbol] | CDZ98766 |
| X₂₃₀₅ | M2 | 262 | 1367361 | C | T | [symbol] | CDZ98772 |
| X₂₃₀₆ | M2 | 262 | 1408928 | G | A | [symbol] | CDZ98786 |
| X₂₃₀₇ | M2 | 262 | 1424293 | G | A | [symbol] | CDZ98791 |
| X₂₃₀₈ | M2 | 262 | 1455677 | G | A | [symbol] | CDZ98804 |
| X₂₃₀₉ | M2 | 262 | 1546246 | C | T | [symbol] | CDZ98833 |
| X₂₃₁₀ | M2 | 262 | 1550311 | C | T | [symbol] | CDZ98836 |
| X₂₃₁₁ | M2 | 262 | 1550456 | C | T | [symbol] | CDZ98837 |
| X₂₃₁₂ | M2 | 262 | 1615762 | G | A | [symbol] | CDZ98855 |
| X₂₃₁₃ | M2 | 262 | 1677620 | G | A | [symbol] | CDZ98873 |
| X₂₃₁₄ | M2 | 262 | 1694625 | C | T | [symbol] | CDZ98878 |
| X₂₃₁₅ | M2 | 262 | 1700623 | A | T | [symbol] | CDZ98883 |
| X₂₃₁₆ | M2 | 262 | 1716385 | G | A | [symbol] | CDZ98887 |
| X₂₃₁₇ | M2 | 266 | 85 | C | T | [symbol] | |
| X₂₃₁₈ | M2 | 266 | 252 | C | T | [symbol] | |
| X₂₃₁₉ | M2 | 267 | 93 | G | A | [symbol] | |
| X₂₃₂₀ | M2 | 267 | 94 | A | G | [symbol] | |
| X₂₃₂₁ | M2 | 267 | 133 | T | C | [symbol] | |
| X₂₃₂₂ | M2 | 267 | 134 | C | T | [symbol] | |
| X₂₃₂₃ | M2 | 267 | 201 | T | C | [symbol] | |
| X₂₃₂₄ | M2 | 267 | 208 | T | C | [symbol] | |
| X₂₃₂₅ | M2 | 267 | 237 | T | G | [symbol] | |
| X₂₃₂₆ | M2 | 267 | 254 | G | T | [symbol] | |
| X₂₃₂₇ | M2 | 267 | 256 | A | G | [symbol] | |
| X₂₃₂₈ | M2 | 267 | 257 | T | C | [symbol] | |
| X₂₃₂₉ | M3 | 22 | 1643 | C | T | [symbol] | CED80056 |
| X₂₃₃₀ | M3 | 22 | 2524 | G | A | [symbol] | CED80056 |
| X₂₃₃₁ | M3 | 28 | 236 | G | A | [symbol] | CDZ96150 |
| X₂₃₃₂ | M3 | 28 | 377 | G | A | [symbol] | CDZ96150 |
| X₂₃₃₃ | M3 | 28 | 1506 | C | T | [symbol] | CDZ96150 |
| X₂₃₃₄ | M3 | 28 | 1677 | C | T | [symbol] | CDZ96150 |
| X₂₃₃₅ | M3 | 43 | 464 | G | A | [symbol] | CDZ96151 |
| X₂₃₃₆ | M3 | 43 | 753 | C | T | [symbol] | CDZ96151 |
| X₂₃₃₇ | M3 | 43 | 757 | G | A | [symbol] | CDZ96151 |
| X₂₃₃₈ | M3 | 43 | 1527 | C | T | [symbol] | CDZ96151 |
| X₂₃₃₉ | M3 | 43 | 1748 | G | A | [symbol] | CDZ96151 |
| X₂₃₄₀ | M3 | 43 | 1928 | C | T | [symbol] | CDZ96151 |
| X₂₃₄₁ | M3 | 62 | 26 | T | A | [symbol] | CDZ96152 |
| X₂₃₄₂ | M3 | 62 | 27 | T | C | [symbol] | CDZ96152 |
| X₂₃₄₃ | M3 | 62 | 55 | T | A | [symbol] | CDZ96152 |
| X₂₃₄₄ | M3 | 62 | 403 | C | T | [symbol] | CDZ96152 |
| X₂₃₄₅ | M3 | 62 | 875 | G | A | [symbol] | CDZ96152 |
| X₂₃₄₆ | M3 | 102 | 339 | C | T | [symbol] | CDZ96153 |
| X₂₃₄₇ | M3 | 102 | 951 | G | A | [symbol] | CDZ96153 |
| X₂₃₄₈ | M3 | 102 | 1042 | G | A | [symbol] | CDZ96153 |
| X₂₃₄₉ | M3 | 102 | 2334 | G | A | [symbol] | CDZ96153 |
| X₂₃₅₀ | M3 | 102 | 2590 | C | T | [symbol] | CDZ96153 |
| X₂₃₅₁ | M3 | 102 | 3427 | C | T | [symbol] | CDZ96153 |
| X₂₃₅₂ | M3 | 176 | 358 | G | A | [symbol] | CED80058 |
| X₂₃₅₃ | M3 | 176 | 1872 | G | A | [symbol] | CED80058 |
| X₂₃₅₄ | M3 | 176 | 1980 | G | A | [symbol] | CED80058 |
| X₂₃₅₅ | M3 | 179 | 93 | A | G | [symbol] | CDZ96154 |
| X₂₃₅₆ | M3 | 179 | 96 | G | A | [symbol] | CDZ96154 |
| X₂₃₅₇ | M3 | 179 | 1525 | G | A | [symbol] | CDZ96154 |
| X₂₃₅₈ | M3 | 179 | 1780 | C | T | [symbol] | CDZ96154 |
| X₂₃₅₉ | M3 | 188 | 815 | C | T | [symbol] | CED80060 |
| X₂₃₆₀ | M3 | 188 | 1174 | C | T | [symbol] | CED80060 |
| X₂₃₆₁ | M3 | 188 | 2163 | G | A | [symbol] | CED80060 |
| X₂₃₆₂ | M3 | 188 | 2170 | G | A | [symbol] | CED80060 |
| X₂₃₆₃ | M3 | 188 | 2250 | C | T | [symbol] | CED80060 |
| X₂₃₆₄ | M3 | 247 | 102 | G | A | [symbol] | CED80061 |
| X₂₃₆₅ | M3 | 247 | 989 | C | T | [symbol] | CED80061 |
| X₂₃₆₆ | M3 | 247 | 1053 | G | A | [symbol] | CED80061 |
| X₂₃₆₇ | M3 | 4 | 781 | G | A | [symbol] | |
| X₂₃₆₈ | M3 | 7 | 160 | T | C | [symbol] | |
| X₂₃₆₉ | M3 | 8 | 1110 | C | T | [symbol] | |
| X₂₃₇₀ | M3 | 11 | 154 | A | C | [symbol] | |
| X₂₃₇₁ | M3 | 11 | 158 | C | T | [symbol] | |
| X₂₃₇₂ | M3 | 13 | 559 | C | T | [symbol] | CDZ96158 |
| X₂₃₇₃ | M3 | 15 | 183 | C | T | [symbol] | |
| X₂₃₇₄ | M3 | 24 | 513 | T | C | [symbol] | CDZ96160 |
| X₂₃₇₅ | M3 | 24 | 520 | C | G | [symbol] | CDZ96160 |
| X₂₃₇₆ | M3 | 24 | 5850 | C | T | [symbol] | CDZ96160 |
| X₂₃₇₇ | M3 | 24 | 169574 | C | T | [symbol] | CDZ96213 |
| X₂₃₇₈ | M3 | 24 | 172698 | G | A | [symbol] | CDZ96215 |
| X₂₃₇₉ | M3 | 24 | 180340 | G | A | [symbol] | CDZ96216 |
| X₂₃₈₀ | M3 | 24 | 216696 | C | T | [symbol] | CDZ96228 |
| X₂₃₈₁ | M3 | 24 | 266697 | G | A | [symbol] | CDZ96242 |
| X₂₃₈₂ | M3 | 24 | 307114 | G | A | [symbol] | CDZ96255 |
| X₂₃₈₃ | M3 | 24 | 340626 | C | T | [symbol] | CDZ96265 |
| X₂₃₈₄ | M3 | 24 | 340663 | T | C | [symbol] | CDZ96265 |
| X₂₃₈₅ | M3 | 24 | 400418 | C | T | [symbol] | CDZ96287 |
| X₂₃₈₅ | M3 | 24 | 420108 | G | A | [symbol] | CDZ96291 |
| X₂₃₈₇ | M3 | 25 | 622 | G | A | [symbol] | |
| X₂₃₈₈ | M3 | 27 | 445 | C | T | [symbol] | |
| X₂₃₈₉ | M3 | 27 | 1012 | A | C | [symbol] | |
| X₂₃₉₀ | M3 | 27 | 1013 | T | A | [symbol] | |
| X₂₃₉₁ | M3 | 32 | 158 | C | T | [symbol] | CDZ96332 |
| X₂₃₉₂ | M3 | 32 | 215 | C | T | [symbol] | CDZ96332 |
| X₂₃₉₃ | M3 | 32 | 2438 | C | T | [symbol] | CDZ96332 |
| X₂₃₉₄ | M3 | 32 | 2734 | C | T | [symbol] | CDZ96332 |
| X₂₃₉₅ | M3 | 32 | 2821 | C | T | [symbol] | CDZ96332 |
| X₂₃₉₆ | M3 | 32 | 3067 | C | T | [symbol] | CDZ96332 |
| X₂₃₉₇ | M3 | 32 | 3506 | C | T | [symbol] | CDZ96332 |
| X₂₃₉₈ | M3 | 32 | 3562 | G | A | [symbol] | CDZ96332 |
| X₂₃₉₉ | M3 | 33 | 399 | T | A | [symbol] | CED82002 |
| X₂₄₀₀ | M3 | 33 | 45488 | C | T | [symbol] | CED82012 |
| X₂₄₀₁ | M3 | 33 | 79913 | G | A | [symbol] | CED82024 |
| X₂₄₀₂ | M3 | 33 | 109397 | G | A | [symbol] | CED82038 |
| X₂₄₀₃ | M3 | 33 | 129733 | G | A | [symbol] | CED82045 |
| X₂₄₀₄ | M3 | 33 | 257786 | C | T | [symbol] | CED82084 |
| X₂₄₀₅ | M3 | 33 | 260027 | G | A | [symbol] | CED82084 |
| X₂₄₀₆ | M3 | 33 | 274627 | G | A | [symbol] | CED82091 |
| X₂₄₀₇ | M3 | 33 | 283808 | C | T | [symbol] | CED82093 |
| X₂₄₀₈ | M3 | 33 | 326016 | T | C | [symbol] | CED82108 |
| X₂₄₀₉ | M3 | 33 | 327840 | C | T | [symbol] | CED82108 |
| X₂₄₁₀ | M3 | 33 | 341890 | G | A | [symbol] | CED82113 |
| X₂₄₁₁ | M3 | 33 | 370630 | A | T | [symbol] | CED82121- |
| | | | | | | | CED82122 |
| X₂₄₁₂ | M3 | 33 | 371277 | G | A | [symbol] | CED82121- |
| | | | | | | | CED82122 |
| X₂₄₁₃ | M3 | 33 | 374131 | A | G | [symbol] | CED82121- |
| | | | | | | | CED82122 |
| X₂₄₁₄ | M3 | 33 | 374134 | A | G | [symbol] | CED82121- |
| | | | | | | | CED82122 |
| X₂₄₁₅ | M3 | 33 | 374137 | A | T | [symbol] | CED82121- |
| | | | | | | | CED82122 |
| X₂₄₁₆ | M3 | 33 | 374150 | A | C | [symbol] | CED82121- |
| | | | | | | | CED82122 |
| X₂₄₁₇ | M3 | 33 | 375339 | A | G | [symbol] | CED82121- |
| | | | | | | | CED82122 |
| X₂₄₁₈ | M3 | 33 | 375366 | T | C | [symbol] | CED82121- |
| | | | | | | | CED82122 |
| X₂₄₁₉ | M3 | 33 | 382577 | C | T | [symbol] | CED82122 |
| X₂₄₂₀ | M3 | 33 | 385319 | A | C | [symbol] | CED82122 |
| X₂₄₂₁ | M3 | 33 | 385527 | C | T | [symbol] | CED82122 |
| X₂₄₂₂ | M3 | 33 | 428329 | G | A | [symbol] | CED82136 |
| X₂₄₂₃ | M3 | 33 | 448815 | G | A | [symbol] | CED82144 |
| X₂₄₂₄ | M3 | 33 | 455451 | C | T | [symbol] | CED82146 |
| X₂₄₂₅ | M3 | 33 | 505339 | C | T | [symbol] | CED82165 |
| X₂₄₂₆ | M3 | 33 | 509127 | C | T | [symbol] | CED82166 |
| X₂₄₂₇ | M3 | 33 | 556726 | C | T | [symbol] | CED82183 |
| X₂₄₂₈ | M3 | 33 | 626521 | C | T | [symbol] | CED82203 |
| X₂₄₂₉ | M3 | 33 | 628247 | C | T | [symbol] | CED82205 |
| X₂₄₃₀ | M3 | 33 | 639242 | G | A | [symbol] | CED82208 |
| X₂₄₃₁ | M3 | 33 | 643436 | G | A | [symbol] | CED82208 |
| X₂₄₃₂ | M3 | 33 | 699423 | C | T | [symbol] | CED82227 |
| X₂₄₃₃ | M3 | 33 | 715901 | C | T | [symbol] | CED82231 |
| X₂₄₃₄ | M3 | 33 | 729705 | C | T | [symbol] | CED82234 |
| X₂₄₃₅ | M3 | 33 | 792965 | G | A | [symbol] | CED82256 |
| X₂₄₃₆ | M3 | 33 | 829825 | C | T | [symbol] | CED82271 |
| X₂₄₃₇ | M3 | 33 | 917771 | A | T | [symbol] | CED82294 |
| X₂₄₃₈ | M3 | 33 | 928554 | A | T | [symbol] | CED82297 |
| X₂₄₃₉ | M3 | 33 | 936350 | T | A | [symbol] | CED82300 |
| X₂₄₄₀ | M3 | 33 | 936356 | G | A | [symbol] | CED82300 |
| X₂₄₄₁ | M3 | 33 | 936571 | A | G | [symbol] | CED82300 |
| X₂₄₄₂ | M3 | 33 | 936600 | G | A | [symbol] | CED82300 |
| X₂₄₄₃ | M3 | 33 | 936697 | A | G | [symbol] | CED82300 |
| X₂₄₄₄ | M3 | 33 | 944373 | G | A | [symbol] | CED82301 |
| X₂₄₄₅ | M3 | 33 | 995886 | G | A | [symbol] | CED82318 |
| X₂₄₄₆ | M3 | 33 | 1049699 | G | A | [symbol] | CED82334 |
| X₂₄₄₇ | M3 | 33 | 1051104 | G | A | [symbol] | CED82334 |
| X₂₄₄₈ | M3 | 33 | 1086609 | G | A | [symbol] | CED82349 |
| X₂₄₄₉ | M3 | 33 | 1138444 | C | T | [symbol] | CED82363 |
| X₂₄₅₀ | M3 | 33 | 1165914 | G | A | [symbol] | CED82372 |
| X₂₄₅₁ | M3 | 33 | 1191727 | C | T | [symbol] | CED82379 |
| X₂₄₅₂ | M3 | 33 | 1246468 | C | T | [symbol] | CED82392 |
| X₂₄₅₃ | M3 | 33 | 1311181 | G | A | [symbol] | CED82413 |
| X₂₄₅₄ | M3 | 33 | 1324395 | G | A | [symbol] | CED82417 |
| X₂₄₅₅ | M3 | 33 | 1333932 | G | A | [symbol] | CED82421 |
| X₂₄₅₆ | M3 | 33 | 1339376 | C | T | [symbol] | CED82424 |
| X₂₄₅₇ | M3 | 33 | 1396438 | C | T | [symbol] | CED82442 |
| X₂₄₅₈ | M3 | 33 | 1467702 | C | T | [symbol] | CED82463 |
| X₂₄₅₉ | M3 | 33 | 1468155 | G | A | [symbol] | CED82464 |
| X₂₄₆₀ | M3 | 33 | 1474577 | G | A | [symbol] | CED82466 |
| X₂₄₆₁ | M3 | 33 | 1480984 | G | A | [symbol] | CED82466 |
| X₂₄₆₂ | M3 | 33 | 1499347 | G | A | [symbol] | CED82472 |
| X₂₄₆₃ | M3 | 33 | 1537493 | C | A | [symbol] | CED82485 |
| X₂₄₆₄ | M3 | 33 | 1544767 | A | C | [symbol] | CED82485- |
| | | | | | | | CED82486 |
| X₂₄₆₅ | M3 | 33 | 1544951 | C | G | [symbol] | CED82485- |
| | | | | | | | CED82486 |
| X₂₄₆₆ | M3 | 33 | 1572498 | C | T | [symbol] | CED82491 |
| X₂₄₆₇ | M3 | 33 | 1587443 | C | T | [symbol] | CED82497 |
| X₂₄₆₈ | M3 | 33 | 1596242 | C | T | [symbol] | CED82498 |
| X₂₄₆₉ | M3 | 33 | 1628197 | G | A | [symbol] | CED82510 |
| X₂₄₇₀ | M3 | 33 | 1628812 | C | T | [symbol] | CED82510 |
| X₂₄₇₁ | M3 | 33 | 1638726 | G | A | [symbol] | CED82513 |
| X₂₄₇₂ | M3 | 33 | 1642659 | G | A | [symbol] | CED82515 |
| X₂₄₇₃ | M3 | 33 | 1666039 | G | A | [symbol] | CED82521 |
| X₂₄₇₄ | M3 | 33 | 1682149 | C | T | [symbol] | CED82526 |
| X₂₄₇₅ | M3 | 33 | 1689192 | C | T | [symbol] | CED82529 |
| X₂₄₇₆ | M3 | 33 | 1700000 | G | A | [symbol] | CED82534 |
| X₂₄₇₇ | M3 | 33 | 1723348 | C | T | [symbol] | CED82539 |
| X₂₄₇₈ | M3 | 33 | 1728730 | G | A | [symbol] | CED82541 |
| X₂₄₇₉ | M3 | 33 | 1740595 | C | T | [symbol] | CED82545 |
| X₂₄₈₀ | M3 | 33 | 1780044 | G | A | [symbol] | CED82555 |
| X₂₄₈₁ | M3 | 33 | 1819902 | C | T | [symbol] | CED82571 |
| X₂₄₈₂ | M3 | 33 | 1823362 | C | T | [symbol] | CED82571 |
| X₂₄₈₃ | M3 | 33 | 1826223 | G | A | [symbol] | CED82573 |
| X₂₄₈₄ | M3 | 33 | 1841263 | G | A | [symbol] | CED82576 |
| X₂₄₈₅ | M3 | 33 | 1848935 | C | T | [symbol] | CED82579 |
| X₂₄₈₆ | M3 | 33 | 1861019 | G | A | [symbol] | CED82583 |
| X₂₄₈₇ | M3 | 33 | 1881896 | T | C | [symbol] | CED82588 |
| X₂₄₈₈ | M3 | 33 | 1886315 | G | A | [symbol] | CED82591 |
| X₂₄₈₉ | M3 | 33 | 1887401 | C | T | [symbol] | CED82591 |
| X₂₄₉₀ | M3 | 33 | 1888706 | C | T | [symbol] | CED82592 |
| X₂₄₉₁ | M3 | 33 | 1939670 | C | T | [symbol] | CED82612 |
| X₂₄₉₂ | M3 | 33 | 1950090 | G | A | [symbol] | CED82614 |
| X₂₄₉₃ | M3 | 33 | 1959142 | G | A | [symbol] | CED82619 |
| X₂₄₉₄ | M3 | 33 | 1975079 | G | A | [symbol] | CED82625 |
| X₂₄₉₅ | M3 | 33 | 2010230 | C | T | [symbol] | CED82636 |
| X₂₄₉₆ | M3 | 33 | 2014477 | C | T | [symbol] | CED82637 |
| X₂₄₉₇ | M3 | 33 | 2044014 | G | A | [symbol] | CED82647 |
| X₂₄₉₈ | M3 | 33 | 2050847 | G | A | [symbol] | CED82651 |
| X₂₄₉₉ | M3 | 36 | 320 | G | A | [symbol] | |
| X₂₅₀₀ | M3 | 36 | 1056 | G | A | [symbol] | |
| X₂₅₀₁ | M3 | 36 | 1295 | C | T | [symbol] | |
| X₂₅₀₂ | M3 | 36 | 1461 | A | T | [symbol] | |
| X₂₅₀₃ | M3 | 42 | 804 | C | T | [symbol] | CDZ96333 |
| X₂₅₀₄ | M3 | 42 | 1559 | G | A | [symbol] | CDZ96333 |
| X₂₅₀₅ | M3 | 48 | 563 | C | T | [symbol] | |
| X₂₅₀₆ | M3 | 48 | 565 | T | C | [symbol] | |
| X₂₅₀₇ | M3 | 48 | 576 | G | A | [symbol] | |
| X₂₅₀₈ | M3 | 48 | 580 | T | A | [symbol] | |
| X₂₅₀₉ | M3 | 50 | 145 | G | A | [symbol] | |
| X₂₅₁₀ | M3 | 52 | 3042 | A | G | [symbol] | CED82664 |
| X₂₅₁₁ | M3 | 52 | 63772 | C | T | [symbol] | CED82686 |
| X₂₅₁₂ | M3 | 52 | 63859 | C | T | [symbol] | CED82686 |
| X₂₅₁₃ | M3 | 52 | 123705 | C | T | [symbol] | CED82700 |
| X₂₅₁₄ | M3 | 52 | 128353 | G | A | [symbol] | CED82702 |
| X₂₅₁₅ | M3 | 52 | 144382 | C | T | [symbol] | CED82709 |
| X₂₅₁₆ | M3 | 52 | 151974 | C | T | [symbol] | CED82712 |
| X₂₅₁₇ | M3 | 52 | 183986 | C | T | [symbol] | CED82722 |
| X₂₅₁₈ | M3 | 52 | 207354 | C | T | [symbol] | CED82730 |
| X₂₅₁₉ | M3 | 52 | 211602 | G | A | [symbol] | CED82730 |
| X₂₅₂₀ | M3 | 52 | 223289 | A | G | [symbol] | CED82732- |
| | | | | | | | CED82733 |
| X₂₅₂₁ | M3 | 52 | 240075 | G | C | [symbol] | CED82734 |
| X₂₅₂₂ | M3 | 52 | 244305 | G | A | [symbol] | CED82734 |
| X₂₅₂₃ | M3 | 52 | 284733 | G | A | [symbol] | CED82747 |
| X₂₅₂₄ | M3 | 52 | 390095 | G | A | [symbol] | CED82784 |
| X₂₅₂₅ | M3 | 52 | 395374 | G | A | [symbol] | CED82786 |
| X₂₅₂₆ | M3 | 52 | 398723 | C | T | [symbol] | CED82786 |
| X₂₅₂₇ | M3 | 52 | 398728 | C | T | [symbol] | CED82786 |
| X₂₅₂₈ | M3 | 52 | 422792 | C | T | [symbol] | CED82794 |
| X₂₅₂₉ | M3 | 52 | 516267 | C | T | [symbol] | CED82823 |
| X₂₅₃₀ | M3 | 52 | 542542 | C | T | [symbol] | CED82833 |
| X₂₅₃₁ | M3 | 52 | 548788 | G | A | [symbol] | CED82835 |
| X₂₅₃₂ | M3 | 52 | 552099 | G | A | [symbol] | CED82837 |
| X₂₅₃₃ | M3 | 52 | 552173 | G | A | [symbol] | CED82837 |
| X₂₅₃₄ | M3 | 52 | 571124 | G | A | [symbol] | CED82845 |
| X₂₅₃₅ | M3 | 52 | 631479 | C | T | [symbol] | CED82860 |
| X₂₅₃₆ | M3 | 52 | 638622 | G | A | [symbol] | CED82862 |
| X₂₅₃₇ | M3 | 52 | 725138 | C | T | [symbol] | CED82899 |
| X₂₅₃₈ | M3 | 52 | 737403 | G | A | [symbol] | CED82903 |
| X₂₅₃₉ | M3 | 52 | 737419 | G | A | [symbol] | CED82903 |
| X₂₅₄₀ | M3 | 52 | 809156 | C | T | [symbol] | CED82928 |
| X₂₅₄₁ | M3 | 52 | 817452 | T | A | [symbol] | CED82928 |
| X₂₅₄₂ | M3 | 52 | 826846 | G | A | [symbol] | CED82931 |
| X₂₅₄₃ | M3 | 52 | 840755 | C | T | [symbol] | CED82935 |
| X₂₅₄₄ | M3 | 52 | 849671 | G | A | [symbol] | CED82940 |
| X₂₅₄₅ | M3 | 52 | 890412 | C | T | [symbol] | CED82956 |
| X₂₅₄₆ | M3 | 52 | 938650 | G | A | [symbol] | CED82973 |
| X₂₅₄₇ | M3 | 52 | 967316 | A | T | [symbol] | CED82984 |
| X₂₅₄₈ | M3 | 52 | 967701 | T | A | [symbol] | CED82983 |
| X₂₅₄₉ | M3 | 52 | 1001035 | G | A | [symbol] | CED82999 |
| X₂₅₅₀ | M3 | 52 | 1001299 | C | T | [symbol] | CED82998 |
| X₂₅₅₁ | M3 | 52 | 1003899 | G | A | [symbol] | CED83001 |
| X₂₅₅₂ | M3 | 52 | 1004724 | G | A | [symbol] | CED83001 |
| X₂₅₅₃ | M3 | 52 | 1029498 | G | A | [symbol] | CED83007 |
| X₂₅₅₄ | M3 | 52 | 1043011 | C | T | [symbol] | CED83012 |
| X₂₅₅₅ | M3 | 52 | 1067895 | C | T | [symbol] | CED83020 |
| X₂₅₅₆ | M3 | 52 | 1151398 | G | A | [symbol] | CED83046 |
| X₂₅₅₇ | M3 | 52 | 1158103 | C | T | [symbol] | CED83051 |
| X₂₅₅₈ | M3 | 52 | 1163067 | G | A | [symbol] | CED83051 |
| X₂₅₅₉ | M3 | 52 | 1219894 | C | T | [symbol] | CED83071 |
| X₂₅₆₀ | M3 | 52 | 1247924 | C | T | [symbol] | CED83081 |
| X₂₅₆₁ | M3 | 52 | 1291646 | C | T | [symbol] | CED83098 |
| X₂₅₆₂ | M3 | 52 | 1363357 | G | A | [symbol] | CED83122 |
| X₂₅₆₃ | M3 | 52 | 1363405 | C | T | [symbol] | CED83123 |
| X₂₅₆₄ | M3 | 52 | 1389320 | G | A | [symbol] | CED83130 |
| X₂₅₆₅ | M3 | 52 | 1399439 | G | A | [symbol] | CED83134 |
| X₂₅₆₆ | M3 | 52 | 1458571 | C | T | [symbol] | CED83158 |
| X₂₅₆₇ | M3 | 52 | 1474412 | G | A | [symbol] | CED83166 |
| X₂₅₆₈ | M3 | 52 | 1475408 | C | T | [symbol] | CED83166 |
| X₂₅₆₉ | M3 | 52 | 1509004 | G | A | [symbol] | CED83177 |
| X₂₅₇₀ | M3 | 52 | 1526796 | G | A | [symbol] | CED83181 |
| X₂₅₇₁ | M3 | 52 | 1570053 | C | T | [symbol] | CED83200 |
| X₂₅₇₂ | M3 | 52 | 1583655 | C | T | [symbol] | CED83206 |
| X₂₅₇₃ | M3 | 52 | 1688685 | C | T | [symbol] | CED83243 |
| X₂₅₇₄ | M3 | 52 | 1708900 | A | G | [symbol] | CED83249 |
| X₂₅₇₅ | M3 | 52 | 1708985 | C | T | [symbol] | CED83248 |
| X₂₅₇₆ | M3 | 52 | 1715136 | C | T | [symbol] | CED83250 |
| X₂₅₇₇ | M3 | 52 | 1716210 | C | T | [symbol] | CED83250 |
| X₂₅₇₈ | M3 | 52 | 1760440 | G | A | [symbol] | CED83266 |
| X₂₅₇₉ | M3 | 52 | 1793370 | G | A | [symbol] | CED83275 |
| X₂₅₈₀ | M3 | 52 | 1807309 | G | A | [symbol] | CED83283 |
| X₂₅₈₁ | M3 | 52 | 1871310 | C | T | [symbol] | CED83304 |
| X₂₅₈₂ | M3 | 52 | 1874150 | G | T | [symbol] | CED83305 |
| X₂₅₈₃ | M3 | 52 | 1874531 | C | T | [symbol] | CED83306 |
| X₂₅₈₄ | M3 | 52 | 1893352 | G | A | [symbol] | CED83313 |
| X₂₅₈₅ | M3 | 52 | 1987096 | G | A | [symbol] | CED83341 |
| X₂₅₈₆ | M3 | 52 | 1995167 | G | A | [symbol] | CED83342 |
| X₂₅₈₇ | M3 | 52 | 2041781 | C | T | [symbol] | CED83355 |
| X₂₅₈₈ | M3 | 52 | 2048018 | G | A | [symbol] | CED83358 |
| X₂₅₈₉ | M3 | 52 | 2050245 | G | A | [symbol] | CED83359 |
| X₂₅₉₀ | M3 | 52 | 2081390 | G | A | [symbol] | CED83367 |
| X₂₅₉₁ | M3 | 52 | 2093251 | C | T | [symbol] | CED83368 |
| X₂₅₉₂ | M3 | 52 | 2120665 | C | T | [symbol] | CED83376 |
| X₂₅₉₃ | M3 | 52 | 2136885 | A | G | [symbol] | CED83382 |
| X₂₅₉₄ | M3 | 52 | 2162878 | G | A | [symbol] | CED83392 |
| X₂₅₉₅ | M3 | 52 | 2178340 | G | A | [symbol] | CED83397 |
| X₂₅₉₆ | M3 | 52 | 2258192 | C | T | [symbol] | CED83422 |
| X₂₅₉₇ | M3 | 52 | 2265219 | C | T | [symbol] | CED83425 |
| X₂₅₉₈ | M3 | 52 | 2266378 | C | T | [symbol] | CED83423 |
| X₂₅₉₉ | M3 | 52 | 2266753 | C | T | [symbol] | CED83426 |
| X₂₆₀₀ | M3 | 52 | 2327266 | C | T | [symbol] | CED83445 |
| X₂₆₀₁ | M3 | 52 | 2338728 | G | A | [symbol] | CED83451 |
| X₂₆₀₂ | M3 | 52 | 2341484 | C | T | [symbol] | CED83451 |
| X₂₆₀₃ | M3 | 52 | 2364315 | G | A | [symbol] | CED83455 |
| X₂₆₀₄ | M3 | 52 | 2367582 | G | A | [symbol] | CED83455 |
| X₂₆₀₅ | M3 | 52 | 2373120 | C | T | [symbol] | CED83456 |
| X₂₆₀₆ | M3 | 52 | 2373426 | G | A | [symbol] | CED83456 |
| X₂₆₀₇ | M3 | 52 | 2373448 | C | T | [symbol] | CED83456 |
| X₂₆₀₈ | M3 | 52 | 2400778 | C | T | [symbol] | CED83463 |
| X₂₆₀₉ | M3 | 52 | 2488746 | G | A | [symbol] | CED83493 |
| X₂₆₁₀ | M3 | 52 | 2531584 | C | T | [symbol] | CED83507 |
| X₂₆₁₁ | M3 | 52 | 2543220 | C | T | [symbol] | CED83509 |
| X₂₆₁₂ | M3 | 53 | 26291 | G | A | [symbol] | CDZ96348 |
| X₂₆₁₃ | M3 | 53 | 55702 | C | T | [symbol] | CDZ96359 |
| X₂₆₁₄ | M3 | 53 | 69664 | C | T | [symbol] | CDZ96363 |
| X₂₆₁₅ | M3 | 53 | 110192 | C | T | [symbol] | CDZ96376 |
| X₂₆₁₆ | M3 | 54 | 4815 | G | A | [symbol] | CDZ96384 |
| X₂₆₁₇ | M3 | 54 | 4816 | A | T | [symbol] | CDZ96384 |
| X₂₆₁₈ | M3 | 54 | 4817 | G | C | [symbol] | CDZ96384 |
| X₂₆₁₉ | M3 | 54 | 4821 | G | A | [symbol] | CDZ96384 |
| X₂₆₂₀ | M3 | 54 | 16963 | C | T | [symbol] | CDZ96386 |
| X₂₆₂₁ | M3 | 54 | 60769 | G | A | [symbol] | CDZ96403 |
| X₂₆₂₂ | M3 | 54 | 72235 | G | A | [symbol] | CDZ96406 |
| X₂₆₂₃ | M3 | 54 | 87947 | G | A | [symbol] | CDZ96410 |
| X₂₆₂₄ | M3 | 54 | 106086 | G | A | [symbol] | CDZ96416 |
| X₂₆₂₅ | M3 | 54 | 114442 | G | A | [symbol] | CDZ96419 |
| X₂₆₂₆ | M3 | 54 | 119439 | C | T | [symbol] | CDZ96420 |
| X₂₆₂₇ | M3 | 54 | 142211 | A | G | [symbol] | CDZ96426 |
| X₂₆₂₈ | M3 | 54 | 194230 | G | A | [symbol] | CDZ96446 |
| X₂₆₂₉ | M3 | 54 | 202467 | C | T | [symbol] | CDZ96448 |
| X₂₆₃₀ | M3 | 54 | 206494 | G | A | [symbol] | CDZ96450 |
| X₂₆₃₁ | M3 | 54 | 222860 | G | A | [symbol] | CDZ96456 |
| X₂₆₃₂ | M3 | 54 | 258379 | G | A | [symbol] | CDZ96465 |
| X₂₆₃₃ | M3 | 54 | 274617 | A | T | [symbol] | CDZ96471 |
| X₂₆₃₄ | M3 | 54 | 296381 | G | A | [symbol] | CDZ96481 |
| X₂₆₃₅ | M3 | 54 | 316790 | T | G | [symbol] | CDZ96487 |
| X₂₆₃₆ | M3 | 54 | 357141 | G | A | [symbol] | CDZ96496 |
| X₂₆₃₇ | M3 | 54 | 370320 | G | A | [symbol] | CDZ96499 |
| X₂₆₃₈ | M3 | 54 | 391223 | A | G | [symbol] | CDZ96509 |
| X₂₆₃₉ | M3 | 54 | 402099 | G | A | [symbol] | CDZ96511 |
| X₂₆₄₀ | M3 | 54 | 404968 | C | T | [symbol] | CDZ96513 |
| X₂₆₄₁ | M3 | 54 | 407871 | T | A | [symbol] | CDZ96515 |
| X₂₆₄₂ | M3 | 54 | 413765 | G | A | [symbol] | CDZ96516 |
| X₂₆₄₃ | M3 | 54 | 427542 | C | T | [symbol] | CDZ96520 |
| X₂₆₄₄ | M3 | 54 | 431851 | C | T | [symbol] | CDZ96520 |
| X₂₆₄₅ | M3 | 54 | 478527 | C | T | [symbol] | CDZ96537 |
| X₂₆₄₆ | M3 | 54 | 509857 | G | A | [symbol] | CDZ96544 |
| X₂₆₄₇ | M3 | 54 | 537282 | T | C | [symbol] | CDZ96557 |
| X₂₆₄₈ | M3 | 54 | 576174 | G | A | [symbol] | CDZ96569 |
| X₂₆₄₉ | M3 | 54 | 616268 | A | G | [symbol] | CDZ96581 |
| X₂₆₅₀ | M3 | 54 | 647579 | C | T | [symbol] | CDZ96590 |
| X₂₆₅₁ | M3 | 54 | 733193 | T | C | [symbol] | CDZ96619 |
| X₂₆₅₂ | M3 | 54 | 743396 | G | A | [symbol] | CDZ96621 |
| X₂₆₅₃ | M3 | 54 | 746707 | G | A | [symbol] | CDZ96623 |
| X₂₆₅₄ | M3 | 58 | 93 | T | C | [symbol] | |
| X₂₆₅₅ | M3 | 64 | 2756 | A | C | [symbol] | CDZ96626 |
| X₂₆₅₆ | M3 | 64 | 2767 | G | A | [symbol] | CDZ96626 |
| X₂₆₅₇ | M3 | 64 | 2770 | C | T | [symbol] | CDZ96626 |
| X₂₆₅₈ | M3 | 64 | 2783 | C | T | [symbol] | CDZ96626 |
| X₂₆₅₉ | M3 | 67 | 111 | G | A | [symbol] | |
| X₂₆₆₀ | M3 | 69 | 29006 | G | A | [symbol] | CED83534 |
| X₂₆₆₁ | M3 | 69 | 52428 | G | A | [symbol] | CED83541 |
| X₂₆₆₂ | M3 | 69 | 82710 | G | A | [symbol] | CED83554 |
| X₂₆₆₃ | M3 | 69 | 107920 | C | T | [symbol] | CED83561 |
| X₂₆₆₄ | M3 | 69 | 148757 | C | T | [symbol] | CED83575 |
| X₂₆₆₅ | M3 | 69 | 201005 | G | A | [symbol] | CED83595 |
| X₂₆₆₆ | M3 | 69 | 201961 | G | A | [symbol] | CED83597 |
| X₂₆₆₇ | M3 | 69 | 258091 | G | A | [symbol] | CED83614 |
| X₂₆₆₈ | M3 | 69 | 314003 | C | T | [symbol] | CED83634 |
| X₂₆₆₉ | M3 | 69 | 371916 | C | T | [symbol] | CED83653 |
| X₂₆₇₀ | M3 | 69 | 384418 | G | A | [symbol] | CED83656 |
| X₂₆₇₁ | M3 | 69 | 415659 | C | T | [symbol] | CED83665 |
| X₂₆₇₂ | M3 | 69 | 431248 | G | A | [symbol] | CED83671 |
| X₂₆₇₃ | M3 | 69 | 461986 | G | A | [symbol] | CED83680 |
| X₂₆₇₄ | M3 | 69 | 585845 | G | A | [symbol] | CED83722 |
| X₂₆₇₅ | M3 | 69 | 631511 | G | A | [symbol] | CED83742 |
| X₂₆₇₆ | M3 | 69 | 637299 | T | C | [symbol] | CED83744 |
| X₂₆₇₇ | M3 | 69 | 638135 | G | A | [symbol] | CED83744 |
| X₂₆₇₈ | M3 | 69 | 675579 | G | A | [symbol] | CED83760 |
| X₂₆₇₉ | M3 | 69 | 676581 | G | A | [symbol] | CED83760 |
| X₂₆₈₀ | M3 | 69 | 676853 | G | A | [symbol] | CED83759 |
| X₂₆₈₁ | M3 | 69 | 678406 | C | T | [symbol] | CED83759 |
| X₂₆₈₂ | M3 | 69 | 777063 | G | A | [symbol] | CED83792 |
| X₂₆₈₃ | M3 | 69 | 803358 | G | A | [symbol] | CED83798 |
| X₂₆₈₄ | M3 | 69 | 865820 | C | T | [symbol] | CED83814 |
| X₂₆₈₅ | M3 | 69 | 869706 | G | A | [symbol] | CED83815 |
| X₂₆₈₆ | M3 | 69 | 870338 | G | A | [symbol] | CED83815 |
| X₂₆₈₇ | M3 | 69 | 892199 | G | A | [symbol] | CED83822 |
| X₂₆₈₈ | M3 | 69 | 894462 | C | T | [symbol] | CED83821 |
| X₂₆₈₉ | M3 | 69 | 898044 | C | T | [symbol] | CED83823 |
| X₂₆₉₀ | M3 | 69 | 949982 | C | T | [symbol] | CED83842 |
| X₂₆₉₁ | M3 | 69 | 971219 | C | T | [symbol] | CED83847 |
| X₂₆₉₂ | M3 | 69 | 988364 | G | A | [symbol] | CED83857 |
| X₂₆₉₃ | M3 | 69 | 989781 | G | A | [symbol] | CED83858 |
| X₂₆₉₄ | M3 | 69 | 1021695 | G | A | [symbol] | CED83868 |
| X₂₆₉₅ | M3 | 69 | 1042212 | G | A | [symbol] | CED83875 |
| X₂₆₉₆ | M3 | 69 | 1054397 | C | T | [symbol] | CED83879 |
| X₂₆₉₇ | M3 | 69 | 1084824 | G | A | [symbol] | CED83891 |
| X₂₆₉₈ | M3 | 69 | 1084835 | C | T | [symbol] | CED83891 |
| X₂₆₉₉ | M3 | 69 | 1084848 | A | G | [symbol] | CED83891 |
| X₂₇₀₀ | M3 | 69 | 1084866 | A | G | [symbol] | CED83891 |
| X₂₇₀₁ | M3 | 69 | 1084931 | C | T | [symbol] | CED83891 |
| X₂₇₀₂ | M3 | 69 | 1102164 | C | T | [symbol] | CED83897 |
| X₂₇₀₃ | M3 | 69 | 1109785 | C | T | [symbol] | CED83899 |
| X₂₇₀₄ | M3 | 69 | 1109813 | A | G | [symbol] | CED83899 |
| X₂₇₀₅ | M3 | 69 | 1109818 | A | G | [symbol] | CED83899 |
| X₂₇₀₆ | M3 | 69 | 1109819 | T | A | [symbol] | CED83899 |
| X₂₇₀₇ | M3 | 69 | 1109823 | T | C | [symbol] | CED83899 |
| X₂₇₀₈ | M3 | 69 | 1109830 | A | G | [symbol] | CED83899 |
| X₂₇₀₉ | M3 | 69 | 1109831 | C | A | [symbol] | CED83899 |
| X₂₇₁₀ | M3 | 69 | 1109835 | A | G | [symbol] | CED83899 |
| X₂₇₁₁ | M3 | 69 | 1192333 | G | A | [symbol] | CED83928 |
| X₂₇₁₂ | M3 | 69 | 1199155 | C | T | [symbol] | CED83929 |
| X₂₇₁₃ | M3 | 69 | 1218409 | G | A | [symbol] | CED83936 |
| X₂₇₁₄ | M3 | 69 | 1260087 | G | A | [symbol] | CED83949 |
| X₂₇₁₅ | M3 | 69 | 1342909 | G | A | [symbol] | CED83975 |
| X₂₇₁₆ | M3 | 69 | 1411237 | C | T | [symbol] | CED84001 |
| X₂₇₁₇ | M3 | 69 | 1411421 | C | T | [symbol] | CED83999 |
| X₂₇₁₈ | M3 | 69 | 1421240 | C | T | [symbol] | CED84004 |
| X₂₇₁₉ | M3 | 69 | 1430120 | C | T | [symbol] | CED84006 |
| X₂₇₂₀ | M3 | 69 | 1529637 | C | T | [symbol] | CED84038 |
| X₂₇₂₁ | M3 | 69 | 1590302 | G | A | [symbol] | CED84059 |
| X₂₇₂₂ | M3 | 69 | 1601173 | C | T | [symbol] | CED84062 |
| X₂₇₂₃ | M3 | 69 | 1652288 | C | T | [symbol] | CED84077 |
| X₂₇₂₄ | M3 | 69 | 1674261 | C | T | [symbol] | CED84084 |
| X₂₇₂₅ | M3 | 69 | 1688555 | C | T | [symbol] | CED84088 |
| X₂₇₂₆ | M3 | 69 | 1694047 | C | T | [symbol] | CED84089 |
| X₂₇₂₇ | M3 | 69 | 1714728 | G | A | [symbol] | CED84097 |
| X₂₇₂₈ | M3 | 69 | 1735172 | G | A | [symbol] | CED84108 |
| X₂₇₂₉ | M3 | 69 | 1784836 | C | T | [symbol] | CED84123 |
| X₂₇₃₀ | M3 | 69 | 1790823 | C | T | [symbol] | CED84125 |
| X₂₇₃₁ | M3 | 69 | 1792597 | C | T | [symbol] | CED84126 |
| X₂₇₃₂ | M3 | 69 | 1799816 | C | T | [symbol] | CED84128 |
| X₂₇₃₃ | M3 | 69 | 1800584 | G | A | [symbol] | CED84129 |
| X₂₇₃₄ | M3 | 69 | 1842064 | C | T | [symbol] | CED84140 |
| X₂₇₃₅ | M3 | 69 | 1854739 | G | A | [symbol] | CED84145 |
| X₂₇₃₆ | M3 | 69 | 1905120 | C | T | [symbol] | CED84166 |
| X₂₇₃₇ | M3 | 69 | 1924621 | C | T | [symbol] | CED84172 |
| X₂₇₃₈ | M3 | 69 | 1957485 | C | T | [symbol] | CED84187 |
| X₂₇₃₉ | M3 | 69 | 1967529 | C | T | [symbol] | CED84189 |
| X₂₇₄₀ | M3 | 69 | 1968848 | A | G | [symbol] | CED84189 |
| X₂₇₄₁ | M3 | 69 | 2001469 | C | T | [symbol] | CED84197 |
| X₂₇₄₂ | M3 | 69 | 2071540 | C | T | [symbol] | CED84226 |
| X₂₇₄₃ | M3 | 69 | 2156050 | C | T | [symbol] | CED84252 |
| X₂₇₄₄ | M3 | 69 | 2160207 | C | T | [symbol] | CED84255 |
| X₂₇₄₅ | M3 | 69 | 2165708 | G | A | [symbol] | CED84257 |
| X₂₇₄₆ | M3 | 69 | 2235113 | C | T | [symbol] | CED84274 |
| X₂₇₄₇ | M3 | 69 | 2260222 | C | T | [symbol] | CED84282 |
| X₂₇₄₈ | M3 | 69 | 2275703 | G | A | [symbol] | CED84290 |
| X₂₇₄₉ | M3 | 69 | 2421550 | C | T | [symbol] | CED84338 |
| X₂₇₅₀ | M3 | 69 | 2438727 | C | T | [symbol] | CED84343 |
| X₂₇₅₁ | M3 | 69 | 2483433 | G | A | [symbol] | CED84352 |
| X₂₇₅₂ | M3 | 72 | 93 | T | C | [symbol] | |
| X₂₇₅₃ | M3 | 72 | 584 | G | A | [symbol] | |
| X₂₇₅₄ | M3 | 72 | 856 | C | T | [symbol] | |
| X₂₇₅₅ | M3 | 72 | 1163 | C | T | [symbol] | |
| X₂₇₅₆ | M3 | 73 | 928 | C | T | [symbol] | CDZ96628 |
| X₂₇₅₇ | M3 | 75 | 451 | C | A | [symbol] | CDZ96630 |
| X₂₇₅₈ | M3 | 75 | 461 | T | C | [symbol] | CDZ96630 |
| X₂₇₅₉ | M3 | 77 | 7804 | T | A | [symbol] | CDZ96631 |
| X₂₇₆₀ | M3 | 77 | 18912 | A | G | [symbol] | CDZ96635 |
| X₂₇₆₁ | M3 | 77 | 34275 | A | G | [symbol] | CDZ96644 |
| X₂₇₆₂ | M3 | 77 | 34978 | G | T | [symbol] | CDZ96642 |
| X₂₇₆₃ | M3 | 77 | 37340 | A | G | [symbol] | CDZ96645 |
| X₂₇₆₄ | M3 | 77 | 39842 | G | A | [symbol] | CDZ96646 |
| X₂₇₆₅ | M3 | 77 | 65419 | G | A | [symbol] | CDZ96655 |
| X₂₇₆₆ | M3 | 77 | 84022 | G | A | [symbol] | CDZ96659 |
| X₂₇₆₇ | M3 | 78 | 1865 | C | T | [symbol] | CED84359 |
| X₂₇₆₈ | M3 | 78 | 6333 | G | A | [symbol] | CED84360 |
| X₂₇₆₉ | M3 | 78 | 26915 | C | T | [symbol] | CED84366 |
| X₂₇₇₀ | M3 | 78 | 89958 | C | T | [symbol] | CED84387 |
| X₂₇₇₁ | M3 | 78 | 158534 | G | A | [symbol] | CED84406 |
| X₂₇₇₂ | M3 | 78 | 203274 | G | A | [symbol] | CED84420 |
| X₂₇₇₃ | M3 | 78 | 238854 | C | T | [symbol] | CED84430 |
| X₂₇₇₄ | M3 | 78 | 262639 | C | T | [symbol] | CED84438 |
| X₂₇₇₅ | M3 | 78 | 262683 | G | A | [symbol] | CED84438 |
| X₂₇₇₆ | M3 | 78 | 263828 | T | C | [symbol] | CED84438 |
| X₂₇₇₇ | M3 | 78 | 263896 | T | C | [symbol] | CED84438 |
| X₂₇₇₈ | M3 | 78 | 281454 | C | A | [symbol] | CED84441 |
| X₂₇₇₉ | M3 | 78 | 292139 | A | T | [symbol] | CED84442 |
| X₂₇₈₀ | M3 | 78 | 298141 | C | G | [symbol] | CED84443 |
| X₂₇₈₁ | M3 | 78 | 299166 | G | A | [symbol] | CED84443 |
| X₂₇₈₂ | M3 | 78 | 299644 | G | A | [symbol] | CED84443 |
| X₂₇₈₃ | M3 | 78 | 333312 | A | G | [symbol] | CED84452 |
| X₂₇₈₄ | M3 | 78 | 386356 | C | T | [symbol] | CED84472 |
| X₂₇₈₅ | M3 | 78 | 415432 | G | A | [symbol] | CED84479 |
| X₂₇₈₆ | M3 | 78 | 439640 | C | T | [symbol] | CED84487 |
| X₂₇₈₇ | M3 | 78 | 440606 | C | T | [symbol] | CED84487 |
| X₂₇₈₈ | M3 | 78 | 506703 | G | A | [symbol] | CED84508 |
| X₂₇₈₉ | M3 | 78 | 587686 | G | A | [symbol] | CED84539 |
| X₂₇₉₀ | M3 | 78 | 715700 | G | A | [symbol] | CED84582 |
| X₂₇₉₁ | M3 | 78 | 718885 | C | T | [symbol] | CED84584 |
| X₂₇₉₂ | M3 | 78 | 720093 | G | A | [symbol] | CED84583 |
| X₂₇₉₃ | M3 | 78 | 763771 | G | A | [symbol] | CED84600 |
| X₂₇₉₄ | M3 | 78 | 774252 | G | A | [symbol] | CED84602 |
| X₂₇₉₅ | M3 | 78 | 875825 | C | T | [symbol] | CED84633 |
| X₂₇₉₆ | M3 | 78 | 918865 | C | T | [symbol] | CED84651 |
| X₂₇₉₇ | M3 | 78 | 939705 | G | A | [symbol] | CED84658 |
| X₂₇₉₈ | M3 | 78 | 952815 | G | A | [symbol] | CED84662 |
| X₂₇₉₉ | M3 | 78 | 952860 | G | A | [symbol] | CED84662 |
| X₂₈₀₀ | M3 | 78 | 976680 | C | T | [symbol] | CED84672 |
| X₂₈₀₁ | M3 | 78 | 976799 | C | T | [symbol] | CED84672 |
| X₂₈₀₂ | M3 | 78 | 1023381 | G | A | [symbol] | CED84688 |
| X₂₈₀₃ | M3 | 78 | 1067609 | G | A | [symbol] | CED84705 |
| X₂₈₀₄ | M3 | 78 | 1086537 | C | T | [symbol] | CED84713 |
| X₂₈₀₅ | M3 | 78 | 1108918 | C | T | [symbol] | CED84721 |
| X₂₈₀₆ | M3 | 78 | 1111002 | G | A | [symbol] | CED84721 |
| X₂₈₀₇ | M3 | 78 | 1115511 | G | A | [symbol] | CED84723 |
| X₂₈₀₈ | M3 | 78 | 1155093 | C | T | [symbol] | CED84732 |
| X₂₈₀₉ | M3 | 78 | 1213556 | G | A | [symbol] | CED84752 |
| X₂₈₁₀ | M3 | 78 | 1216573 | C | T | [symbol] | CED84752 |
| X₂₈₁₁ | M3 | 78 | 1247678 | C | T | [symbol] | CED84761 |
| X₂₈₁₂ | M3 | 78 | 1278982 | C | T | [symbol] | CED84773 |
| X₂₈₁₃ | M3 | 78 | 1300968 | C | T | [symbol] | CED84783 |
| X₂₈₁₄ | M3 | 78 | 1302286 | C | T | [symbol] | CED84782 |
| X₂₈₁₅ | M3 | 78 | 1315648 | C | T | [symbol] | CED84788 |
| X₂₈₁₆ | M3 | 78 | 1317124 | G | A | [symbol] | CED84787 |
| X₂₈₁₇ | M3 | 78 | 1344640 | C | T | [symbol] | CED84795 |
| X₂₈₁₈ | M3 | 78 | 1356873 | C | T | [symbol] | CED84800 |
| X₂₈₁₉ | M3 | 78 | 1376517 | G | A | [symbol] | CED84810 |
| X₂₈₂₀ | M3 | 78 | 1397982 | G | A | [symbol] | CED84818 |
| X₂₈₂₁ | M3 | 78 | 1406981 | C | T | [symbol] | CED84821 |
| X₂₈₂₂ | M3 | 78 | 1426722 | C | T | [symbol] | CED84829 |
| X₂₈₂₃ | M3 | 78 | 1475803 | G | A | [symbol] | CED84845 |
| X₂₈₂₄ | M3 | 78 | 1493542 | C | T | [symbol] | CED84851 |
| X₂₈₂₅ | M3 | 78 | 1568326 | C | T | [symbol] | CED84868 |
| X₂₈₂₆ | M3 | 78 | 1627007 | G | A | [symbol] | CED84885 |
| X₂₈₂₇ | M3 | 78 | 1642170 | G | A | [symbol] | CED84889 |
| X₂₈₂₈ | M3 | 78 | 1660408 | G | A | [symbol] | CED84897 |
| X₂₈₂₉ | M3 | 78 | 1674126 | G | A | [symbol] | CED84904 |
| X₂₈₃₀ | M3 | 78 | 1694684 | C | T | [symbol] | CED84912 |
| X₂₈₃₁ | M3 | 78 | 1721661 | G | A | [symbol] | CED84921 |
| X₂₈₃₂ | M3 | 78 | 1742796 | G | A | [symbol] | CED84926 |
| X₂₈₃₃ | M3 | 79 | 65 | G | A | [symbol] | CDZ96674 |
| X₂₈₃₄ | M3 | 79 | 133 | A | G | [symbol] | CDZ96674 |
| X₂₈₃₅ | M3 | 79 | 161 | T | C | [symbol] | CDZ96674 |
| X₂₈₃₆ | M3 | 79 | 36113 | C | T | [symbol] | CDZ96682 |
| X₂₈₃₇ | M3 | 79 | 57804 | G | A | [symbol] | CDZ96687 |
| X₂₈₃₈ | M3 | 79 | 64658 | C | T | [symbol] | CDZ96688 |
| X₂₈₃₉ | M3 | 79 | 71637 | C | T | [symbol] | CDZ96691 |
| X₂₈₄₀ | M3 | 79 | 132683 | C | T | [symbol] | CDZ96713 |
| X₂₈₄₁ | M3 | 79 | 168570 | C | T | [symbol] | CDZ96727 |
| X₂₈₄₂ | M3 | 79 | 255486 | C | T | [symbol] | CDZ96758 |
| X₂₈₄₃ | M3 | 79 | 307021 | C | T | [symbol] | CDZ96777 |
| X₂₈₄₄ | M3 | 79 | 324145 | C | T | [symbol] | CDZ96781 |
| X₂₈₄₅ | M3 | 79 | 345646 | G | A | [symbol] | CDZ96789 |
| X₂₈₄₆ | M3 | 79 | 346823 | G | A | [symbol] | CDZ96789 |
| X₂₈₄₇ | M3 | 79 | 394300 | C | T | [symbol] | CDZ96804 |
| X₂₈₄₈ | M3 | 79 | 409085 | C | T | [symbol] | CDZ96810 |
| X₂₈₄₉ | M3 | 79 | 492523 | C | T | [symbol] | CDZ96842 |
| X₂₈₅₀ | M3 | 79 | 509666 | C | T | [symbol] | CDZ96848 |
| X₂₈₅₁ | M3 | 79 | 575411 | C | T | [symbol] | CDZ96868 |
| X₂₈₅₂ | M3 | 79 | 579674 | G | A | [symbol] | CDZ96871 |
| X₂₈₅₃ | M3 | 79 | 604739 | G | A | [symbol] | CDZ96879 |
| X₂₈₅₄ | M3 | 79 | 617057 | C | T | [symbol] | CDZ96882 |
| X₂₈₅₅ | M3 | 79 | 679140 | C | T | [symbol] | CDZ96904 |
| X₂₈₅₆ | M3 | 79 | 686946 | C | T | [symbol] | CDZ96907 |
| X₂₈₅₇ | M3 | 79 | 696174 | G | A | [symbol] | CDZ96911 |
| X₂₈₅₈ | M3 | 79 | 735053 | T | C | [symbol] | CDZ96928 |
| X₂₈₅₉ | M3 | 79 | 747717 | A | G | [symbol] | CDZ96929 |
| X₂₈₆₀ | M3 | 79 | 748083 | G | T | [symbol] | CDZ96929 |
| X₂₈₆₁ | M3 | 79 | 758025 | G | A | [symbol] | CDZ96931 |
| X₂₈₆₂ | M3 | 79 | 758078 | T | C | [symbol] | CDZ96931 |
| X₂₈₆₃ | M3 | 79 | 759195 | T | A | [symbol] | CDZ96931 |
| X₂₈₆₄ | M3 | 79 | 759403 | C | T | [symbol] | CDZ96931 |
| X₂₈₆₅ | M3 | 79 | 759659 | G | A | [symbol] | CDZ96931 |
| X₂₈₆₆ | M3 | 79 | 760430 | T | C | [symbol] | CDZ96932 |
| X₂₈₆₇ | M3 | 79 | 760458 | G | T | [symbol] | CDZ96932 |
| X₂₈₆₈ | M3 | 79 | 760541 | A | G | [symbol] | CDZ96932 |
| X₂₈₆₉ | M3 | 79 | 760891 | A | G | [symbol] | CDZ96932 |
| X₂₈₇₀ | M3 | 79 | 760904 | T | C | [symbol] | CDZ96932 |
| X₂₈₇₁ | M3 | 79 | 761056 | T | C | [symbol] | CDZ96932 |
| X₂₈₇₂ | M3 | 79 | 768537 | A | G | [symbol] | CDZ96933 |
| X₂₈₇₃ | M3 | 79 | 771663 | T | G | [symbol] | CDZ96933 |
| X₂₈₇₄ | M3 | 79 | 786064 | A | G | [symbol] | CDZ96934 |
| X₂₈₇₅ | M3 | 79 | 798799 | C | T | [symbol] | CDZ96939 |
| X₂₈₇₆ | M3 | 79 | 864204 | C | T | [symbol] | CDZ96959 |
| X₂₈₇₇ | M3 | 79 | 874161 | G | A | [symbol] | CDZ96965 |
| X₂₈₇₈ | M3 | 79 | 933234 | G | A | [symbol] | CDZ96987 |
| X₂₈₇₉ | M3 | 79 | 940003 | C | T | [symbol] | CDZ96991 |
| X₂₈₈₀ | M3 | 79 | 1000786 | A | G | [symbol] | CDZ97007 |
| X₂₈₈₁ | M3 | 79 | 1044652 | G | A | [symbol] | CDZ97023 |
| X₂₈₈₂ | M3 | 79 | 1069426 | C | T | [symbol] | CDZ97032 |
| X₂₈₈₃ | M3 | 79 | 1082233 | G | A | [symbol] | CDZ97037 |
| X₂₈₈₄ | M3 | 79 | 1118598 | C | T | [symbol] | CDZ97048 |
| X₂₈₈₅ | M3 | 79 | 1123288 | C | T | [symbol] | CDZ97049 |
| X₂₈₈₆ | M3 | 79 | 1140763 | G | A | [symbol] | CDZ97053 |
| X₂₈₈₇ | M3 | 79 | 1149291 | G | A | [symbol] | CDZ97056 |
| X₂₈₈₈ | M3 | 79 | 1211985 | G | A | [symbol] | CDZ97077 |
| X₂₈₈₉ | M3 | 79 | 1229129 | G | A | [symbol] | CDZ97086 |
| X₂₈₉₀ | M3 | 79 | 1231740 | C | T | [symbol] | CDZ97087 |
| X₂₈₉₁ | M3 | 79 | 1265502 | C | T | [symbol] | CDZ97100 |
| X₂₈₉₂ | M3 | 79 | 1279548 | G | A | [symbol] | CDZ97105 |
| X₂₈₉₃ | M3 | 79 | 1318034 | C | T | [symbol] | CDZ97117 |
| X₂₈₉₄ | M3 | 79 | 1336766 | C | T | [symbol] | CDZ97121 |
| X₂₈₉₅ | M3 | 79 | 1371491 | C | T | [symbol] | CDZ97129 |
| X₂₈₉₆ | M3 | 79 | 1394034 | G | A | [symbol] | CDZ97137 |
| X₂₈₉₇ | M3 | 79 | 1410287 | C | T | [symbol] | CDZ97145 |
| X₂₈₉₈ | M3 | 79 | 1410481 | G | A | [symbol] | CDZ97145 |
| X₂₈₉₉ | M3 | 79 | 1430954 | G | A | [symbol] | CDZ97152 |
| X₂₉₀₀ | M3 | 79 | 1540205 | C | T | [symbol] | CDZ97186 |
| X₂₉₀₁ | M3 | 79 | 1556423 | C | T | [symbol] | CDZ97191 |
| X₂₉₀₂ | M3 | 79 | 1624415 | G | A | [symbol] | CDZ97217 |
| X₂₉₀₃ | M3 | 79 | 1651212 | C | T | [symbol] | CDZ97224 |
| X₂₉₀₄ | M3 | 79 | 1674448 | G | A | [symbol] | CDZ97228 |
| X₂₉₀₅ | M3 | 79 | 1788096 | G | A | [symbol] | CDZ97262 |
| X₂₉₀₆ | M3 | 79 | 1791482 | G | A | [symbol] | CDZ97263 |
| X₂₉₀₇ | M3 | 79 | 1797660 | C | T | [symbol] | CDZ97265 |
| X₂₉₀₈ | M3 | 79 | 1797676 | G | A | [symbol] | CDZ97265 |
| X₂₉₀₉ | M3 | 79 | 1809211 | C | T | [symbol] | CDZ97268 |
| X₂₉₁₀ | M3 | 79 | 1842448 | G | A | [symbol] | CDZ97282 |
| X₂₉₁₁ | M3 | 79 | 1842834 | G | A | [symbol] | CDZ97282 |
| X₂₉₁₂ | M3 | 79 | 1850295 | G | A | [symbol] | CDZ97285 |
| X₂₉₁₃ | M3 | 79 | 1855037 | A | G | [symbol] | CDZ97285 |
| X₂₉₁₄ | M3 | 79 | 1859220 | A | G | [symbol] | CDZ97291 |
| X₂₉₁₅ | M3 | 79 | 1877329 | G | A | [symbol] | CDZ97295 |
| X₂₉₁₆ | M3 | 79 | 1930688 | G | A | [symbol] | CDZ97315 |
| X₂₉₁₇ | M3 | 79 | 1990424 | G | A | [symbol] | CDZ97334 |
| X₂₉₁₈ | M3 | 79 | 2013361 | C | T | [symbol] | CDZ97344 |
| X₂₉₁₉ | M3 | 79 | 2066016 | C | T | [symbol] | CDZ97366 |
| X₂₉₂₀ | M3 | 79 | 2115870 | G | A | [symbol] | CDZ97380 |
| X₂₉₂₁ | M3 | 79 | 2121041 | G | A | [symbol] | CDZ97380 |
| X₂₉₂₂ | M3 | 79 | 2152573 | C | T | [symbol] | CDZ97392 |
| X₂₉₂₃ | M3 | 79 | 2172085 | C | T | [symbol] | CDZ97397 |
| X₂₉₂₄ | M3 | 79 | 2179936 | G | A | [symbol] | CDZ97402 |
| X₂₉₂₅ | M3 | 79 | 2188410 | G | A | [symbol] | CDZ97405 |
| X₂₉₂₆ | M3 | 79 | 2268540 | C | T | [symbol] | CDZ97435 |
| X₂₉₂₇ | M3 | 79 | 2315869 | A | C | [symbol] | CDZ97452 |
| X₂₉₂₈ | M3 | 79 | 2323713 | C | T | [symbol] | CDZ97455 |
| X₂₉₂₉ | M3 | 79 | 2339881 | C | G | [symbol] | CDZ97460 |
| X₂₉₃₀ | M3 | 79 | 2340326 | G | A | [symbol] | CDZ97462 |
| X₂₉₃₁ | M3 | 85 | 421 | G | A | [symbol] | |
| X₂₉₃₂ | M3 | 85 | 425 | C | T | [symbol] | |
| X₂₉₃₃ | M3 | 85 | 462 | G | A | [symbol] | |
| X₂₉₃₄ | M3 | 85 | 463 | A | G | [symbol] | |
| X₂₉₃₅ | M3 | 85 | 467 | A | T | [symbol] | |
| X₂₉₃₆ | M3 | 85 | 512 | A | G | [symbol] | |
| X₂₉₃₇ | M3 | 85 | 516 | G | A | [symbol] | |
| X₂₉₃₈ | M3 | 85 | 521 | C | T | [symbol] | |
| X₂₉₃₉ | M3 | 85 | 522 | A | G | [symbol] | |
| X₂₉₄₀ | M3 | 86 | 230 | A | G | [symbol] | |
| X₂₉₄₁ | M3 | 88 | 119 | C | T | [symbol] | CDZ97464 |
| X₂₉₄₂ | M3 | 88 | 196 | G | A | [symbol] | CDZ97464 |
| X₂₉₄₃ | M3 | 88 | 898 | C | T | [symbol] | CDZ97464 |
| X₂₉₄₄ | M3 | 99 | 245 | G | A | [symbol] | |
| X₂₉₄₅ | M3 | 103 | 768 | C | T | [symbol] | |
| X₂₉₄₆ | M3 | 106 | 278 | A | G | [symbol] | |
| X₂₉₄₇ | M3 | 109 | 396 | T | C | [symbol] | |
| X₂₉₄₈ | M3 | 118 | 396 | C | T | [symbol] | CDZ97478 |
| X₂₉₄₉ | M3 | 118 | 870 | G | A | [symbol] | CDZ97478 |
| X₂₉₅₀ | M3 | 118 | 1491 | G | A | [symbol] | CDZ97478 |
| X₂₉₅₁ | M3 | 121 | 907 | T | C | [symbol] | |
| X₂₉₅₂ | M3 | 121 | 1402 | C | G | [symbol] | |
| X₂₉₅₃ | M3 | 124 | 69730 | G | A | [symbol] | CDZ97501 |
| X₂₉₅₄ | M3 | 124 | 72117 | G | A | [symbol] | CDZ97501 |
| X₂₉₅₅ | M3 | 124 | 72760 | G | A | [symbol] | CDZ97501 |
| X₂₉₅₆ | M3 | 124 | 80266 | C | T | [symbol] | CDZ97504 |
| X₂₉₅₇ | M3 | 124 | 94611 | G | A | [symbol] | CDZ97507 |
| X₂₉₅₈ | M3 | 124 | 156052 | G | A | [symbol] | CDZ97524 |
| X₂₉₅₉ | M3 | 124 | 194455 | C | T | [symbol] | CDZ97538 |
| X₂₉₆₀ | M3 | 124 | 222249 | C | T | [symbol] | CDZ97547 |
| X₂₉₆₁ | M3 | 125 | 35864 | T | C | [symbol] | CDZ97573 |
| X₂₉₆₂ | M3 | 129 | 299 | G | A | [symbol] | CDZ97577 |
| X₂₉₆₃ | M3 | 129 | 433 | G | A | [symbol] | CDZ97577 |
| X₂₉₆₄ | M3 | 129 | 856 | G | A | [symbol] | CDZ97577 |
| X₂₉₆₅ | M3 | 129 | 1013 | C | T | [symbol] | CDZ97577 |
| X₂₉₆₆ | M3 | 130 | 674 | C | T | [symbol] | CDZ97578 |
| X₂₉₆₇ | M3 | 141 | 5649 | C | T | [symbol] | CDZ97582 |
| X₂₉₆₈ | M3 | 141 | 10162 | G | A | [symbol] | CDZ97582 |
| X₂₉₆₉ | M3 | 141 | 15764 | C | T | [symbol] | CDZ97587 |
| X₂₉₇₀ | M3 | 141 | 17894 | G | A | [symbol] | CDZ97587 |
| X₂₉₇₁ | M3 | 141 | 29260 | G | A | [symbol] | CDZ97594 |
| X₂₉₇₂ | M3 | 149 | 2074 | T | G | [symbol] | CDZ97598 |
| X₂₉₇₃ | M3 | 149 | 2453 | C | T | [symbol] | CDZ97598 |
| X₂₉₇₄ | M3 | 159 | 106 | A | C | [symbol] | |
| X₂₉₇₅ | M3 | 162 | 70025 | C | T | [symbol] | CDZ97625 |
| X₂₉₇₆ | M3 | 162 | 70405 | A | G | [symbol] | CDZ97625 |
| X₂₉₇₇ | M3 | 162 | 93443 | G | A | [symbol] | CDZ97631 |
| X₂₉₇₈ | M3 | 162 | 96194 | G | A | [symbol] | CDZ97631 |
| X₂₉₇₉ | M3 | 162 | 223407 | C | T | [symbol] | CDZ97674 |
| X₂₉₈₀ | M3 | 162 | 227242 | G | A | [symbol] | CDZ97674 |
| X₂₉₈₁ | M3 | 162 | 230526 | C | T | [symbol] | CDZ97676 |
| X₂₉₈₂ | M3 | 162 | 291566 | G | A | [symbol] | CDZ97695 |
| X₂₉₈₃ | M3 | 162 | 308369 | T | C | [symbol] | CDZ97702 |
| X₂₉₈₄ | M3 | 162 | 321070 | C | T | [symbol] | CDZ97703 |
| X₂₉₈₅ | M3 | 162 | 321073 | A | G | [symbol] | CDZ97703 |
| X₂₉₈₆ | M3 | 162 | 321460 | C | G | [symbol] | CDZ97703 |
| X₂₉₈₇ | M3 | 162 | 321463 | A | C | [symbol] | CDZ97703 |
| X₂₉₈₈ | M3 | 162 | 322591 | G | A | [symbol] | CDZ97703 |
| X₂₉₈₉ | M3 | 162 | 323448 | T | G | [symbol] | CDZ97703 |
| X₂₉₉₀ | M3 | 162 | 323451 | T | G | [symbol] | CDZ97703 |
| X₂₉₉₁ | M3 | 162 | 323480 | T | C | [symbol] | CDZ97703 |
| X₂₉₉₂ | M3 | 162 | 323735 | A | G | [symbol] | CDZ97703 |
| X₂₉₉₃ | M3 | 162 | 324114 | T | C | [symbol] | CDZ97703 |
| X₂₉₉₄ | M3 | 162 | 324139 | C | T | [symbol] | CDZ97703 |
| X₂₉₉₅ | M3 | 162 | 324568 | A | G | [symbol] | CDZ97703 |
| X₂₉₉₆ | M3 | 162 | 341717 | G | A | [symbol] | CDZ97707 |
| X₂₉₉₇ | M3 | 162 | 351016 | C | T | [symbol] | CDZ97711 |
| X₂₉₉₈ | M3 | 162 | 360320 | G | A | [symbol] | CDZ97714 |
| X₂₉₉₉ | M3 | 162 | 423180 | C | T | [symbol] | CDZ97740 |
| X₃₀₀₀ | M3 | 162 | 424391 | C | T | [symbol] | CDZ97740 |
| X₃₀₀₁ | M3 | 162 | 444123 | T | C | [symbol] | CDZ97748 |
| X₃₀₀₂ | M3 | 162 | 456498 | C | T | [symbol] | CDZ97752 |
| X₃₀₀₃ | M3 | 162 | 467207 | C | T | [symbol] | CDZ97755 |
| X₃₀₀₄ | M3 | 162 | 476928 | C | T | [symbol] | CDZ97760 |
| X₃₀₀₅ | M3 | 162 | 491906 | G | A | [symbol] | CDZ97764 |
| X₃₀₀₆ | M3 | 162 | 492078 | G | A | [symbol] | CDZ97764 |
| X₃₀₀₇ | M3 | 162 | 492101 | G | A | [symbol] | CDZ97764 |
| X₃₀₀₈ | M3 | 162 | 501886 | C | T | [symbol] | CDZ97769 |
| X₃₀₀₉ | M3 | 162 | 632311 | G | A | [symbol] | CDZ97814 |
| X₃₀₁₀ | M3 | 162 | 633321 | G | A | [symbol] | CDZ97814 |
| X₃₀₁₁ | M3 | 162 | 633633 | G | A | [symbol] | CDZ97814 |
| X₃₀₁₂ | M3 | 162 | 640005 | C | T | [symbol] | CDZ97815 |
| X₃₀₁₃ | M3 | 162 | 645194 | G | A | [symbol] | CDZ97815 |
| X₃₀₁₄ | M3 | 162 | 674192 | C | T | [symbol] | CDZ97824 |
| X₃₀₁₅ | M3 | 162 | 738675 | G | A | [symbol] | CDZ97842 |
| X₃₀₁₆ | M3 | 162 | 738686 | C | T | [symbol] | CDZ97842 |
| X₃₀₁₇ | M3 | 162 | 792386 | G | A | [symbol] | CDZ97863 |
| X₃₀₁₈ | M3 | 162 | 801198 | C | T | [symbol] | CDZ97864 |
| X₃₀₁₉ | M3 | 162 | 808830 | G | A | [symbol] | CDZ97869 |
| X₃₀₂₀ | M3 | 162 | 848369 | G | A | [symbol] | CDZ97884 |
| X₃₀₂₁ | M3 | 162 | 871911 | C | T | [symbol] | CDZ97890 |
| X₃₀₂₂ | M3 | 162 | 885927 | C | T | [symbol] | CDZ97896 |
| X₃₀₂₃ | M3 | 162 | 966019 | C | T | [symbol] | CDZ97923 |
| X₃₀₂₄ | M3 | 162 | 972973 | G | A | [symbol] | CDZ97925 |
| X₃₀₂₅ | M3 | 175 | 385 | A | C | [symbol] | |
| X₃₀₂₆ | M3 | 189 | 32 | G | A | [symbol] | CDZ97960 |
| X₃₀₂₇ | M3 | 189 | 108326 | C | T | [symbol] | CDZ97991 |
| X₃₀₂₈ | M3 | 189 | 126573 | G | A | [symbol] | CDZ97996 |
| X₃₀₂₉ | M3 | 189 | 127854 | C | T | [symbol] | CDZ97998 |
| X₃₀₃₀ | M3 | 189 | 174918 | G | A | [symbol] | CDZ98015 |
| X₃₀₃₁ | M3 | 189 | 194647 | A | G | [symbol] | CDZ98020 |
| X₃₀₃₂ | M3 | 189 | 194665 | A | G | [symbol] | CDZ98020 |
| X₃₀₃₃ | M3 | 189 | 298487 | C | T | [symbol] | CDZ98056 |
| X₃₀₃₄ | M3 | 189 | 323680 | C | T | [symbol] | CDZ98063 |
| X₃₀₃₅ | M3 | 189 | 371247 | G | A | [symbol] | CDZ98078 |
| X₃₀₃₆ | M3 | 189 | 394551 | C | T | [symbol] | CDZ98085 |
| X₃₀₃₇ | M3 | 189 | 452298 | G | A | [symbol] | CDZ98106 |
| X₃₀₃₈ | M3 | 191 | 342 | A | G | [symbol] | CDZ98107 |
| X₃₀₃₉ | M3 | 191 | 347 | C | T | [symbol] | CDZ98107 |
| X₃₀₄₀ | M3 | 191 | 427 | C | T | [symbol] | CDZ98107 |
| X₃₀₄₁ | M3 | 191 | 451 | C | T | [symbol] | CDZ98107 |
| X₃₀₄₂ | M3 | 191 | 487 | A | G | [symbol] | CDZ98107 |
| X₃₀₄₃ | M3 | 197 | 624 | C | T | [symbol] | CDZ98111 |
| X₃₀₄₄ | M3 | 198 | 202 | C | A | [symbol] | |
| X₃₀₄₅ | M3 | 198 | 203 | G | A | [symbol] | |
| X₃₀₄₆ | M3 | 198 | 238 | C | T | [symbol] | |
| X₃₀₄₇ | M3 | 198 | 265 | C | T | [symbol] | |
| X₃₀₄₈ | M3 | 199 | 688 | C | T | [symbol] | |
| X₃₀₄₉ | M3 | 199 | 911 | C | T | [symbol] | |
| X₃₀₅₀ | M3 | 199 | 971 | C | T | [symbol] | |
| X₃₀₅₁ | M3 | 199 | 1218 | C | T | [symbol] | |
| X₃₀₅₂ | M3 | 202 | 171 | C | T | [symbol] | |
| X₃₀₅₃ | M3 | 205 | 360 | C | T | [symbol] | CDZ98112 |
| X₃₀₅₄ | M3 | 205 | 981 | C | T | [symbol] | CDZ98112 |
| X₃₀₅₅ | M3 | 208 | 117 | G | A | [symbol] | |
| X₃₀₅₆ | M3 | 208 | 476 | G | A | [symbol] | |
| X₃₀₅₇ | M3 | 208 | 616 | G | A | [symbol] | |
| X₃₀₅₈ | M3 | 208 | 935 | G | A | [symbol] | |
| X₃₀₅₉ | M3 | 209 | 312 | C | T | [symbol] | CDZ98113 |
| X₃₀₆₀ | M3 | 223 | 93 | G | A | [symbol] | CDZ98118 |
| X₃₀₆₁ | M3 | 223 | 102 | A | G | [symbol] | CDZ98118 |
| X₃₀₆₂ | M3 | 223 | 133 | A | G | [symbol] | CDZ98118 |
| X₃₀₆₃ | M3 | 223 | 150 | T | C | [symbol] | CDZ98118 |
| X₃₀₆₄ | M3 | 223 | 155 | A | C | [symbol] | CDZ98118 |
| X₃₀₆₅ | M3 | 223 | 158 | T | C | [symbol] | CDZ98118 |
| X₃₀₆₆ | M3 | 223 | 160 | C | T | [symbol] | CDZ98118 |
| X₃₀₆₇ | M3 | 223 | 175 | G | A | [symbol] | CDZ98118 |
| X₃₀₆₈ | M3 | 223 | 177 | A | G | [symbol] | CDZ98118 |
| X₃₀₆₉ | M3 | 223 | 188 | A | G | [symbol] | CDZ98118 |
| X₃₀₇₀ | M3 | 223 | 192 | C | A | [symbol] | CDZ98118 |
| X₃₀₇₁ | M3 | 223 | 194 | T | C | [symbol] | CDZ98118 |
| X₃₀₇₂ | M3 | 223 | 195 | T | G | [symbol] | CDZ98118 |
| X₃₀₇₃ | M3 | 223 | 197 | T | C | [symbol] | CDZ98118 |
| X₃₀₇₄ | M3 | 223 | 202 | G | C | [symbol] | CDZ98118 |
| X₃₀₇₅ | M3 | 223 | 205 | C | T | [symbol] | CDZ98118 |
| X₃₀₇₆ | M3 | 223 | 291 | C | A | [symbol] | CDZ98118 |
| X₃₀₇₇ | M3 | 223 | 360 | C | T | [symbol] | CDZ98118 |
| X₃₀₇₈ | M3 | 225 | 317 | C | T | [symbol] | |
| X₃₀₇₉ | M3 | 227 | 202 | G | A | [symbol] | |
| X₃₀₈₀ | M3 | 229 | 225 | G | C | [symbol] | |
| X₃₀₈₁ | M3 | 232 | 340 | G | A | [symbol] | CDZ98119 |
| X₃₀₈₂ | M3 | 232 | 1379 | C | T | [symbol] | CDZ98119 |
| X₃₀₈₃ | M3 | 232 | 1521 | C | T | [symbol] | CDZ98119 |
| X₃₀₈₄ | M3 | 232 | 1662 | G | A | [symbol] | CDZ98119 |
| X₃₀₈₅ | M3 | 232 | 1761 | C | T | [symbol] | CDZ98119 |
| X₃₀₈₆ | M3 | 232 | 2027 | C | T | [symbol] | CDZ98119 |
| X₃₀₈₇ | M3 | 232 | 3060 | C | T | [symbol] | CDZ98120 |
| X₃₀₈₈ | M3 | 232 | 3284 | C | T | [symbol] | CDZ98119 |
| X₃₀₈₉ | M3 | 232 | 4437 | G | A | [symbol] | CDZ98121 |
| X₃₀₉₀ | M3 | 232 | 4561 | C | T | [symbol] | CDZ98120 |
| X₃₀₉₁ | M3 | 242 | 7334 | C | T | [symbol] | CDZ98125 |
| X₃₀₉₂ | M3 | 242 | 41710 | G | A | [symbol] | CDZ98131 |
| X₃₀₉₃ | M3 | 242 | 50262 | G | A | [symbol] | CDZ98135 |
| X₃₀₉₄ | M3 | 242 | 107587 | G | A | [symbol] | CDZ98153 |
| X₃₀₉₅ | M3 | 242 | 125424 | C | T | [symbol] | CDZ98159 |
| X₃₀₉₆ | M3 | 242 | 150461 | C | T | [symbol] | CDZ98164 |
| X₃₀₉₇ | M3 | 242 | 168689 | G | A | [symbol] | CDZ98172 |
| X₃₀₉₈ | M3 | 242 | 189498 | G | A | [symbol] | CDZ98176 |
| X₃₀₉₉ | M3 | 242 | 194983 | C | T | [symbol] | CDZ98179 |
| X₃₁₀₀ | M3 | 242 | 213986 | G | A | [symbol] | CDZ98185 |
| X₃₁₀₁ | M3 | 242 | 219778 | C | T | [symbol] | CDZ98187 |
| X₃₁₀₂ | M3 | 242 | 220015 | G | A | [symbol] | CDZ98187 |
| X₃₁₀₃ | M3 | 242 | 227271 | C | T | [symbol] | CDZ98191 |
| X₃₁₀₄ | M3 | 242 | 233088 | G | A | [symbol] | CDZ98193 |
| X₃₁₀₅ | M3 | 242 | 233141 | G | A | [symbol] | CDZ98193 |
| X₃₁₀₆ | M3 | 242 | 310353 | G | A | [symbol] | CDZ98216 |
| X₃₁₀₇ | M3 | 242 | 342570 | C | T | [symbol] | CDZ98229 |
| X₃₁₀₈ | M3 | 242 | 363677 | G | A | [symbol] | CDZ98233 |
| X₃₁₀₉ | M3 | 242 | 376713 | G | A | [symbol] | CDZ98238 |
| X₃₁₁₀ | M3 | 242 | 404132 | G | A | [symbol] | CDZ98248 |
| X₃₁₁₁ | M3 | 242 | 412676 | G | A | [symbol] | CDZ98249 |
| X₃₁₁₂ | M3 | 242 | 437941 | G | A | [symbol] | CDZ98258 |
| X₃₁₁₃ | M3 | 242 | 472562 | C | T | [symbol] | CDZ98266 |
| X₃₁₁₄ | M3 | 242 | 485936 | G | A | [symbol] | CDZ98270 |
| X₃₁₁₅ | M3 | 242 | 492389 | G | A | [symbol] | CDZ98274 |
| X₃₁₁₆ | M3 | 242 | 514780 | C | T | [symbol] | CDZ98282 |
| X₃₁₁₇ | M3 | 242 | 542663 | G | A | [symbol] | CDZ98290 |
| X₃₁₁₈ | M3 | 242 | 559999 | G | A | [symbol] | CDZ98297 |
| X₃₁₁₉ | M3 | 242 | 570416 | G | A | [symbol] | CDZ98299 |
| X₃₁₂₀ | M3 | 242 | 577367 | G | A | [symbol] | CDZ98302 |
| X₃₁₂₁ | M3 | 242 | 602456 | G | A | [symbol] | CDZ98308 |
| X₃₁₂₂ | M3 | 242 | 602531 | G | A | [symbol] | CDZ98308 |
| X₃₁₂₃ | M3 | 242 | 604704 | C | T | [symbol] | CDZ98309 |
| X₃₁₂₄ | M3 | 242 | 641669 | G | A | [symbol] | CDZ98323 |
| X₃₁₂₅ | M3 | 242 | 649715 | G | A | [symbol] | CDZ98326 |
| X₃₁₂₆ | M3 | 246 | 329 | C | G | [symbol] | CDZ98328 |
| X₃₁₂₇ | M3 | 246 | 331 | T | C | [symbol] | CDZ98328 |
| X₃₁₂₈ | M3 | 249 | 2757 | C | T | [symbol] | CED84929 |
| X₃₁₂₉ | M3 | 249 | 2763 | A | T | [symbol] | CED84929 |
| X₃₁₃₀ | M3 | 249 | 5307 | C | T | [symbol] | CED84929 |
| X₃₁₃₁ | M3 | 249 | 72016 | C | T | [symbol] | CED84950 |
| X₃₁₃₂ | M3 | 249 | 123789 | C | T | [symbol] | CED84972 |
| X₃₁₃₃ | M3 | 249 | 157550 | C | T | [symbol] | CED84983 |
| X₃₁₃₄ | M3 | 249 | 191304 | C | T | [symbol] | CED84988 |
| X₃₁₃₅ | M3 | 249 | 253494 | C | T | [symbol] | CED85008 |
| X₃₁₃₆ | M3 | 249 | 272075 | C | T | [symbol] | CED85013 |
| X₃₁₃₇ | M3 | 249 | 289154 | C | T | [symbol] | CED85018 |
| X₃₁₃₈ | M3 | 249 | 294161 | G | A | [symbol] | CED85018 |
| X₃₁₃₉ | M3 | 249 | 294853 | C | T | [symbol] | CED85019 |
| X₃₁₄₀ | M3 | 249 | 305975 | G | A | [symbol] | CED85023 |
| X₃₁₄₁ | M3 | 249 | 326271 | C | T | [symbol] | CED85029 |
| X₃₁₄₂ | M3 | 249 | 342990 | G | A | [symbol] | CED85036 |
| X₃₁₄₃ | M3 | 249 | 445429 | G | A | [symbol] | CED85075 |
| X₃₁₄₄ | M3 | 249 | 469645 | G | A | [symbol] | CED85087 |
| X₃₁₄₅ | M3 | 249 | 476060 | A | G | [symbol] | CED85088 |
| X₃₁₄₆ | M3 | 249 | 485782 | C | T | [symbol] | CED85089 |
| X₃₁₄₇ | M3 | 249 | 487588 | G | A | [symbol] | CED85090 |
| X₃₁₄₈ | M3 | 249 | 500195 | C | T | [symbol] | CED85093 |
| X₃₁₄₉ | M3 | 249 | 501310 | C | T | [symbol] | CED85093 |
| X₃₁₅₀ | M3 | 249 | 501510 | T | C | [symbol] | CED85093 |
| X₃₁₅₁ | M3 | 249 | 532943 | A | G | [symbol] | CED85099 |
| X₃₁₅₂ | M3 | 249 | 565916 | C | T | [symbol] | CED85113 |
| X₃₁₅₃ | M3 | 249 | 571922 | C | T | [symbol] | CED85115 |
| X₃₁₅₄ | M3 | 249 | 576070 | G | A | [symbol] | CED85118 |
| X₃₁₅₅ | M3 | 249 | 598579 | C | T | [symbol] | CED85125 |
| X₃₁₅₆ | M3 | 249 | 634793 | A | G | [symbol] | CED85133 |
| X₃₁₅₇ | M3 | 249 | 637944 | G | A | [symbol] | CED85135 |
| X₃₁₅₈ | M3 | 249 | 660408 | G | A | [symbol] | CED85144 |
| X₃₁₅₉ | M3 | 249 | 854220 | G | A | [symbol] | CED85201 |
| X₃₁₆₀ | M3 | 249 | 889853 | G | A | [symbol] | CED85211 |
| X₃₁₆₁ | M3 | 249 | 911274 | C | T | [symbol] | CED85218 |
| X₃₁₆₂ | M3 | 249 | 932606 | C | T | [symbol] | CED85223 |
| X₃₁₆₃ | M3 | 249 | 934305 | G | A | [symbol] | CED85225 |
| X₃₁₆₄ | M3 | 249 | 935435 | C | T | [symbol] | CED85225 |
| X₃₁₆₅ | M3 | 249 | 945434 | C | T | [symbol] | CED85227 |
| X₃₁₆₆ | M3 | 249 | 945727 | C | T | [symbol] | CED85227 |
| X₃₁₆₇ | M3 | 249 | 969333 | G | T | [symbol] | CED85238 |
| X₃₁₆₈ | M3 | 249 | 972975 | G | A | [symbol] | CED85240 |
| X₃₁₆₉ | M3 | 249 | 977170 | C | T | [symbol] | CED85242 |
| X₃₁₇₀ | M3 | 249 | 989520 | C | T | [symbol] | CED85243 |
| X₃₁₇₁ | M3 | 249 | 1014098 | C | T | [symbol] | CED85252 |
| X₃₁₇₂ | M3 | 249 | 1088841 | T | C | [symbol] | CED85274 |
| X₃₁₇₃ | M3 | 249 | 1116964 | G | A | [symbol] | CED85283 |
| X₃₁₇₄ | M3 | 249 | 1144309 | G | A | [symbol] | CED85291 |
| X₃₁₇₅ | M3 | 249 | 1155955 | C | T | [symbol] | CED85297 |
| X₃₁₇₆ | M3 | 249 | 1176977 | G | A | [symbol] | CED85303 |
| X₃₁₇₇ | M3 | 249 | 1195367 | G | A | [symbol] | CED85307 |
| X₃₁₇₈ | M3 | 249 | 1209489 | C | T | [symbol] | CED85313 |
| X₃₁₇₉ | M3 | 249 | 1230068 | C | T | [symbol] | CED85319 |
| X₃₁₈₀ | M3 | 249 | 1286733 | G | A | [symbol] | CED85336 |
| X₃₁₈₁ | M3 | 249 | 1299472 | C | T | [symbol] | CED85343 |
| X₃₁₈₂ | M3 | 249 | 1310059 | C | T | [symbol] | CED85346 |
| X₃₁₈₃ | M3 | 249 | 1473930 | C | T | [symbol] | CED85404 |
| X₃₁₈₄ | M3 | 249 | 1473937 | G | A | [symbol] | CED85404 |
| X₃₁₈₅ | M3 | 249 | 1486325 | G | A | [symbol] | CED85409 |
| X₃₁₈₆ | M3 | 249 | 1498029 | T | C | [symbol] | CED85415 |
| X₃₁₈₇ | M3 | 249 | 1498884 | T | C | [symbol] | CED85414 |
| X₃₁₈₈ | M3 | 249 | 1499008 | A | G | [symbol] | CED85415 |
| X₃₁₈₉ | M3 | 249 | 1502631 | G | T | [symbol] | CED85416 |
| X₃₁₉₀ | M3 | 249 | 1502641 | T | A | [symbol] | CED85416 |
| X₃₁₉₁ | M3 | 249 | 1502819 | T | G | [symbol] | CED85416 |
| X₃₁₉₂ | M3 | 249 | 1505138 | G | A | [symbol] | CED85416 |
| X₃₁₉₃ | M3 | 249 | 1505634 | T | G | [symbol] | CED85416 |
| X₃₁₉₄ | M3 | 249 | 1519431 | A | G | [symbol] | CED85419 |
| X₃₁₉₅ | M3 | 249 | 1523260 | C | T | [symbol] | CED85419 |
| X₃₁₉₆ | M3 | 249 | 1599907 | C | T | [symbol] | CED85444 |
| X₃₁₉₇ | M3 | 249 | 1619036 | G | A | [symbol] | CED85450 |
| X₃₁₉₈ | M3 | 249 | 1623151 | G | A | [symbol] | CED85451 |
| X₃₁₉₉ | M3 | 249 | 1653615 | T | G | [symbol] | CED85457 |
| X₃₂₀₀ | M3 | 249 | 1653962 | C | T | [symbol] | CED85458 |
| X₃₂₀₁ | M3 | 249 | 1666185 | C | T | [symbol] | CED85460 |
| X₃₂₀₂ | M3 | 249 | 1726777 | C | T | [symbol] | CED85474 |
| X₃₂₀₃ | M3 | 249 | 1760715 | C | T | [symbol] | CED85489 |
| X₃₂₀₄ | M3 | 249 | 1769706 | A | G | [symbol] | CED85490 |
| X₃₂₀₅ | M3 | 249 | 1780551 | A | G | [symbol] | CED85493 |
| X₃₂₀₆ | M3 | 249 | 1780569 | A | G | [symbol] | CED85493 |
| X₃₂₀₇ | M3 | 249 | 1801965 | G | A | [symbol] | CED85501 |
| X₃₂₀₈ | M3 | 249 | 1803575 | C | T | [symbol] | CED85502 |
| X₃₂₀₉ | M3 | 249 | 1804835 | G | A | [symbol] | CED85502 |
| X₃₂₁₀ | M3 | 249 | 1880762 | G | A | [symbol] | CED85525 |
| X₃₂₁₁ | M3 | 249 | 1944026 | G | A | [symbol] | CED85545 |
| X₃₂₁₂ | M3 | 249 | 1981230 | G | A | [symbol] | CED85557 |
| X₃₂₁₃ | M3 | 249 | 1988505 | C | T | [symbol] | CED85560 |
| X₃₂₁₄ | M3 | 249 | 2015272 | G | A | [symbol] | CED85567 |
| X₃₂₁₅ | M3 | 249 | 2027477 | G | A | [symbol] | CED85573 |
| X₃₂₁₆ | M3 | 249 | 2047401 | C | T | [symbol] | CED85581 |
| X₃₂₁₇ | M3 | 249 | 2110956 | C | T | [symbol] | CED85603 |
| X₃₂₁₈ | M3 | 249 | 2163304 | G | A | [symbol] | CED85618 |
| X₃₂₁₉ | M3 | 249 | 2167664 | G | A | [symbol] | CED85620 |
| X₃₂₂₀ | M3 | 249 | 2178506 | G | A | [symbol] | CED85622 |
| X₃₂₂₁ | M3 | 249 | 2183695 | G | A | [symbol] | CED85623 |
| X₃₂₂₂ | M3 | 249 | 2198205 | G | A | [symbol] | CED85628 |
| X₃₂₂₃ | M3 | 249 | 2223626 | G | A | [symbol] | CED85633 |
| X₃₂₂₄ | M3 | 249 | 2255547 | G | C | [symbol] | CED85640 |
| X₃₂₂₅ | M3 | 25 | 1089 | T | C | [symbol] | |
| X₃₂₂₆ | M3 | 252 | 512 | C | T | [symbol] | |
| X₃₂₂₇ | M3 | 252 | 524 | C | T | [symbol] | |
| X₃₂₂₈ | M3 | 258 | 836 | A | G | [symbol] | |
| X₃₂₂₉ | M3 | 258 | 1139 | A | T | [symbol] | |
| X₃₂₃₀ | M3 | 260 | 156 | G | A | [symbol] | |
| X₃₂₃₁ | M3 | 262 | 4049 | G | A | [symbol] | CDZ98330 |
| X₃₂₃₂ | M3 | 262 | 12289 | C | T | [symbol] | CDZ98333 |
| X₃₂₃₃ | M3 | 262 | 30347 | G | A | [symbol] | CDZ98338 |
| X₃₂₃₄ | M3 | 262 | 30359 | G | A | [symbol] | CDZ98338 |
| X₃₂₃₅ | M3 | 262 | 81226 | G | A | [symbol] | CDZ98358 |
| X₃₂₃₆ | M3 | 262 | 108865 | C | T | [symbol] | CDZ98369 |
| X₃₂₃₇ | M3 | 262 | 143387 | C | T | [symbol] | CDZ98375 |
| X₃₂₃₈ | M3 | 262 | 148151 | C | T | [symbol] | CDZ98375 |
| X₃₂₃₉ | M3 | 262 | 153091 | G | A | [symbol] | CDZ98377 |
| X₃₂₄₀ | M3 | 262 | 164438 | G | A | [symbol] | CDZ98383 |
| X₃₂₄₁ | M3 | 262 | 201531 | G | A | [symbol] | CDZ98396 |
| X₃₂₄₂ | M3 | 262 | 221937 | C | T | [symbol] | CDZ98403 |
| X₃₂₄₃ | M3 | 262 | 309128 | C | T | [symbol] | CDZ98434 |
| X₃₂₄₄ | M3 | 262 | 319302 | G | A | [symbol] | CDZ98436 |
| X₃₂₄₅ | M3 | 262 | 351354 | G | A | [symbol] | CDZ98450 |
| X₃₂₄₆ | M3 | 262 | 380519 | C | T | [symbol] | CDZ98457 |
| X₃₂₄₇ | M3 | 262 | 383215 | C | T | [symbol] | CDZ98459 |
| X₃₂₄₈ | M3 | 262 | 397539 | G | A | [symbol] | CDZ98463 |
| X₃₂₄₉ | M3 | 262 | 414403 | C | T | [symbol] | CDZ98467 |
| X₃₂₅₀ | M3 | 262 | 420102 | G | A | [symbol] | CDZ98468 |
| X₃₂₅₁ | M3 | 262 | 444331 | G | A | [symbol] | CDZ98477 |
| X₃₂₅₂ | M3 | 262 | 446956 | C | T | [symbol] | CDZ98477 |
| X₂₂₅₃ | M3 | 262 | 451669 | C | T | [symbol] | CDZ98478 |
| X₃₂₅₄ | M3 | 262 | 531136 | G | A | [symbol] | CDZ98510 |
| X₃₂₅₅ | M3 | 262 | 539452 | A | G | [symbol] | CDZ98514 |
| X₃₂₅₆ | M3 | 262 | 557280 | G | A | [symbol] | CDZ98518 |
| X₃₂₅₇ | M3 | 262 | 560713 | G | A | [symbol] | CDZ98519 |
| X₃₂₅₈ | M3 | 262 | 562795 | C | T | [symbol] | CDZ98521 |
| X₃₂₅₉ | M3 | 262 | 567591 | G | A | [symbol] | CDZ98524 |
| X₃₂₆₀ | M3 | 262 | 567801 | G | A | [symbol] | CDZ98524 |
| X₃₂₆₁ | M3 | 262 | 573667 | C | T | [symbol] | CDZ98526 |
| X₃₂₆₂ | M3 | 262 | 607661 | G | A | [symbol] | CDZ98533 |
| X₃₂₆₃ | M3 | 262 | 618198 | G | A | [symbol] | CDZ98538 |
| X₃₂₆₄ | M3 | 262 | 627573 | T | C | [symbol] | CDZ98542 |
| X₃₂₆₅ | M3 | 262 | 638804 | G | C | [symbol] | CDZ98544 |
| X₃₂₆₆ | M3 | 262 | 638986 | C | G | [symbol] | CDZ98544 |
| X₃₂₆₇ | M3 | 262 | 639006 | C | T | [symbol] | CDZ98544 |
| X₃₂₆₈ | M3 | 262 | 639869 | G | C | [symbol] | CDZ98544 |
| X₃₂₆₉ | M3 | 262 | 639962 | A | G | [symbol] | CDZ98544 |
| X₃₂₇₀ | M3 | 262 | 640066 | A | G | [symbol] | CDZ98544 |
| X₃₂₇₁ | M3 | 262 | 653920 | A | G | [symbol] | CDZ98545 |
| X₃₂₇₂ | M3 | 262 | 655754 | A | T | [symbol] | CDZ98545 |
| X₃₂₇₃ | M3 | 262 | 655757 | T | C | [symbol] | CDZ98545 |
| X₃₂₇₄ | M3 | 262 | 656031 | C | A | [symbol] | CDZ98545 |
| X₃₂₇₅ | M3 | 262 | 656323 | C | G | [symbol] | CDZ98545 |
| X₃₂₇₆ | M3 | 262 | 668764 | C | T | [symbol] | CDZ98545 |
| X₃₂₇₇ | M3 | 262 | 691577 | C | T | [symbol] | CDZ98551 |
| X₃₂₇₈ | M3 | 262 | 714374 | A | C | [symbol] | CDZ98557 |
| X₃₂₇₉ | M3 | 262 | 714377 | A | G | [symbol] | CDZ98557 |
| X₃₂₈₀ | M3 | 262 | 771330 | G | A | [symbol] | CDZ98578 |
| X₃₂₈₁ | M3 | 262 | 801626 | G | A | [symbol] | CDZ98589 |
| X₃₂₈₂ | M3 | 262 | 822734 | G | A | [symbol] | CDZ98597 |
| X₃₂₈₃ | M3 | 262 | 835874 | C | T | [symbol] | CDZ98601 |
| X₃₂₈₄ | M3 | 262 | 865999 | G | A | [symbol] | CDZ98613 |
| X₃₂₈₅ | M3 | 262 | 971713 | G | A | [symbol] | CDZ98649 |
| X₃₂₈₆ | M3 | 262 | 1016286 | C | T | [symbol] | CDZ98661 |
| X₃₂₈₇ | M3 | 262 | 1044256 | G | A | [symbol] | CDZ98669 |
| X₃₂₈₈ | M3 | 262 | 1051389 | C | T | [symbol] | CDZ98670 |
| X₃₂₈₉ | M3 | 262 | 1060326 | C | T | [symbol] | CDZ98672 |
| X₃₂₉₀ | M3 | 262 | 1107286 | C | T | [symbol] | CDZ98689 |
| X₃₂₉₁ | M3 | 262 | 1140198 | C | T | [symbol] | CDZ98701 |
| X₃₂₉₂ | M3 | 262 | 1204782 | G | A | [symbol] | CDZ98722 |
| X₃₂₉₃ | M3 | 262 | 1209662 | G | A | [symbol] | CDZ98723 |
| X₃₂₉₄ | M3 | 262 | 1226072 | C | T | [symbol] | CDZ98730 |
| X₃₂₉₅ | M3 | 262 | 1233054 | G | A | [symbol] | CDZ98733 |
| X₃₂₉₆ | M3 | 262 | 1237021 | C | T | [symbol] | CDZ98735 |
| X₃₂₉₇ | M3 | 262 | 1277604 | G | A | [symbol] | CDZ98747 |
| X₃₂₉₈ | M3 | 262 | 1305361 | G | A | [symbol] | CDZ98753 |
| X₃₂₉₉ | M3 | 262 | 1329643 | C | T | [symbol] | CDZ98760 |
| X₃₃₀₀ | M3 | 262 | 1332176 | C | T | [symbol] | CDZ98761 |
| X₃₃₀₁ | M3 | 262 | 1349561 | G | A | [symbol] | CDZ98766 |
| X₃₃₀₂ | M3 | 262 | 1351116 | A | G | [symbol] | CDZ98766 |
| X₃₃₀₃ | M3 | 262 | 1415479 | C | T | [symbol] | CDZ98789 |
| X₃₃₀₄ | M3 | 262 | 1416604 | C | T | [symbol] | CDZ98788 |
| X₃₃₀₅ | M3 | 262 | 1424293 | G | A | [symbol] | CDZ98791 |
| X₃₃₀₆ | M3 | 262 | 1455677 | G | A | [symbol] | CDZ98804 |
| X₃₃₀₇ | M3 | 262 | 1458863 | C | T | [symbol] | CDZ98807 |
| X₃₃₀₈ | M3 | 262 | 1549966 | C | G | [symbol] | CDZ98834 |
| X₃₃₀₉ | M3 | 262 | 1550311 | C | T | [symbol] | CDZ98836 |
| X₃₃₁₀ | M3 | 262 | 1550456 | C | T | [symbol] | CDZ98837 |
| X₃₃₁₁ | M3 | 262 | 1558074 | G | A | [symbol] | CDZ98840 |
| X₃₃₁₂ | M3 | 262 | 1615762 | G | A | [symbol] | CDZ98855 |
| X₃₃₁₃ | M3 | 262 | 1694625 | C | T | [symbol] | CDZ98878 |
| X₃₃₁₄ | M3 | 262 | 1706076 | G | A | [symbol] | CDZ98885 |
| X₃₃₁₅ | M3 | 262 | 1709112 | G | A | [symbol] | CDZ98884 |
| X₃₃₁₆ | M3 | 262 | 1711527 | G | A | [symbol] | CDZ98886 |
| X₃₃₁₇ | M3 | 262 | 1716385 | G | A | [symbol] | CDZ98887 |
| X₃₃₁₈ | M3 | 262 | 1717611 | C | T | [symbol] | CDZ98888 |
| X₃₃₁₉ | M3 | 266 | 85 | C | T | [symbol] | |
| X₃₃₂₀ | M3 | 266 | 252 | C | T | [symbol] | |
| X₃₃₂₁ | M3 | 267 | 133 | T | C | [symbol] | |
| X₃₃₂₂ | M3 | 267 | 134 | C | T | [symbol] | |
| X₃₃₂₃ | M4 | 22 | 1643 | C | T | [symbol] | CED80056 |
| X₃₃₂₄ | M4 | 22 | 2524 | G | A | [symbol] | CED80056 |
| X₃₃₂₅ | M4 | 28 | 236 | G | A | [symbol] | CDZ96150 |
| X₃₃₂₆ | M4 | 28 | 377 | G | A | [symbol] | CDZ96150 |
| X₃₃₂₇ | M4 | 28 | 1506 | C | T | [symbol] | CDZ96150 |
| X₃₃₂₈ | M4 | 28 | 1677 | C | T | [symbol] | CDZ96150 |
| X₃₃₂₉ | M4 | 43 | 464 | G | A | [symbol] | CDZ96151 |
| X₃₃₃₀ | M4 | 43 | 753 | C | T | [symbol] | CDZ96151 |
| X₃₃₃₁ | M4 | 43 | 757 | G | A | [symbol] | CDZ96151 |
| X₃₃₃₂ | M4 | 43 | 1527 | C | T | [symbol] | CDZ96151 |
| X₃₃₃₃ | M4 | 43 | 1748 | G | A | [symbol] | CDZ96151 |
| X₃₃₃₄ | M4 | 43 | 1928 | C | T | [symbol] | CDZ96151 |
| X₃₃₃₅ | M4 | 62 | 26 | T | A | [symbol] | CDZ96152 |
| X₃₃₃₆ | M4 | 62 | 27 | T | C | [symbol] | CDZ96152 |
| X₃₃₃₇ | M4 | 62 | 55 | T | A | [symbol] | CDZ96152 |
| X₃₃₃₈ | M4 | 62 | 403 | C | T | [symbol] | CDZ96152 |
| X₃₃₃₉ | M4 | 62 | 875 | G | A | [symbol] | CDZ96152 |
| X₃₃₄₀ | M4 | 102 | 339 | C | T | [symbol] | CDZ96153 |
| X₃₃₄₁ | M4 | 102 | 951 | G | A | [symbol] | CDZ96153 |
| X₃₃₄₂ | M4 | 102 | 1042 | G | A | [symbol] | CDZ96153 |
| X₃₃₄₃ | M4 | 102 | 2334 | G | A | [symbol] | CDZ96153 |
| X₃₃₄₄ | M4 | 102 | 2590 | C | T | [symbol] | CDZ96153 |
| X₃₃₄₅ | M4 | 102 | 3427 | C | T | [symbol] | CDZ96153 |
| X₃₃₄₆ | M4 | 176 | 358 | G | A | [symbol] | CED80058 |
| X₃₃₄₇ | M4 | 176 | 1872 | G | A | [symbol] | CED80058 |
| X₃₃₄₈ | M4 | 176 | 1980 | G | A | [symbol] | CED80058 |
| X₃₃₄₉ | M4 | 176 | 2335 | A | G | [symbol] | CED80058 |
| X₃₃₅₀ | M4 | 176 | 2349 | G | A | [symbol] | CED80058 |
| X₃₃₅₁ | M4 | 179 | 1525 | G | A | [symbol] | CDZ96154 |
| X₃₃₅₂ | M4 | 179 | 1780 | C | T | [symbol] | CDZ96154 |
| X₃₃₅₃ | M4 | 188 | 815 | C | T | [symbol] | CED80060 |
| X₃₃₅₄ | M4 | 188 | 1174 | C | T | [symbol] | CED80060 |
| X₃₃₅₅ | M4 | 188 | 2163 | G | A | [symbol] | CED80060 |
| X₃₃₅₆ | M4 | 188 | 2170 | G | A | [symbol] | CED80060 |
| X₃₃₅₇ | M4 | 247 | 102 | G | A | [symbol] | CED80061 |
| X₃₃₅₈ | M4 | 247 | 989 | C | T | [symbol] | CED80061 |
| X₃₃₅₉ | M4 | 247 | 1053 | G | A | [symbol] | CED80061 |
| X₃₃₆₀ | M4 | 3 | 142 | C | T | [symbol] | |
| X₃₃₆₁ | M4 | 7 | 160 | T | C | [symbol] | |
| X₃₃₆₂ | M4 | 8 | 1110 | C | T | [symbol] | |
| X₃₃₆₃ | M4 | 11 | 154 | A | C | [symbol] | |
| X₃₃₆₄ | M4 | 11 | 158 | C | T | [symbol] | |
| X₃₃₆₅ | M4 | 15 | 28 | C | G | [symbol] | |
| X₃₃₆₆ | M4 | 24 | 513 | T | C | [symbol] | CDZ96160 |
| X₃₃₆₇ | M4 | 24 | 520 | C | G | [symbol] | CDZ96160 |
| X₃₃₆₈ | M4 | 24 | 5850 | C | T | [symbol] | CDZ96160 |
| X₃₃₆₉ | M4 | 24 | 180340 | G | A | [symbol] | CDZ96216 |
| X₃₃₇₀ | M4 | 24 | 216696 | C | T | [symbol] | CDZ96228 |
| X₃₃₇₁ | M4 | 24 | 266697 | G | A | [symbol] | CDZ96242 |
| X₃₃₇₂ | M4 | 24 | 307114 | G | A | [symbol] | CDZ96255 |
| X₃₃₇₃ | M4 | 24 | 340663 | T | C | [symbol] | CDZ96265 |
| X₃₃₇₄ | M4 | 24 | 420108 | G | A | [symbol] | CDZ96291 |
| X₃₃₇₅ | M4 | 24 | 422035 | G | A | [symbol] | CDZ96291 |
| X₃₃₇₆ | M4 | 24 | 470687 | G | A | [symbol] | CDZ96308 |
| X₃₃₇₇ | M4 | 27 | 445 | C | T | [symbol] | |
| X₃₃₇₈ | M4 | 27 | 1012 | A | C | [symbol] | |
| X₃₃₇₉ | M4 | 27 | 1013 | T | A | [symbol] | |
| X₃₃₈₀ | M4 | 32 | 158 | C | T | [symbol] | CDZ96332 |
| X₃₃₈₁ | M4 | 32 | 215 | C | T | [symbol] | CDZ96332 |
| X₃₃₈₂ | M4 | 32 | 2438 | C | T | [symbol] | CDZ96332 |
| X₃₃₈₃ | M4 | 32 | 2734 | C | T | [symbol] | CDZ96332 |
| X₃₃₈₄ | M4 | 32 | 2821 | C | T | [symbol] | CDZ96332 |
| X₃₃₈₅ | M4 | 32 | 3067 | C | T | [symbol] | CDZ96332 |
| X₃₃₈₆ | M4 | 32 | 3506 | C | T | [symbol] | CDZ96332 |
| X₃₃₈₇ | M4 | 32 | 3562 | G | A | [symbol] | CDZ96332 |
| X₃₃₈₈ | M4 | 33 | 399 | T | A | [symbol] | CED82002 |
| X₃₃₈₉ | M4 | 33 | 20227 | G | A | [symbol] | CED82006 |
| X₃₃₉₀ | M4 | 33 | 45488 | C | T | [symbol] | CED82012 |
| X₃₃₉₁ | M4 | 33 | 79913 | G | A | [symbol] | CED82024 |
| X₃₃₉₂ | M4 | 33 | 109397 | G | A | [symbol] | CED82038 |
| X₃₃₉₃ | M4 | 33 | 109494 | G | A | [symbol] | CED82038 |
| X₃₃₉₄ | M4 | 33 | 129733 | G | A | [symbol] | CED82045 |
| X₃₃₉₅ | M4 | 33 | 226363 | G | A | [symbol] | CED82075 |
| X₃₃₉₆ | M4 | 33 | 257786 | C | T | [symbol] | CED82084 |
| X₃₃₉₇ | M4 | 33 | 260027 | G | A | [symbol] | CED82084 |
| X₃₃₉₈ | M4 | 33 | 274627 | G | A | [symbol] | CED82091 |
| X₃₃₉₉ | M4 | 33 | 283808 | C | T | [symbol] | CED82093 |
| X₃₄₀₀ | M4 | 33 | 327840 | C | T | [symbol] | CED82108 |
| X₃₄₀₁ | M4 | 33 | 341890 | G | A | [symbol] | CED82113 |
| X₃₄₀₂ | M4 | 33 | 370630 | A | T | [symbol] | CED82121- |
| | | | | | | | CED82122 |
| X₃₄₀₃ | M4 | 33 | 372141 | A | C | [symbol] | CED82121- |
| | | | | | | | CED82122 |
| X₃₄₀₄ | M4 | 33 | 374131 | A | G | [symbol] | CED82121- |
| | | | | | | | CED82122 |
| X₃₄₀₅ | M4 | 33 | 374134 | A | G | [symbol] | CED82121- |
| | | | | | | | CED82122 |
| X₃₄₀₆ | M4 | 33 | 374137 | A | T | [symbol] | CED82121- |
| | | | | | | | CED82122 |
| X₃₄₀₇ | M4 | 33 | 374150 | A | C | [symbol] | CED82121- |
| | | | | | | | CED82122 |
| X₃₄₀₈ | M4 | 33 | 375339 | A | G | [symbol] | CED82121- |
| | | | | | | | CED82122 |
| X₃₄₀₉ | M4 | 33 | 375366 | T | C | [symbol] | CED82121- |
| | | | | | | | CED82122 |
| X₃₄₁₀ | M4 | 33 | 382577 | C | T | [symbol] | CED82122 |
| X₃₄₁₁ | M4 | 33 | 382832 | G | T | [symbol] | CED82122 |
| X₃₄₁₂ | M4 | 33 | 383212 | G | A | [symbol] | CED82122 |
| X₃₄₁₃ | M4 | 33 | 385319 | A | C | [symbol] | CED82122 |
| X₃₄₁₄ | M4 | 33 | 385527 | C | T | [symbol] | CED82122 |
| X₃₄₁₅ | M4 | 33 | 386225 | G | A | [symbol] | CED82124 |
| X₃₄₁₆ | M4 | 33 | 448815 | G | A | [symbol] | CED82144 |
| X₃₄₁₇ | M4 | 33 | 455451 | C | T | [symbol] | CED82146 |
| X₃₄₁₈ | M4 | 33 | 509127 | C | T | [symbol] | CED82166 |
| X₃₄₁₉ | M4 | 33 | 543070 | C | T | [symbol] | CED82179 |
| X₃₄₂₀ | M4 | 33 | 556726 | C | T | [symbol] | CED82183 |
| X₃₄₂₁ | M4 | 33 | 570390 | G | A | [symbol] | CED82188 |
| X₃₄₂₂ | M4 | 33 | 639242 | G | A | [symbol] | CED82208 |
| X₃₄₂₃ | M4 | 33 | 682740 | C | T | [symbol] | CED82220 |
| X₃₄₂₄ | M4 | 33 | 699423 | C | T | [symbol] | CED82227 |
| X₃₄₂₅ | M4 | 33 | 800536 | G | A | [symbol] | CED82259 |
| X₃₄₂₆ | M4 | 33 | 829825 | C | T | [symbol] | CED82271 |
| X₃₄₂₇ | M4 | 33 | 850373 | G | A | [symbol] | CED82278 |
| X₃₄₂₈ | M4 | 33 | 917771 | A | T | [symbol] | CED82294 |
| X₃₄₂₉ | M4 | 33 | 929585 | T | C | [symbol] | CED82297 |
| X₃₄₃₀ | M4 | 33 | 936571 | A | G | [symbol] | CED82300 |
| X₃₄₃₁ | M4 | 33 | 936600 | G | A | [symbol] | CED82300 |
| X₃₄₃₂ | M4 | 33 | 936667 | A | G | [symbol] | CED82300 |
| X₃₄₃₃ | M4 | 33 | 936697 | A | G | [symbol] | CED82300 |
| X₃₄₃₄ | M4 | 33 | 971503 | C | T | [symbol] | CED82307 |
| X₃₄₃₅ | M4 | 33 | 995886 | G | A | [symbol] | CED82318 |
| X₃₄₃₆ | M4 | 33 | 1005225 | C | T | [symbol] | CED82323 |
| X₃₄₃₇ | M4 | 33 | 1049699 | G | A | [symbol] | CED82334 |
| X₃₄₃₈ | M4 | 33 | 1053098 | G | C | [symbol] | CED82337 |
| X₃₄₃₉ | M4 | 33 | 1087773 | G | A | [symbol] | CED82349 |
| X₃₄₄₀ | M4 | 33 | 1138444 | C | T | [symbol] | CED82363 |
| X₃₄₄₁ | M4 | 33 | 1151553 | C | T | [symbol] | CED82367 |
| X₃₄₄₂ | M4 | 33 | 1165914 | G | A | [symbol] | CED82372 |
| X₃₄₄₃ | M4 | 33 | 1191727 | C | T | [symbol] | CED82379 |
| X₃₄₄₄ | M4 | 33 | 1291620 | C | T | [symbol] | CED82406 |
| X₃₄₄₅ | M4 | 33 | 1311181 | G | A | [symbol] | CED82413 |
| X₃₄₄₆ | M4 | 33 | 1316789 | C | T | [symbol] | CED82415 |
| X₃₄₄₇ | M4 | 33 | 1324395 | G | A | [symbol] | CED82417 |
| X₃₄₄₈ | M4 | 33 | 1339376 | C | T | [symbol] | CED82424 |
| X₃₄₄₉ | M4 | 33 | 1349009 | C | T | [symbol] | CED82427 |
| X₃₄₅₀ | M4 | 33 | 1411059 | C | T | [symbol] | CED82446 |
| X₃₄₅₁ | M4 | 33 | 1431038 | G | A | [symbol] | CED82451 |
| X₃₄₅₂ | M4 | 33 | 1470375 | C | T | [symbol] | CED82465 |
| X₃₄₅₃ | M4 | 33 | 1473759 | G | T | [symbol] | CED82464 |
| X₃₄₅₄ | M4 | 33 | 1499347 | G | A | [symbol] | CED82472 |
| X₃₄₅₅ | M4 | 33 | 1544767 | A | C | [symbol] | CED82485- |
| | | | | | | | CED82486 |
| X₃₄₅₆ | M4 | 33 | 1585699 | C | T | [symbol] | CED82497 |
| X₃₄₅₇ | M4 | 33 | 1587443 | C | T | [symbol] | CED82497 |
| X₃₄₅₈ | M4 | 33 | 1596242 | C | T | [symbol] | CED82498 |
| X₃₄₅₉ | M4 | 33 | 1638726 | G | A | [symbol] | CED82513 |
| X₃₄₆₀ | M4 | 33 | 1642659 | G | A | [symbol] | CED82515 |
| X₃₄₆₁ | M4 | 33 | 1652749 | C | T | [symbol] | CED82516 |
| X₃₄₆₂ | M4 | 33 | 1669434 | G | A | [symbol] | CED82524 |
| X₃₄₆₃ | M4 | 33 | 1700000 | G | A | [symbol] | CED82534 |
| X₃₄₆₄ | M4 | 33 | 1728730 | G | A | [symbol] | CED82541 |
| X₃₄₆₅ | M4 | 33 | 1740595 | C | T | [symbol] | CED82545 |
| X₃₄₆₆ | M4 | 33 | 1752414 | G | A | [symbol] | CED82547 |
| X₃₄₆₇ | M4 | 33 | 1823362 | C | T | [symbol] | CED82571 |
| X₃₄₆₈ | M4 | 33 | 1824401 | C | T | [symbol] | CED82572 |
| X₃₄₆₉ | M4 | 33 | 1860278 | G | A | [symbol] | CED82582 |
| X₃₄₇₀ | M4 | 33 | 1861675 | C | T | [symbol] | CED82583 |
| X₃₄₇₁ | M4 | 33 | 1862200 | G | A | [symbol] | CED82582 |
| X₃₄₇₂ | M4 | 33 | 1887401 | C | T | [symbol] | CED82591 |
| X₃₄₇₃ | M4 | 33 | 1889585 | G | A | [symbol] | CED82592 |
| X₃₄₇₄ | M4 | 33 | 1908405 | G | A | [symbol] | CED82599 |
| X₃₄₇₅ | M4 | 33 | 1938614 | G | A | [symbol] | CED82612 |
| X₃₄₇₆ | M4 | 33 | 1939670 | C | T | [symbol] | CED82612 |
| X₃₄₇₇ | M4 | 33 | 1967112 | C | T | [symbol] | CED82622 |
| X₃₄₇₈ | M4 | 33 | 2010230 | C | T | [symbol] | CED82636 |
| X₃₄₇₉ | M4 | 33 | 2050847 | G | A | [symbol] | CED82651 |
| X₃₄₈₀ | M4 | 36 | 320 | G | A | [symbol] | |
| X₃₄₈₁ | M4 | 36 | 1056 | G | A | [symbol] | |
| X₃₄₈₂ | M4 | 36 | 1295 | C | T | [symbol] | |
| X₃₄₈₃ | M4 | 36 | 1461 | A | T | [symbol] | |
| X₃₄₈₄ | M4 | 40 | 495 | C | G | [symbol] | |
| X₃₄₈₅ | M4 | 42 | 804 | C | T | [symbol] | CDZ96333 |
| X₃₄₈₆ | M4 | 42 | 1559 | G | A | [symbol] | CDZ96333 |
| X₃₄₈₇ | M4 | 48 | 563 | C | T | [symbol] | |
| X₃₄₈₈ | M4 | 48 | 565 | T | C | [symbol] | |
| X₃₄₈₉ | M4 | 48 | 576 | G | A | [symbol] | |
| X₃₄₉₀ | M4 | 48 | 580 | T | A | [symbol] | |
| X₃₄₉₁ | M4 | 50 | 145 | G | A | [symbol] | |
| X₃₄₉₂ | M4 | 52 | 6285 | C | T | [symbol] | CED82665 |
| X₃₄₉₃ | M4 | 52 | 136058 | G | A | [symbol] | CED82705 |
| X₃₄₉₄ | M4 | 52 | 144382 | C | T | [symbol] | CED82709 |
| X₃₄₉₅ | M4 | 52 | 145060 | G | A | [symbol] | CED82708 |
| X₃₄₉₆ | M4 | 52 | 151974 | C | T | [symbol] | CED82712 |
| X₃₄₉₇ | M4 | 52 | 183986 | C | T | [symbol] | CED82722 |
| X₃₄₉₈ | M4 | 52 | 203253 | A | G | [symbol] | CED82730 |
| X₃₄₉₉ | M4 | 52 | 207354 | C | T | [symbol] | CED82730 |
| X₃₅₀₀ | M4 | 52 | 223283 | C | G | [symbol] | CED82732- |
| | | | | | | | CED82733 |
| X₃₅₀₁ | M4 | 52 | 239773 | C | T | [symbol] | CED82734 |
| X₃₅₀₂ | M4 | 52 | 243203 | G | A | [symbol] | CED82733 |
| X₃₅₀₃ | M4 | 52 | 244305 | G | A | [symbol] | CED82734 |
| X₃₅₀₄ | M4 | 52 | 284733 | G | A | [symbol] | CED82747 |
| X₃₅₀₅ | M4 | 52 | 390095 | G | A | [symbol] | CED82784 |
| X₃₅₀₆ | M4 | 52 | 390988 | C | T | [symbol] | CED82785 |
| X₃₅₀₇ | M4 | 52 | 395374 | G | A | [symbol] | CED82786 |
| X₃₅₀₈ | M4 | 52 | 398723 | C | T | [symbol] | CED82786 |
| X₃₅₀₉ | M4 | 52 | 398728 | C | T | [symbol] | CED82786 |
| X₃₅₁₀ | M4 | 52 | 487472 | C | T | [symbol] | CED82814 |
| X₃₅₁₁ | M4 | 52 | 516267 | C | T | [symbol] | CED82823 |
| X₃₅₁₂ | M4 | 52 | 552099 | G | A | [symbol] | CED82837 |
| X₃₅₁₃ | M4 | 52 | 552173 | G | A | [symbol] | CED82837 |
| X₃₅₁₄ | M4 | 52 | 571124 | G | A | [symbol] | CED82845 |
| X₃₅₁₅ | M4 | 52 | 627827 | C | T | [symbol] | CED82860 |
| X₃₅₁₆ | M4 | 52 | 638622 | G | A | [symbol] | CED82862 |
| X₃₅₁₇ | M4 | 52 | 679670 | G | A | [symbol] | CED82877 |
| X₃₅₁₈ | M4 | 52 | 730557 | G | T | [symbol] | CED82899 |
| X₃₅₁₉ | M4 | 52 | 750413 | G | A | [symbol] | CED82908 |
| X₃₅₂₀ | M4 | 52 | 817452 | T | A | [symbol] | CED82928 |
| X₃₅₂₁ | M4 | 52 | 840755 | C | T | [symbol] | CED82935 |
| X₃₅₂₂ | M4 | 52 | 842352 | C | T | [symbol] | CED82934 |
| X₃₅₂₃ | M4 | 52 | 848043 | A | G | [symbol] | CED82937 |
| X₃₅₂₄ | M4 | 52 | 849671 | G | A | [symbol] | CED82940 |
| X₃₅₂₅ | M4 | 52 | 861376 | C | T | [symbol] | CED82946 |
| X₃₅₂₆ | M4 | 52 | 911438 | G | A | [symbol] | CED82964 |
| X₃₅₂₇ | M4 | 52 | 928854 | C | T | [symbol] | CED82971 |
| X₃₅₂₈ | M4 | 52 | 938650 | G | A | [symbol] | CED82973 |
| X₃₅₂₉ | M4 | 52 | 967316 | A | T | [symbol] | CED82984 |
| X₃₅₃₀ | M4 | 52 | 967701 | T | A | [symbol] | CED82983 |
| X₃₅₃₁ | M4 | 52 | 977048 | G | A | [symbol] | CED82990 |
| X₃₅₃₂ | M4 | 52 | 1003899 | G | A | [symbol] | CED83001 |
| X₃₅₃₃ | M4 | 52 | 1004724 | G | A | [symbol] | CED83001 |
| X₃₅₃₄ | M4 | 52 | 1029498 | G | A | [symbol] | CED83007 |
| X₃₅₃₅ | M4 | 52 | 1043011 | C | T | [symbol] | CED83012 |
| X₃₅₃₆ | M4 | 52 | 1049304 | C | T | [symbol] | CED83013 |
| X₃₅₃₇ | M4 | 52 | 1067895 | C | T | [symbol] | CED83020 |
| X₃₅₃₈ | M4 | 52 | 1157819 | T | A | [symbol] | CED83049 |
| X₃₅₃₉ | M4 | 52 | 1158103 | C | T | [symbol] | CED83051 |
| X₃₅₄₀ | M4 | 52 | 1214927 | C | T | [symbol] | CED83068 |
| X₃₅₄₁ | M4 | 52 | 1219894 | C | T | [symbol] | CED83071 |
| X₃₅₄₂ | M4 | 52 | 1227910 | G | A | [symbol] | CED83074 |
| X₃₅₄₃ | M4 | 52 | 1297876 | G | A | [symbol] | CED83099 |
| X₃₅₄₄ | M4 | 52 | 1336560 | G | A | [symbol] | CED83113 |
| X₃₅₄₅ | M4 | 52 | 1356590 | C | T | [symbol] | CED83120 |
| X₃₅₄₆ | M4 | 52 | 1363357 | G | A | [symbol] | CED83122 |
| X₃₅₄₇ | M4 | 52 | 1363405 | C | T | [symbol] | CED83123 |
| X₃₅₄₈ | M4 | 52 | 1373998 | C | T | [symbol] | CED83125 |
| X₃₅₄₉ | M4 | 52 | 1379155 | G | A | [symbol] | CED83128 |
| X₃₅₅₀ | M4 | 52 | 1381652 | C | T | [symbol] | CED83129 |
| X₃₅₅₁ | M4 | 52 | 1399439 | G | A | [symbol] | CED83134 |
| X₃₅₅₂ | M4 | 52 | 1409725 | G | A | [symbol] | CED83139 |
| X₃₅₅₃ | M4 | 52 | 1474412 | G | A | [symbol] | CED83166 |
| X₃₅₅₄ | M4 | 52 | 1509004 | G | A | [symbol] | CED83177 |
| X₃₅₅₅ | M4 | 52 | 1526796 | G | A | [symbol] | CED83181 |
| X₃₅₅₆ | M4 | 52 | 1540879 | C | T | [symbol] | CED83186 |
| X₃₅₅₇ | M4 | 52 | 1546812 | G | A | [symbol] | CED83188 |
| X₃₅₅₈ | M4 | 52 | 1570053 | C | T | [symbol] | CED83200 |
| X₃₅₅₉ | M4 | 52 | 1583655 | C | T | [symbol] | CED83206 |
| X₃₅₆₀ | M4 | 52 | 1590982 | C | T | [symbol] | CED83207 |
| X₃₅₆₁ | M4 | 52 | 1708900 | A | G | [symbol] | CED83249 |
| X₃₅₆₂ | M4 | 52 | 1715136 | C | T | [symbol] | CED83250 |
| X₃₅₆₃ | M4 | 52 | 1716210 | C | T | [symbol] | CED83250 |
| X₃₅₆₄ | M4 | 52 | 1750963 | C | T | [symbol] | CED83263 |
| X₃₅₆₅ | M4 | 52 | 1760440 | G | A | [symbol] | CED83266 |
| X₃₅₆₆ | M4 | 52 | 1765533 | G | A | [symbol] | CED83268 |
| X₃₅₆₇ | M4 | 52 | 1787135 | C | T | [symbol] | CED83275 |
| X₃₅₆₈ | M4 | 52 | 1788070 | G | A | [symbol] | CED83273 |
| X₃₅₆₉ | M4 | 52 | 1789922 | G | A | [symbol] | CED83276 |
| X₃₅₇₀ | M4 | 52 | 1793370 | G | A | [symbol] | CED83275 |
| X₃₅₇₁ | M4 | 52 | 1807309 | G | A | [symbol] | CED83283 |
| X₃₅₇₂ | M4 | 52 | 1809897 | G | A | [symbol] | CED83285 |
| X₃₅₇₃ | M4 | 52 | 1871310 | C | T | [symbol] | CED83304 |
| X₃₅₇₄ | M4 | 52 | 1874150 | G | T | [symbol] | CED83305 |
| X₃₅₇₅ | M4 | 52 | 1893352 | G | A | [symbol] | CED83313 |
| X₃₅₇₆ | M4 | 52 | 1938393 | C | T | [symbol] | CED83322 |
| X₃₅₇₇ | M4 | 52 | 1963875 | G | A | [symbol] | CED83335 |
| X₃₅₇₈ | M4 | 52 | 1987096 | G | A | [symbol] | CED83341 |
| X₃₅₇₉ | M4 | 52 | 1995167 | G | A | [symbol] | CED83342 |
| X₃₅₈₀ | M4 | 52 | 2041781 | C | T | [symbol] | CED83355 |
| X₃₅₈₁ | M4 | 52 | 2050245 | G | A | [symbol] | CED83359 |
| X₃₅₈₂ | M4 | 52 | 2081390 | G | A | [symbol] | CED83367 |
| X₃₅₈₃ | M4 | 52 | 2093251 | C | T | [symbol] | CED83368 |
| X₃₅₈₄ | M4 | 52 | 2120665 | C | T | [symbol] | CED83376 |
| X₃₅₈₅ | M4 | 52 | 2136885 | A | G | [symbol] | CED83382 |
| X₃₅₈₆ | M4 | 52 | 2162878 | G | A | [symbol] | CED83392 |
| X₃₅₈₇ | M4 | 52 | 2192445 | G | A | [symbol] | CED83400 |
| X₃₅₈₈ | M4 | 52 | 2211680 | G | A | [symbol] | CED83407 |
| X₃₅₈₉ | M4 | 52 | 2222126 | C | T | [symbol] | CED83410 |
| X₃₅₉₀ | M4 | 52 | 2229000 | G | A | [symbol] | CED83410 |
| X₃₅₉₁ | M4 | 52 | 2265219 | C | T | [symbol] | CED83425 |
| X₃₅₉₂ | M4 | 52 | 2266378 | C | T | [symbol] | CED83423 |
| X₃₅₉₃ | M4 | 52 | 2279651 | G | A | [symbol] | CED83430 |
| X₃₅₉₁ | M4 | 52 | 2308421 | T | C | [symbol] | CED83439 |
| X₃₅₉₅ | M4 | 52 | 2327266 | C | T | [symbol] | CED83445 |
| X₃₅₉₆ | M4 | 52 | 2364315 | G | A | [symbol] | CED83455 |
| X₃₅₉₇ | M4 | 52 | 2374740 | C | T | [symbol] | CED83456 |
| X₃₅₉₈ | M4 | 52 | 2400778 | C | T | [symbol] | CED83463 |
| X₃₅₉₉ | M4 | 52 | 2443575 | G | A | [symbol] | CED83476 |
| X₃₆₀₀ | M4 | 52 | 2531584 | C | T | [symbol] | CED83507 |
| X₃₆₀₁ | M4 | 52 | 2575090 | A | G | [symbol] | CED83525 |
| X₃₆₀₂ | M4 | 53 | 26291 | G | A | [symbol] | CDZ96348 |
| X₃₆₀₃ | M4 | 53 | 55702 | C | T | [symbol] | CDZ96359 |
| X₃₆₀₄ | M4 | 53 | 69664 | C | T | [symbol] | CDZ96363 |
| X₃₆₀₅ | M4 | 54 | 4150 | A | G | [symbol] | CDZ96383 |
| X₃₆₀₆ | M4 | 54 | 4815 | G | A | [symbol] | CDZ96384 |
| X₃₆₀₇ | M4 | 54 | 4816 | A | T | [symbol] | CDZ96384 |
| X₃₆₀₈ | M4 | 54 | 4817 | G | C | [symbol] | CDZ96384 |
| X₃₆₀₉ | M4 | 54 | 4821 | G | A | [symbol] | CDZ96384 |
| X₃₆₁₀ | M4 | 54 | 16963 | C | T | [symbol] | CDZ96386 |
| X₃₆₁₁ | M4 | 54 | 60769 | G | A | [symbol] | CDZ96403 |
| X₃₆₁₂ | M4 | 54 | 87716 | G | A | [symbol] | CDZ96410 |
| X₃₆₁₃ | M4 | 54 | 106086 | G | A | [symbol] | CDZ96416 |
| X₃₆₁₄ | M4 | 54 | 114442 | G | A | [symbol] | CDZ96419 |
| X₃₆₁₅ | M4 | 54 | 136832 | C | T | [symbol] | CDZ96425 |
| X₃₆₁₆ | M4 | 54 | 194230 | G | A | [symbol] | CDZ96446 |
| X₃₆₁₇ | M4 | 54 | 195804 | G | A | [symbol] | CDZ96447 |
| X₃₆₁₈ | M4 | 54 | 202467 | C | T | [symbol] | CDZ96448 |
| X₃₆₁₉ | M4 | 54 | 206494 | G | A | [symbol] | CDZ96450 |
| X₃₆₂₀ | M4 | 54 | 274617 | A | T | [symbol] | CDZ96471 |
| X₃₆₂₁ | M4 | 54 | 278479 | C | T | [symbol] | CDZ96474 |
| X₃₆₂₂ | M4 | 54 | 285008 | C | T | [symbol] | CDZ96475 |
| X₃₆₂₃ | M4 | 54 | 370320 | G | A | [symbol] | CDZ96499 |
| X₃₆₂₄ | M4 | 54 | 383172 | C | T | [symbol] | CDZ96506 |
| X₃₆₂₅ | M4 | 54 | 391223 | A | G | [symbol] | CDZ96509 |
| X₃₆₂₆ | M4 | 54 | 427542 | C | T | [symbol] | CDZ96520 |
| X₃₆₂₇ | M4 | 54 | 478527 | C | T | [symbol] | CDZ96537 |
| X₃₆₂₈ | M4 | 54 | 537282 | T | C | [symbol] | CDZ96557 |
| X₃₆₂₉ | M4 | 54 | 564688 | C | T | [symbol] | CDZ96566 |
| X₃₆₃₀ | M4 | 54 | 565396 | T | C | [symbol] | CDZ96567 |
| X₃₆₃₁ | M4 | 54 | 583996 | G | A | [symbol] | CDZ96570 |
| X₃₆₃₂ | M4 | 54 | 616268 | A | G | [symbol] | CDZ96581 |
| X₃₆₃₃ | M4 | 54 | 619019 | G | A | [symbol] | CDZ96580 |
| X₃₆₃₄ | M4 | 54 | 733193 | T | C | [symbol] | CDZ96619 |
| X₃₆₃₅ | M4 | 54 | 742842 | C | T | [symbol] | CDZ96621 |
| X₃₆₃₆ | M4 | 54 | 743396 | G | A | [symbol] | CDZ96621 |
| X₃₆₃₇ | M4 | 54 | 746707 | G | A | [symbol] | CDZ96623 |
| X₃₆₃₈ | M4 | 58 | 93 | T | C | [symbol] | |
| X₃₆₃₉ | M4 | 64 | 2756 | A | C | [symbol] | CDZ96626 |
| X₃₆₄₀ | M4 | 67 | 111 | G | A | [symbol] | |
| X₃₆₄₁ | M4 | 69 | 29006 | G | A | [symbol] | CED83534 |
| X₃₆₄₂ | M4 | 69 | 48869 | G | A | [symbol] | CED83542 |
| X₃₆₄₃ | M4 | 69 | 50642 | C | T | [symbol] | CED83543 |
| X₃₆₄₄ | M4 | 69 | 52428 | G | A | [symbol] | CED83541 |
| X₃₆₄₅ | M4 | 69 | 70304 | C | T | [symbol] | CED83551 |
| X₃₆₄₆ | M4 | 69 | 89393 | G | A | [symbol] | CED83556 |
| X₃₆₄₇ | M4 | 69 | 107920 | C | T | [symbol] | CED83561 |
| X₃₆₄₈ | M4 | 69 | 201005 | G | A | [symbol] | CED83595 |
| X₃₆₄₉ | M4 | 69 | 293602 | G | A | [symbol] | CED83626 |
| X₃₆₅₀ | M4 | 69 | 384418 | G | A | [symbol] | CED83656 |
| X₃₆₅₁ | M4 | 69 | 415659 | C | T | [symbol] | CED83665 |
| X₃₆₅₂ | M4 | 69 | 431248 | G | A | [symbol] | CED83671 |
| X₃₆₅₃ | M4 | 69 | 441238 | C | G | [symbol] | CED83674 |
| X₃₆₅₄ | M4 | 69 | 455639 | G | A | [symbol] | CED83677 |
| X₃₆₅₅ | M4 | 69 | 461986 | G | A | [symbol] | CED83680 |
| X₃₆₅₆ | M4 | 69 | 472563 | C | T | [symbol] | CED83681 |
| X₃₆₅₇ | M4 | 69 | 473113 | G | A | [symbol] | CED83684 |
| X₃₆₅₈ | M4 | 69 | 482073 | G | T | [symbol] | CED83685 |
| X₃₆₅₉ | M4 | 69 | 585845 | G | A | [symbol] | CED83722 |
| X₃₆₆₀ | M4 | 69 | 631511 | G | A | [symbol] | CED83742 |
| X₃₆₆₁ | M4 | 69 | 637299 | T | C | [symbol] | CED83744 |
| X₃₆₆₂ | M4 | 69 | 675579 | G | A | [symbol] | CED83760 |
| X₃₆₆₃ | M4 | 69 | 676581 | G | A | [symbol] | CED83760 |
| X₃₆₆₄ | M4 | 69 | 676853 | G | A | [symbol] | CED83759 |
| X₃₆₆₅ | M4 | 69 | 678406 | C | T | [symbol] | CED83759 |
| X₃₆₆₆ | M4 | 69 | 682770 | C | T | [symbol] | CED83763 |
| X₃₆₆₇ | M4 | 69 | 803358 | G | A | [symbol] | CED83798 |
| X₃₆₆₈ | M4 | 69 | 865820 | C | T | [symbol] | CED83814 |
| X₃₆₆₉ | M4 | 69 | 869706 | G | A | [symbol] | CED83815 |
| X₃₆₇₀ | M4 | 69 | 892199 | G | A | [symbol] | CED83822 |
| X₃₆₇₁ | M4 | 69 | 894462 | C | T | [symbol] | CED83821 |
| X₃₆₇₂ | M4 | 69 | 949982 | C | T | [symbol] | CED83842 |
| X₃₆₇₃ | M4 | 69 | 971219 | C | T | [symbol] | CED83847 |
| X₃₆₇₄ | M4 | 69 | 988364 | G | A | [symbol] | CED83857 |
| X₃₆₇₅ | M4 | 69 | 1038140 | G | A | [symbol] | CED83874 |
| X₃₆₇₆ | M4 | 69 | 1042212 | G | A | [symbol] | CED83875 |
| X₃₆₇₇ | M4 | 69 | 1080212 | C | T | [symbol] | CED83889 |
| X₃₆₇₈ | M4 | 69 | 1084824 | G | A | [symbol] | CED83891 |
| X₃₆₇₉ | M4 | 69 | 1084835 | C | T | [symbol] | CED83891 |
| X₃₆₈₀ | M4 | 69 | 1084848 | A | G | [symbol] | CED83891 |
| X₃₆₈₁ | M4 | 69 | 1084866 | A | G | [symbol] | CED83891 |
| X₃₆₈₂ | M4 | 69 | 1084931 | C | T | [symbol] | CED83891 |
| X₃₆₈₃ | M4 | 69 | 1102164 | C | T | [symbol] | CED83897 |
| X₃₆₈₄ | M4 | 69 | 1109785 | C | T | [symbol] | CED83899 |
| X₃₆₈₅ | M4 | 69 | 1109813 | A | G | [symbol] | CED83899 |
| X₃₆₈₆ | M4 | 69 | 1109818 | A | G | [symbol] | CED83899 |
| X₃₆₈₇ | M4 | 69 | 1109819 | T | A | [symbol] | CED83899 |
| X₃₆₈₈ | M4 | 69 | 1109823 | T | C | [symbol] | CED83899 |
| X₃₆₈₉ | M4 | 69 | 1109830 | A | G | [symbol] | CED83899 |
| X₃₆₉₀ | M4 | 69 | 1109831 | C | A | [symbol] | CED83899 |
| X₃₆₉₁ | M4 | 69 | 1109835 | A | G | [symbol] | CED83899 |
| X₃₆₉₂ | M4 | 69 | 1110489 | T | A | [symbol] | CED83899 |
| X₃₆₉₃ | M4 | 69 | 1110507 | A | T | [symbol] | CED83899 |
| X₃₆₉₄ | M4 | 69 | 1110521 | A | C | [symbol] | CED83899 |
| X₃₆₉₅ | M4 | 69 | 1115486 | C | T | [symbol] | CED83902 |
| X₃₆₉₆ | M4 | 69 | 1152012 | g | A | [symbol] | CED83915 |
| X₃₆₉₇ | M4 | 69 | 1161041 | A | G | [symbol] | CED83918 |
| X₃₆₉₈ | M4 | 69 | 1205454 | C | T | [symbol] | CED83932 |
| X₃₆₉₉ | M4 | 69 | 1218409 | G | A | [symbol] | CED83936 |
| X₃₇₀₀ | M4 | 69 | 1245509 | C | T | [symbol] | CED83943 |
| X₃₇₀₁ | M4 | 69 | 1260087 | G | A | [symbol] | CED83949 |
| X₃₇₀₂ | M4 | 69 | 1342909 | G | A | [symbol] | CED83975 |
| X₃₇₀₃ | M4 | 69 | 1356844 | C | t | [symbol] | CED83982 |
| X₃₇₀₄ | M4 | 69 | 1372486 | C | T | [symbol] | CED83987 |
| X₃₇₀₅ | M4 | 69 | 1379683 | C | T | [symbol] | CED83991 |
| X₃₇₀₆ | M4 | 69 | 1411237 | C | T | [symbol] | CED84001 |
| X₃₇₀₇ | M4 | 69 | 1411421 | C | T | [symbol] | CED83999 |
| X₃₇₀₈ | M4 | 69 | 1421240 | C | T | [symbol] | CED84004 |
| X₃₇₀₉ | M4 | 69 | 1430120 | C | T | [symbol] | CED84006 |
| X₃₇₁₀ | M4 | 69 | 1485040 | G | A | [symbol] | CED84023 |
| X₃₇₁₁ | M4 | 69 | 1493453 | C | T | [symbol] | CED84026 |
| X₃₇₁₂ | M4 | 69 | 1590302 | G | A | [symbol] | CED84059 |
| X₃₇₁₃ | M4 | 69 | 1601173 | c | T | [symbol] | CED84062 |
| X₃₇₁₄ | M4 | 69 | 1636638 | C | T | [symbol] | CED84073 |
| X₃₇₁₅ | M4 | 69 | 1652288 | C | T | [symbol] | CED84077 |
| X₃₇₁₆ | M4 | 69 | 1674261 | C | T | [symbol] | CED84084 |
| X₃₇₁₇ | M4 | 69 | 1688555 | C | T | [symbol] | CED84088 |
| X₃₇₁₈ | M4 | 69 | 1694047 | C | T | [symbol] | CED84089 |
| X₃₇₁₉ | M4 | 69 | 1714728 | G | A | [symbol] | CED84097 |
| X₃₇₂₀ | M4 | 69 | 1790823 | C | T | [symbol] | CED84125 |
| X₃₇₂₁ | m4 | 69 | 1792597 | C | T | [symbol] | CED84126 |
| X₃₇₂₂ | M4 | 69 | 1800584 | G | A | [symbol] | CED84129 |
| X₃₇₂₃ | M4 | 69 | 1853510 | T | C | [symbol] | CED84145 |
| X₃₇₂₄ | M4 | 69 | 1854739 | G | A | [symbol] | CED84145 |
| X₃₇₂₅ | M4 | 69 | 1924621 | C | T | [symbol] | CED84172 |
| X₃₇₂₆ | M4 | 69 | 1967529 | C | T | [symbol] | CED84189 |
| X₃₇₂₇ | M4 | 69 | 1968848 | A | G | [symbol] | CED84189 |
| X₃₇₂₈ | M4 | 69 | 2001469 | C | T | [symbol] | CED84197 |
| X₃₇₂₉ | M4 | 69 | 2009058 | G | A | [symbol] | CED84201 |
| X₃₇₃₀ | M4 | 69 | 2031440 | G | A | [symbol] | CED84210 |
| X₃₇₃₁ | M4 | 69 | 2038266 | G | A | [symbol] | CED84211 |
| X₃₇₃₂ | M4 | 69 | 2099556 | C | T | [symbol] | CED84233 |
| X₃₇₃₃ | M4 | 69 | 2099559 | A | T | [symbol] | CED84233 |
| X₃₇₃₄ | M4 | 69 | 2113590 | G | A | [symbol] | CED84237 |
| X₃₇₃₅ | M4 | 69 | 2156050 | C | T | [symbol] | CED84252 |
| X₃₇₃₆ | M4 | 69 | 2160207 | C | T | [symbol] | CED84255 |
| X₃₇₃₇ | M4 | 69 | 2219444 | G | A | [symbol] | CED84271 |
| X₃₇₃₈ | M4 | 69 | 2226113 | C | T | [symbol] | CED84272 |
| X₃₇₃₉ | M4 | 69 | 2226317 | C | T | [symbol] | CED84272 |
| X₃₇₄₀ | M4 | 69 | 2260222 | C | T | [symbol] | CED84282 |
| X₃₇₄₁ | M4 | 69 | 2275703 | G | A | [symbol] | CED84290 |
| X₃₇₄₂ | M4 | 69 | 2402826 | C | T | [symbol] | CED84333 |
| X₃₇₄₃ | M4 | 69 | 2438727 | C | T | [symbol] | CED84343 |
| X₃₇₄₄ | M4 | 69 | 2440765 | C | A | [symbol] | CED84343 |
| X₃₇₄₅ | M4 | 69 | 2448630 | C | T | [symbol] | CED84344 |
| X₃₇₄₆ | M4 | 69 | 2483433 | G | A | [symbol] | CED84352 |
| X₃₇₄₇ | M4 | 72 | 93 | T | C | [symbol] | |
| X₃₇₄₈ | M4 | 72 | 584 | G | A | [symbol] | |
| X₃₇₄₉ | M4 | 72 | 856 | C | T | [symbol] | |
| X₃₇₅₀ | M4 | 72 | 1163 | C | T | [symbol] | |
| X₃₇₅₁ | M4 | 77 | 18912 | A | G | [symbol] | CDZ96635 |
| X₃₇₅₂ | M4 | 77 | 34978 | G | T | [symbol] | CDZ96642 |
| X₃₇₅₃ | M4 | 77 | 39842 | G | A | [symbol] | CDZ96646 |
| X₃₇₅₄ | M4 | 77 | 65419 | G | A | [symbol] | CDZ96655 |
| X₃₇₅₅ | M4 | 77 | 84022 | G | A | [symbol] | CDZ96659 |
| X₃₇₅₆ | M4 | 78 | 1865 | C | T | [symbol] | CED84359 |
| X₃₇₅₇ | M4 | 78 | 6333 | G | A | [symbol] | CED84360 |
| X₃₇₅₈ | M4 | 78 | 21716 | C | T | [symbol] | CED84364 |
| X₃₇₅₉ | M4 | 78 | 89958 | C | T | [symbol] | CED84387 |
| X₃₇₆₀ | M4 | 78 | 158534 | G | A | [symbol] | CED84406 |
| X₃₇₆₁ | M4 | 78 | 191358 | G | A | [symbol] | CED84414 |
| X₃₇₆₂ | M4 | 78 | 233543 | T | C | [symbol] | CED84431 |
| X₃₇₆₃ | M4 | 78 | 238854 | C | T | [symbol] | CED84430 |
| X₃₇₆₄ | M4 | 78 | 263828 | T | C | [symbol] | CED84438 |
| X₃₇₆₅ | M4 | 78 | 281454 | C | A | [symbol] | CED84441 |
| X₃₇₆₆ | M4 | 78 | 298141 | C | G | [symbol] | CED84443 |
| X₃₇₆₇ | M4 | 78 | 299644 | G | A | [symbol] | CED84443 |
| X₃₇₆₈ | M4 | 78 | 301815 | T | C | [symbol] | CED84443 |
| X₃₇₆₉ | M4 | 78 | 302700 | A | G | [symbol] | CED84443 |
| X₃₇₇₀ | M4 | 78 | 333312 | A | G | [symbol] | CED84452 |
| X₃₇₇₁ | M4 | 78 | 415432 | G | A | [symbol] | CED84479 |
| X₃₇₇₂ | M4 | 78 | 444292 | C | T | [symbol] | CED84490 |
| X₃₇₇₃ | M4 | 78 | 462728 | G | A | [symbol] | CED84497 |
| X₃₇₇₄ | M4 | 78 | 506703 | G | A | [symbol] | CED84508 |
| X₃₇₇₅ | M4 | 78 | 626958 | C | A | [symbol] | CED84549 |
| X₃₇₇₆ | M4 | 78 | 631891 | C | T | [symbol] | CED84551 |
| X₃₇₇₇ | M4 | 78 | 658932 | G | A | [symbol] | CED84561 |
| X₃₇₇₈ | M4 | 78 | 708376 | C | T | [symbol] | CED84580 |
| X₃₇₇₉ | M4 | 78 | 715700 | G | A | [symbol] | CED84582 |
| X₃₇₈₀ | M4 | 78 | 763771 | G | A | [symbol] | CED84600 |
| X₃₇₈₁ | M4 | 78 | 774252 | G | A | [symbol] | CED84602 |
| X₃₇₈₂ | M4 | 78 | 875825 | C | T | [symbol] | CED84633 |
| X₃₇₈₃ | M4 | 78 | 895505 | C | T | [symbol] | CED84642 |
| X₃₇₈₄ | M4 | 78 | 904287 | G | A | [symbol] | CED84646 |
| X₃₇₈₅ | M4 | 78 | 905457 | A | G | [symbol] | CED84645 |
| X₃₇₈₆ | M4 | 78 | 952815 | G | A | [symbol] | CED84662 |
| X₃₇₈₇ | M4 | 78 | 952860 | G | A | [symbol] | CED84662 |
| X₃₇₈₈ | M4 | 78 | 1023381 | G | A | [symbol] | CED84688 |
| X₃₇₈₉ | M4 | 78 | 1067609 | G | A | [symbol] | CED84705 |
| X₃₇₉₀ | M4 | 78 | 1086537 | C | T | [symbol] | CED84713 |
| X₃₇₉₁ | M4 | 78 | 1095322 | C | T | [symbol] | CED84715 |
| X₃₇₉₂ | M4 | 78 | 1111002 | G | A | [symbol] | CED84721 |
| X₃₇₉₃ | M4 | 78 | 1115511 | G | A | [symbol] | CED84723 |
| X₃₇₉₄ | M4 | 78 | 1118856 | C | T | [symbol] | CED84724 |
| X₃₇₉₅ | M4 | 78 | 1199323 | C | T | [symbol] | CED84746 |
| X₃₇₉₆ | M4 | 78 | 1213556 | G | A | [symbol] | CED84752 |
| X₃₇₉₇ | M4 | 78 | 1216573 | C | T | [symbol] | CED84752 |
| X₃₇₉₈ | M4 | 78 | 1247678 | C | T | [symbol] | CED84761 |
| X₃₇₉₉ | M4 | 78 | 1302286 | C | T | [symbol] | CED84782 |
| X₃₈₀₀ | M4 | 78 | 1315648 | C | T | [symbol] | CED84788 |
| X₃₈₀₁ | M4 | 78 | 1317124 | G | A | [symbol] | CED84787 |
| X₃₈₀₂ | M4 | 78 | 1344640 | C | T | [symbol] | CED84795 |
| X₃₈₀₃ | M4 | 78 | 1360288 | G | A | [symbol] | CED84802 |
| X₃₈₀₄ | M4 | 78 | 1382780 | G | A | [symbol] | CED84812 |
| X₃₈₀₅ | M4 | 78 | 1397982 | G | A | [symbol] | CED84818 |
| X₃₈₀₆ | M4 | 78 | 1410781 | G | A | [symbol] | CED84825 |
| X₃₈₀₇ | M4 | 78 | 1426722 | C | T | [symbol] | CED84829 |
| X₃₈₀₈ | M4 | 78 | 1475803 | G | A | [symbol] | CED84845 |
| X₃₈₀₉ | M4 | 78 | 1532973 | G | A | [symbol] | CED84857 |
| X₃₈₁₀ | M4 | 78 | 1563246 | C | T | [symbol] | CED84865 |
| X₃₈₁₁ | M4 | 78 | 1568326 | C | T | [symbol] | CED84868 |
| X₃₈₁₂ | M4 | 78 | 1578844 | G | A | [symbol] | CED84871 |
| X₃₈₁₃ | M4 | 78 | 1609850 | C | T | [symbol] | CED84880 |
| X₃₈₁₄ | M4 | 78 | 1642170 | G | A | [symbol] | CED84889 |
| X₃₈₁₅ | M4 | 78 | 1660408 | G | A | [symbol] | CED84897 |
| X₃₈₁₆ | M4 | 78 | 1673601 | C | T | [symbol] | CED84903 |
| X₃₈₁₇ | M4 | 78 | 1709344 | G | A | [symbol] | CED84917 |
| X₃₈₁₈ | M4 | 78 | 1742796 | G | A | [symbol] | CED84926 |
| X₃₈₁₉ | M4 | 79 | 65 | G | A | [symbol] | CDZ96674 |
| X₃₈₂₀ | M4 | 79 | 6477 | T | C | [symbol] | CDZ96674- |
| | | | | | | | CDZ96675 |
| X₃₈₂₁ | M4 | 79 | 57804 | G | A | [symbol] | CDZ96687 |
| X₃₈₂₂ | M4 | 79 | 64658 | C | T | [symbol] | CDZ96688 |
| X₃₈₂₃ | M4 | 79 | 65402 | C | T | [symbol] | CDZ96688 |
| X₃₈₂₄ | M4 | 79 | 132683 | C | T | [symbol] | CDZ96713 |
| X₃₈₂₅ | M4 | 79 | 147578 | G | A | [symbol] | CDZ96719 |
| X₃₈₂₆ | M4 | 79 | 255780 | G | A | [symbol] | CDZ96757 |
| X₃₈₂₇ | M4 | 79 | 281783 | C | T | [symbol] | CDZ96768 |
| X₃₈₂₈ | M4 | 79 | 307021 | C | T | [symbol] | CDZ96777 |
| X₃₈₂₉ | M4 | 79 | 345646 | G | A | [symbol] | CDZ96789 |
| X₃₈₃₀ | M4 | 79 | 346823 | G | A | [symbol] | CDZ96789 |
| X₃₈₃₁ | M4 | 79 | 368176 | G | A | [symbol] | CDZ96795 |
| X₃₈₃₂ | M4 | 79 | 406184 | G | A | [symbol] | CDZ96808 |
| X₃₈₃₃ | M4 | 79 | 412057 | T | C | [symbol] | CDZ96811 |
| X₃₈₃₄ | M4 | 79 | 412661 | G | A | [symbol] | CDZ96811 |
| X₃₈₃₅ | M4 | 79 | 492523 | C | T | [symbol] | CDZ96842 |
| X₃₈₃₆ | M4 | 79 | 526910 | C | T | [symbol] | CDZ96854 |
| X₃₈₃₇ | M4 | 79 | 552798 | C | T | [symbol] | CDZ96861 |
| X₃₈₃₈ | M4 | 79 | 573293 | C | T | [symbol] | CDZ96868 |
| X₃₈₃₉ | M4 | 79 | 575411 | C | T | [symbol] | CDZ96868 |
| X₃₈₄₀ | M4 | 79 | 579674 | G | A | [symbol] | CDZ96871 |
| X₃₈₄₁ | M4 | 79 | 611702 | C | T | [symbol] | CDZ96881 |
| X₃₈₄₂ | M4 | 79 | 617057 | C | T | [symbol] | CDZ96882 |
| X₃₈₄₃ | M4 | 79 | 679140 | C | T | [symbol] | CDZ96904 |
| X₃₈₄₄ | M4 | 79 | 696174 | G | A | [symbol] | CDZ96911 |
| X₃₈₄₅ | M4 | 79 | 735053 | T | C | [symbol] | CDZ96928 |
| X₃₈₄₆ | M4 | 79 | 748083 | G | T | [symbol] | CDZ96929 |
| X₃₈₄₇ | M4 | 79 | 758025 | G | A | [symbol] | CDZ96931 |
| X₃₈₄₈ | M4 | 79 | 759403 | C | T | [symbol] | CDZ96931 |
| X₃₈₄₉ | M4 | 79 | 759589 | G | A | [symbol] | CDZ96932 |
| X₃₈₅₀ | M4 | 79 | 759659 | G | A | [symbol] | CDZ96931 |
| X₃₈₅₁ | M4 | 79 | 760430 | T | C | [symbol] | CDZ96932 |
| X₃₈₅₂ | M4 | 79 | 760458 | G | T | [symbol] | CDZ96932 |
| X₃₈₅₃ | M4 | 79 | 760541 | A | G | [symbol] | CDZ96932 |
| X₃₈₅₄ | M4 | 79 | 760891 | A | G | [symbol] | CDZ96932 |
| X₃₈₅₅ | M4 | 79 | 760988 | G | T | [symbol] | CDZ96932 |
| X₃₈₅₆ | M4 | 79 | 761056 | T | C | [symbol] | CDZ96932 |
| X₃₈₅₇ | M4 | 79 | 761210 | T | C | [symbol] | CDZ96932 |
| X₃₈₅₈ | M4 | 79 | 768537 | A | G | [symbol] | CDZ96933 |
| X₃₈₅₉ | M4 | 79 | 786064 | A | G | [symbol] | CDZ96934 |
| X₃₈₆₀ | M4 | 79 | 798799 | C | T | [symbol] | CDZ96939 |
| X₃₈₆₁ | M4 | 79 | 830724 | C | G | [symbol] | CDZ96950 |
| X₃₈₆₂ | M4 | 79 | 874161 | G | A | [symbol] | CDZ96965 |
| X₃₈₆₃ | M4 | 79 | 907000 | C | T | [symbol] | CDZ96976 |
| X₃₈₆₄ | M4 | 79 | 908162 | G | A | [symbol] | CDZ96976 |
| X₃₈₆₅ | M4 | 79 | 914302 | C | T | [symbol] | CDZ96977 |
| X₃₈₆₆ | M4 | 79 | 920544 | C | T | [symbol] | CDZ96982 |
| X₃₈₆₇ | M4 | 79 | 922582 | G | A | [symbol] | CDZ96983 |
| X₃₈₆₈ | M4 | 79 | 933234 | G | A | [symbol] | CDZ96987 |
| X₃₈₆₉ | M4 | 79 | 940003 | C | T | [symbol] | CDZ96991 |
| X₃₉₇₀ | M4 | 79 | 962607 | G | A | [symbol] | CDZ96997 |
| X₃₈₇₁ | M4 | 79 | 973493 | C | T | [symbol] | CDZ97000 |
| X₃₈₇₂ | M4 | 79 | 1000786 | A | G | [symbol] | CDZ97007 |
| X₃₈₇₃ | M4 | 79 | 1021855 | G | A | [symbol] | CDZ97016 |
| X₃₈₇₄ | M4 | 79 | 1082233 | G | A | [symbol] | CDZ97037 |
| X₃₈₇₅ | M4 | 79 | 1107695 | C | T | [symbol] | CDZ97046 |
| X₃₈₇₆ | M4 | 79 | 1117040 | C | T | [symbol] | CDZ97047 |
| X₃₈₇₇ | M4 | 79 | 1118598 | C | T | [symbol] | CDZ97048 |
| X₃₈₇₈ | M4 | 79 | 1123288 | C | T | [symbol] | CDZ97049 |
| X₃₈₇₉ | M4 | 79 | 1140763 | G | A | [symbol] | CDZ97053 |
| X₃₈₈₀ | M4 | 79 | 1151678 | C | T | [symbol] | CDZ97060 |
| X₃₈₈₁ | M4 | 79 | 1176587 | T | A | [symbol] | CDZ97066 |
| X₃₈₈₂ | M4 | 79 | 1229129 | G | A | [symbol] | CDZ97086 |
| X₃₈₈₃ | M4 | 79 | 1231740 | C | T | [symbol] | CDZ97087 |
| X₃₈₈₄ | M4 | 79 | 1286778 | T | C | [symbol] | CDZ97106 |
| X₃₈₈₅ | M4 | 79 | 1302166 | G | A | [symbol] | CDZ97112 |
| X₃₈₈₆ | M4 | 79 | 1318034 | C | T | [symbol] | CDZ97117 |
| X₃₈₈₇ | M4 | 79 | 1336766 | C | T | [symbol] | CDZ97121 |
| X₃₈₈₈ | M4 | 79 | 1344403 | C | T | [symbol] | CDZ97124 |
| X₃₈₈₉ | M4 | 79 | 1430954 | G | A | [symbol] | CDZ97152 |
| X₃₈₉₀ | M4 | 79 | 1447480 | G | A | [symbol] | CDZ97156 |
| X₃₈₉₁ | M4 | 79 | 1472351 | C | T | [symbol] | CDZ97165 |
| X₃₈₉₂ | M4 | 79 | 1540205 | C | T | [symbol] | CDZ97186 |
| X₃₈₉₃ | M4 | 79 | 1624415 | G | A | [symbol] | CDZ97217 |
| X₃₈₉₄ | M4 | 79 | 1674448 | G | A | [symbol] | CDZ97228 |
| X₃₈₉₅ | M4 | 79 | 1677774 | C | T | [symbol] | CDZ97229 |
| X₃₈₉₆ | M4 | 79 | 1696776 | G | A | [symbol] | CDZ97234 |
| X₃₈₉₇ | M4 | 79 | 1788096 | G | A | [symbol] | CDZ97262 |
| X₃₈₉₈ | M4 | 79 | 1791482 | G | A | [symbol] | CDZ97263 |
| X₃₈₉₉ | M4 | 79 | 1797660 | C | T | [symbol] | CDZ97265 |
| X₃₉₀₀ | M4 | 79 | 1797676 | G | A | [symbol] | CDZ97265 |
| X₃₉₀₁ | M4 | 79 | 1819746 | C | T | [symbol] | CDZ97273 |
| X₃₉₀₂ | M4 | 79 | 1842448 | G | A | [symbol] | CDZ97282 |
| X₃₉₀₃ | M4 | 79 | 1855037 | A | G | [symbol] | CDZ97285 |
| X₃₉₀₄ | M4 | 79 | 1859220 | A | G | [symbol] | CDZ97291 |
| X₃₉₀₅ | M4 | 79 | 1877329 | G | A | [symbol] | CDZ97295 |
| X₃₉₀₆ | M4 | 79 | 1883004 | A | G | [symbol] | CDZ97298 |
| X₃₉₀₇ | M4 | 79 | 1883021 | C | A | [symbol] | CDZ97298 |
| X₃₉₀₈ | M4 | 79 | 1883115 | T | C | [symbol] | CDZ97298 |
| X₃₉₀₉ | M4 | 79 | 1912360 | G | A | [symbol] | CDZ97307 |
| X₃₉₁₀ | M4 | 79 | 1934434 | G | A | [symbol] | CDZ97316 |
| X₃₉₁₁ | M4 | 79 | 2013304 | G | A | [symbol] | CDZ97344 |
| X₃₉₁₂ | M4 | 79 | 2013361 | C | T | [symbol] | CDZ97344 |
| X₃₉₁₃ | M4 | 79 | 2115870 | G | A | [symbol] | CDZ97380 |
| X₃₉₁₄ | M4 | 79 | 2121041 | G | A | [symbol] | CDZ97380 |
| X₃₉₁₅ | M4 | 79 | 2152573 | C | T | [symbol] | CDZ97392 |
| X₃₉₁₆ | M4 | 79 | 2182096 | G | A | [symbol] | CDZ97403 |
| X₃₉₁₇ | M4 | 79 | 2188410 | G | A | [symbol] | CDZ97405 |
| X₃₉₁₈ | M4 | 79 | 2220254 | C | T | [symbol] | CDZ97414 |
| X₃₉₁₉ | M4 | 79 | 2268540 | C | T | [symbol] | CDZ97435 |
| X₃₉₂₀ | M4 | 79 | 2315869 | A | C | [symbol] | CDZ97452 |
| X₃₉₂₁ | M4 | 79 | 2339881 | C | G | [symbol] | CDZ97460 |
| X₃₉₂₂ | M4 | 79 | 2340326 | G | A | [symbol] | CDZ97462 |
| X₃₉₂₃ | M4 | 79 | 2340636 | T | C | [symbol] | CDZ97462 |
| X₃₉₂₄ | M4 | 85 | 512 | A | G | [symbol] | |
| X₃₉₂₅ | M4 | 85 | 516 | G | A | [symbol] | |
| X₃₉₂₆ | M4 | 85 | 521 | C | T | [symbol] | |
| X₃₉₂₇ | M4 | 85 | 522 | A | G | [symbol] | |
| X₃₉₂₈ | M4 | 88 | 119 | C | T | [symbol] | CDZ97464 |
| X₃₉₂₉ | M4 | 88 | 196 | G | A | [symbol] | CDZ97464 |
| X₃₉₃₀ | M4 | 88 | 898 | C | T | [symbol] | CDZ97464 |
| X₃₉₃₁ | M4 | 99 | 245 | G | A | [symbol] | |
| X₃₉₃₂ | M4 | 105 | 258 | A | G | [symbol] | CDZ97474 |
| X₃₉₃₃ | M4 | 105 | 429 | C | T | [symbol] | CDZ97474 |
| X₃₉₃₄ | M4 | 109 | 396 | T | C | [symbol] | |
| X₃₉₃₅ | M4 | 118 | 396 | C | T | [symbol] | CDZ97478 |
| X₃₉₃₆ | M4 | 118 | 870 | G | A | [symbol] | CDZ97478 |
| X₃₉₃₇ | M4 | 118 | 1491 | G | A | [symbol] | CDZ97478 |
| X₃₉₃₈ | M4 | 121 | 452 | G | A | [symbol] | |
| X₃₉₃₉ | M4 | 121 | 907 | T | C | [symbol] | |
| X₃₉₄₀ | M4 | 124 | 65147 | C | T | [symbol] | CDZ97499 |
| X₃₉₄₁ | M4 | 124 | 72117 | G | A | [symbol] | CDZ97501 |
| X₃₉₄₂ | M4 | 124 | 72760 | G | A | [symbol] | CDZ97501 |
| X₃₉₄₃ | M4 | 124 | 76965 | A | T | [symbol] | CDZ97503 |
| X₃₉₄₄ | M4 | 124 | 94611 | G | A | [symbol] | CDZ97507 |
| X₃₉₄₅ | M4 | 124 | 111749 | G | A | [symbol] | CDZ97512 |
| X₃₉₄₆ | M4 | 124 | 156052 | G | A | [symbol] | CDZ97524 |
| X₃₉₄₇ | M4 | 124 | 166988 | C | T | [symbol] | CDZ97527 |
| X₃₉₄₈ | M4 | 124 | 206541 | G | A | [symbol] | CDZ97541 |
| X₃₉₄₉ | M4 | 124 | 207992 | C | T | [symbol] | CDZ97541 |
| X₃₉₅₀ | M4 | 124 | 222249 | C | T | [symbol] | CDZ97547 |
| X₃₉₅₁ | M4 | 125 | 16379 | G | A | [symbol] | CDZ97565 |
| X₃₉₅₂ | M4 | 125 | 35864 | T | C | [symbol] | CDZ97573 |
| X₃₉₅₃ | M4 | 127 | 1558 | T | C | [symbol] | |
| X₃₉₅₄ | M4 | 129 | 299 | G | A | [symbol] | CDZ97577 |
| X₃₉₅₅ | M4 | 129 | 433 | G | A | [symbol] | CDZ97577 |
| X₃₉₅₆ | M4 | 129 | 856 | G | A | [symbol] | CDZ97577 |
| X₃₉₅₇ | M4 | 129 | 1013 | C | T | [symbol] | CDZ97577 |
| X₃₉₅₈ | M4 | 130 | 67 | C | T | [symbol] | CDZ97578 |
| X₃₉₅₉ | M4 | 141 | 15764 | C | T | [symbol] | CDZ97587 |
| X₃₉₆₀ | M4 | 149 | 1663 | A | G | [symbol] | CDZ97598 |
| X₃₉₆₁ | M4 | 149 | 2074 | T | G | [symbol] | CDZ97598 |
| X₃₉₆₂ | M4 | 149 | 2453 | C | T | [symbol] | CDZ97598 |
| X₃₉₆₃ | M4 | 159 | 106 | A | C | [symbol] | |
| X₃₉₆₄ | M4 | 162 | 47699 | G | A | [symbol] | CDZ97619 |
| X₃₉₆₅ | M4 | 162 | 68192 | C | G | [symbol] | CDZ97625 |
| X₃₉₆₆ | M4 | 162 | 70405 | A | G | [symbol] | CDZ97625 |
| X₃₉₆₇ | M4 | 162 | 91190 | C | T | [symbol] | CDZ97631 |
| X₃₉₆₈ | M4 | 162 | 96194 | G | A | [symbol] | CDZ97631 |
| X₃₉₆₉ | M4 | 162 | 112967 | C | T | [symbol] | CDZ97638 |
| X₃₉₇₀ | M4 | 162 | 117736 | G | A | [symbol] | CDZ97639 |
| X₃₉₇₁ | M4 | 162 | 223407 | C | T | [symbol] | CDZ97674 |
| X₃₉₇₂ | M4 | 162 | 231146 | C | T | [symbol] | CDZ97676 |
| X₃₉₇₃ | M4 | 162 | 233092 | C | T | [symbol] | CDZ97676 |
| X₃₉₇₄ | M4 | 162 | 238126 | C | T | [symbol] | CDZ97680 |
| X₃₉₇₅ | M4 | 162 | 243753 | G | A | [symbol] | CDZ97680 |
| X₃₉₇₆ | M4 | 162 | 308369 | T | C | [symbol] | CDZ97702 |
| X₃₉₇₇ | M4 | 162 | 320701 | G | A | [symbol] | CDZ97703 |
| X₃₉₇₈ | M4 | 162 | 321460 | C | G | [symbol] | CDZ97703 |
| X₃₉₇₉ | M4 | 162 | 321463 | A | C | [symbol] | CDZ97703 |
| X₃₉₈₀ | M4 | 162 | 322591 | G | A | [symbol] | CDZ97703 |
| X₃₉₈₁ | M4 | 162 | 323448 | T | G | [symbol] | CDZ97703 |
| X₃₉₈₂ | M4 | 162 | 323451 | T | G | [symbol] | CDZ97703 |
| X₃₉₈₃ | M4 | 162 | 324114 | T | C | [symbol] | CDZ97703 |
| X₃₉₈₄ | M4 | 162 | 324139 | C | T | [symbol] | CDZ97703 |
| X₃₉₈₅ | M4 | 162 | 324568 | A | G | [symbol] | CDZ97703 |
| X₃₉₈₆ | M4 | 162 | 351016 | C | T | [symbol] | CDZ97711 |
| X₃₉₈₇ | M4 | 162 | 360320 | G | A | [symbol] | CDZ97714 |
| X₃₉₈₈ | M4 | 162 | 398165 | C | T | [symbol] | CDZ97730 |
| X₃₉₈₉ | M4 | 162 | 408274 | C | T | [symbol] | CDZ97733 |
| X₃₉₉₀ | M4 | 162 | 424391 | C | T | [symbol] | CDZ97740 |
| X₃₉₉₁ | M4 | 162 | 444123 | T | C | [symbol] | CDZ97748 |
| X₃₉₉₂ | M4 | 162 | 453186 | G | A | [symbol] | CDZ97750 |
| X₃₉₉₃ | M4 | 162 | 456498 | C | T | [symbol] | CDZ97752 |
| X₃₉₉₄ | M4 | 162 | 467207 | C | T | [symbol] | CDZ97755 |
| X₃₉₉₅ | M4 | 162 | 476267 | C | T | [symbol] | CDZ97760 |
| X₃₉₉₆ | M4 | 162 | 480722 | G | A | [symbol] | CDZ97761 |
| X₃₉₉₇ | M4 | 162 | 491906 | G | A | [symbol] | CDZ97764 |
| X₃₉₉₈ | M4 | 162 | 492101 | G | A | [symbol] | CDZ97764 |
| X₃₉₉₉ | M4 | 162 | 501886 | C | T | [symbol] | CDZ97769 |
| X₄₀₀₀ | M4 | 162 | 618658 | C | T | [symbol] | CDZ97808 |
| X₄₀₀₁ | M4 | 162 | 631700 | G | A | [symbol] | CDZ97811 |
| X₄₀₀₂ | M4 | 162 | 632311 | G | A | [symbol] | CDZ97814 |
| X₄₀₀₃ | M4 | 162 | 633321 | G | A | [symbol] | CDZ97814 |
| X₄₀₀₄ | M4 | 162 | 633633 | G | A | [symbol] | CDZ97814 |
| X₄₀₀₅ | M4 | 162 | 640005 | C | T | [symbol] | CDZ97815 |
| X₄₀₀₆ | M4 | 162 | 645194 | G | A | [symbol] | CDZ97815 |
| X₄₀₀₇ | M4 | 162 | 690472 | C | T | [symbol] | CDZ97827 |
| X₄₀₀₈ | M4 | 162 | 738479 | G | A | [symbol] | CDZ97842 |
| X₄₀₀₉ | M4 | 162 | 738675 | G | A | [symbol] | CDZ97842 |
| X₄₀₁₀ | M4 | 162 | 738686 | C | T | [symbol] | CDZ97842 |
| X₄₀₁₁ | M4 | 162 | 808830 | G | A | [symbol] | CDZ97869 |
| X₄₀₁₂ | M4 | 162 | 825209 | G | A | [symbol] | CDZ97877 |
| X₄₀₁₃ | M4 | 162 | 841825 | A | G | [symbol] | CDZ97882 |
| X₄₀₁₄ | M4 | 162 | 871911 | C | T | [symbol] | CDZ97890 |
| X₄₀₁₅ | M4 | 162 | 967098 | A | G | [symbol] | CDZ97922 |
| X₄₀₁₆ | M4 | 162 | 972973 | G | A | [symbol] | CDZ97925 |
| X₄₀₁₇ | M4 | 163 | 727 | A | G | [symbol] | |
| X₄₀₁₈ | M4 | 169 | 1056 | C | T | [symbol] | |
| X₄₀₁₉ | M4 | 189 | 12794 | C | T | [symbol] | CDZ97963 |
| X₄₀₂₀ | M4 | 189 | 126573 | G | A | [symbol] | CDZ97996 |
| X₄₀₂₁ | M4 | 189 | 127854 | C | T | [symbol] | CDZ97998 |
| X₄₀₂₂ | M4 | 189 | 194647 | A | G | [symbol] | CDZ98020 |
| X₄₀₂₃ | M4 | 189 | 194665 | A | G | [symbol] | CDZ98020 |
| X₄₀₂₄ | M4 | 189 | 211865 | C | T | [symbol] | CDZ98028 |
| X₄₀₂₅ | M4 | 189 | 260617 | A | T | [symbol] | CDZ98041 |
| X₄₀₂₆ | M4 | 189 | 300343 | C | T | [symbol] | CDZ98056 |
| X₄₀₂₇ | M4 | 189 | 303106 | G | A | [symbol] | CDZ98057 |
| X₄₀₂₈ | M4 | 189 | 323680 | C | T | [symbol] | CDZ98063 |
| X₄₀₂₉ | M4 | 189 | 344057 | C | T | [symbol] | CDZ98068 |
| X₄₀₃₀ | M4 | 189 | 371247 | G | A | [symbol] | CDZ98078 |
| X₄₀₃₁ | M4 | 189 | 452298 | G | A | [symbol] | CDZ98106 |
| X₄₀₃₂ | M4 | 191 | 342 | A | G | [symbol] | CDZ98107 |
| X₄₀₃₃ | M4 | 191 | 347 | C | T | [symbol] | CDZ98107 |
| X₄₀₃₄ | M4 | 191 | 427 | C | T | [symbol] | CDZ98107 |
| X₄₀₃₅ | M4 | 191 | 451 | C | T | [symbol] | CDZ98107 |
| X₄₀₃₆ | M4 | 191 | 487 | A | G | [symbol] | CDZ98107 |
| X₄₀₃₇ | M4 | 197 | 624 | C | T | [symbol] | CDZ98111 |
| X₄₀₃₈ | M4 | 198 | 202 | C | A | [symbol] | |
| X₄₀₃₉ | M4 | 198 | 203 | G | A | [symbol] | |
| X₄₀₄₀ | M4 | 198 | 238 | C | T | [symbol] | |
| X₄₀₄₁ | M4 | 198 | 265 | C | T | [symbol] | |
| X₄₀₄₂ | M4 | 198 | 452 | G | A | [symbol] | |
| X₄₀₄₃ | M4 | 199 | 688 | C | T | [symbol] | |
| X₄₀₄₄ | M4 | 199 | 911 | C | T | [symbol] | |
| X₄₀₄₅ | M4 | 199 | 971 | C | T | [symbol] | |
| X₄₀₄₆ | M4 | 199 | 1218 | C | T | [symbol] | |
| X₄₀₄₇ | M4 | 202 | 171 | C | T | [symbol] | |
| X₄₀₄₈ | M4 | 205 | 360 | C | T | [symbol] | CDZ98112 |
| X₄₀₄₉ | M4 | 205 | 981 | C | T | [symbol] | CDZ98112 |
| X₄₀₅₀ | M4 | 206 | 406 | G | A | [symbol] | |
| X₄₀₅₁ | M4 | 208 | 117 | G | A | [symbol] | |
| X₄₀₅₂ | M4 | 208 | 476 | G | A | [symbol] | |
| X₄₀₅₃ | M4 | 208 | 616 | G | A | [symbol] | |
| X₄₀₅₄ | M4 | 208 | 935 | G | A | [symbol] | |
| X₄₀₅₅ | M4 | 209 | 312 | C | T | [symbol] | CDZ98113 |
| X₄₀₅₆ | M4 | 214 | 197 | C | G | [symbol] | CDZ98116 |
| X₄₀₅₇ | M4 | 220 | 116 | C | G | [symbol] | |
| X₄₀₅₈ | M4 | 223 | 93 | G | A | [symbol] | CDZ98118 |
| X₄₀₅₉ | M4 | 223 | 102 | A | G | [symbol] | CDZ98118 |
| X₄₀₆₀ | M4 | 223 | 133 | A | G | [symbol] | CDZ98118 |
| X₄₀₆₁ | M4 | 223 | 150 | T | C | [symbol] | CDZ98118 |
| X₄₀₆₂ | M4 | 223 | 155 | A | C | [symbol] | CDZ98118 |
| X₄₀₆₃ | M4 | 223 | 158 | T | C | [symbol] | CDZ98118 |
| X₄₀₆₄ | M4 | 223 | 160 | C | T | [symbol] | CDZ98118 |
| X₄₀₆₅ | M4 | 223 | 175 | G | A | [symbol] | CDZ98118 |
| X₄₀₆₆ | M4 | 223 | 177 | A | G | [symbol] | CDZ98118 |
| X₄₀₆₇ | M4 | 223 | 188 | A | G | [symbol] | CDZ98118 |
| X₄₀₆₈ | M4 | 223 | 192 | C | A | [symbol] | CDZ98118 |
| X₄₀₆₉ | M4 | 223 | 194 | T | C | [symbol] | CDZ98118 |
| X₄₀₇₀ | M4 | 223 | 195 | T | G | [symbol] | CDZ98118 |
| X₄₀₇₁ | M4 | 223 | 197 | T | C | [symbol] | CDZ98118 |
| X₄₀₇₂ | M4 | 223 | 202 | G | C | [symbol] | CDZ98118 |
| X₄₀₇₃ | M4 | 223 | 205 | C | T | [symbol] | CDZ98118 |
| X₄₀₇₄ | M4 | 224 | 27 | T | A | [symbol] | |
| X₄₀₇₅ | M4 | 225 | 317 | C | T | [symbol] | |
| X₄₀₇₆ | M4 | 227 | 202 | G | A | [symbol] | |
| X₄₀₇₇ | M4 | 232 | 340 | G | A | [symbol] | CDZ98119 |
| X₄₀₇₈ | M4 | 232 | 1379 | C | T | [symbol] | CDZ98119 |
| X₄₀₇₉ | M4 | 232 | 1521 | C | T | [symbol] | CDZ98119 |
| X₄₀₈₀ | M4 | 232 | 1662 | G | A | [symbol] | CDZ98119 |
| X₄₀₈₁ | M4 | 232 | 1761 | C | T | [symbol] | CDZ98119 |
| X₄₀₈₂ | M4 | 232 | 2027 | C | T | [symbol] | CDZ98119 |
| X₄₀₈₃ | M4 | 232 | 3060 | C | T | [symbol] | CDZ98120 |
| X₄₀₈₄ | M4 | 232 | 3284 | C | T | [symbol] | CDZ98119 |
| X₄₀₈₅ | M4 | 232 | 4437 | G | A | [symbol] | CDZ98121 |
| X₄₀₈₆ | M4 | 232 | 4561 | C | T | [symbol] | CDZ98120 |
| X₄₀₈₇ | M4 | 242 | 7334 | C | T | [symbol] | CDZ98125 |
| X₄₀₈₈ | M4 | 242 | 41710 | G | A | [symbol] | CDZ98131 |
| X₄₀₈₉ | M4 | 242 | 50262 | G | A | [symbol] | CDZ98135 |
| X₄₀₉₀ | M4 | 242 | 107587 | G | A | [symbol] | CDZ98153 |
| X₄₀₉₁ | M4 | 242 | 213399 | C | T | [symbol] | CDZ98185 |
| X₄₀₉₂ | M4 | 242 | 213986 | G | A | [symbol] | CDZ98185 |
| X₄₀₉₃ | M4 | 242 | 227271 | C | T | [symbol] | CDZ98191 |
| X₄₀₉₄ | M4 | 242 | 233088 | G | A | [symbol] | CDZ98193 |
| X₄₀₉₅ | M4 | 242 | 310353 | G | A | [symbol] | CDZ98216 |
| X₄₀₉₆ | M4 | 242 | 357209 | G | A | [symbol] | CDZ98233 |
| X₄₀₉₇ | M4 | 242 | 404132 | G | A | [symbol] | CDZ98248 |
| X₄₀₉₈ | M4 | 242 | 412676 | G | A | [symbol] | CDZ98249 |
| X₄₀₉₉ | M4 | 242 | 437941 | G | A | [symbol] | CDZ98258 |
| X₄₁₀₀ | M4 | 242 | 454709 | C | T | [symbol] | CDZ98263 |
| X₄₁₀₁ | M4 | 242 | 485936 | G | A | [symbol] | CDZ98270 |
| X₄₁₀₂ | M4 | 242 | 492389 | G | A | [symbol] | CDZ98274 |
| X₄₁₀₃ | M4 | 242 | 514780 | C | T | [symbol] | CDZ98282 |
| X₄₁₀₄ | M4 | 242 | 528340 | G | A | [symbol] | CDZ98288 |
| X₄₁₀₅ | M4 | 242 | 542663 | G | A | [symbol] | CDZ98290 |
| X₄₁₀₆ | M4 | 242 | 559999 | G | A | [symbol] | CDZ98297 |
| X₄₁₀₇ | M4 | 242 | 577367 | G | A | [symbol] | CDZ98302 |
| X₄₁₀₈ | M4 | 242 | 602456 | G | A | [symbol] | CDZ98308 |
| X₄₁₀₉ | M4 | 242 | 602531 | G | A | [symbol] | CDZ98308 |
| X₄₁₁₀ | M4 | 242 | 604704 | C | T | [symbol] | CDZ98309 |
| X₄₁₁₁ | M4 | 242 | 641669 | G | A | [symbol] | CDZ98323 |
| X₄₁₁₂ | M4 | 248 | 99 | A | G | [symbol] | |
| X₄₁₁₃ | M4 | 249 | 42295 | C | T | [symbol] | CED84942 |
| X₄₁₁₄ | M4 | 249 | 72016 | C | T | [symbol] | CED84950 |
| X₄₁₁₅ | M4 | 249 | 157550 | C | T | [symbol] | CED84983 |
| X₄₁₁₆ | M4 | 249 | 191304 | C | T | [symbol] | CED84988 |
| X₄₁₁₇ | M4 | 249 | 253494 | C | T | [symbol] | CED85008 |
| X₄₁₁₈ | M4 | 249 | 272075 | C | T | [symbol] | CED85013 |
| X₄₁₁₉ | M4 | 249 | 305975 | G | A | [symbol] | CED85023 |
| X₄₁₂₀ | M4 | 249 | 311154 | G | A | [symbol] | CED85025 |
| X₄₁₂₁ | M4 | 249 | 342990 | G | A | [symbol] | CED85036 |
| X₄₁₂₂ | M4 | 249 | 370636 | T | C | [symbol] | CED85048 |
| X₄₁₂₃ | M4 | 249 | 371535 | G | A | [symbol] | CED85048 |
| X₄₁₂₄ | M4 | 249 | 377814 | G | A | [symbol] | CED85051 |
| X₄₁₂₅ | M4 | 249 | 445429 | G | A | [symbol] | CED85075 |
| X₄₁₂₆ | M4 | 249 | 469645 | G | A | [symbol] | CED85087 |
| X₄₁₂₇ | M4 | 249 | 485782 | C | T | [symbol] | CED85089 |
| X₄₁₂₈ | M4 | 249 | 501310 | C | T | [symbol] | CED85093 |
| X₄₁₂₉ | M4 | 249 | 501510 | T | C | [symbol] | CED85093 |
| X₄₁₃₀ | M4 | 249 | 506067 | A | G | [symbol] | CED85094 |
| X₄₁₃₁ | M4 | 249 | 532943 | A | G | [symbol] | CED85099 |
| X₄₁₃₂ | M4 | 249 | 571922 | C | T | [symbol] | CED85115 |
| X₄₁₃₃ | M4 | 249 | 576070 | G | A | [symbol] | CED85118 |
| X₄₁₃₄ | M4 | 249 | 598579 | C | T | [symbol] | CED85125 |
| X₄₁₃₅ | M4 | 249 | 627104 | C | T | [symbol] | CED85133 |
| X₄₁₃₆ | M4 | 249 | 637944 | G | A | [symbol] | CED85135 |
| X₄₁₃₇ | M4 | 249 | 660408 | G | A | [symbol] | CED85144 |
| X₄₁₃₈ | M4 | 249 | 709267 | C | T | [symbol] | CED85162 |
| X₄₁₃₉ | M4 | 249 | 746655 | C | T | [symbol] | CED85172 |
| X₄₁₄₀ | M4 | 249 | 854220 | G | A | [symbol] | CED85201 |
| X₄₁₄₁ | M4 | 249 | 886063 | G | A | [symbol] | CED85208 |
| X₄₁₄₂ | M4 | 249 | 911274 | C | T | [symbol] | CED85218 |
| X₄₁₄₃ | M4 | 249 | 932606 | C | T | [symbol] | CED85223 |
| X₄₁₄₄ | M4 | 249 | 945434 | C | T | [symbol] | CED85227 |
| X₄₁₄₅ | M4 | 249 | 945727 | C | T | [symbol] | CED85227 |
| X₄₁₄₆ | M4 | 249 | 969333 | G | T | [symbol] | CED85238 |
| X₄₁₄₇ | M4 | 249 | 972975 | G | A | [symbol] | CED85240 |
| X₄₁₄₈ | M4 | 249 | 977170 | C | T | [symbol] | CED85242 |
| X₄₁₄₉ | M4 | 249 | 989520 | C | T | [symbol] | CED85243 |
| X₄₁₅₀ | M4 | 249 | 1003476 | G | A | [symbol] | CED85249 |
| X₄₁₅₁ | M4 | 249 | 1014098 | C | T | [symbol] | CED85252 |
| X₄₁₅₂ | M4 | 249 | 1062282 | G | A | [symbol] | CED85266 |
| X₄₁₅₃ | M4 | 249 | 1064359 | C | T | [symbol] | CED85265 |
| X₄₁₅₄ | M4 | 249 | 1076333 | G | A | [symbol] | CED85270 |
| X₄₁₅₅ | M4 | 249 | 1088841 | T | C | [symbol] | CED85274 |
| X₄₁₅₆ | M4 | 249 | 1127638 | C | T | [symbol] | CED85286 |
| X₄₁₅₇ | M4 | 249 | 1143228 | C | T | [symbol] | CED85292 |
| X₄₁₅₈ | M4 | 249 | 1144309 | G | A | [symbol] | CED85291 |
| X₄₁₅₉ | M4 | 249 | 1176977 | G | A | [symbol] | CED85303 |
| X₄₁₆₀ | M4 | 24 | 1195367 | G | A | [symbol] | CED85307 |
| X₄₁₆₁ | M4 | 24 | 1223330 | C | T | [symbol] | CED85317 |
| X₄₁₆₂ | M4 | 249 | 1230068 | C | T | [symbol] | CED85319 |
| X₄₁₆₃ | M4 | 249 | 1279596 | C | T | [symbol] | CED85335 |
| X₄₁₆₄ | M4 | 249 | 1299472 | C | T | [symbol] | CED85343 |
| X₄₁₆₅ | M4 | 249 | 1498029 | T | C | [symbol] | CED85415 |
| X₄₁₆₆ | M4 | 249 | 1498823 | T | C | [symbol] | CED85414 |
| X₄₁₆₇ | M4 | 249 | 1498829 | C | T | [symbol] | CED85414 |
| X₄₁₆₈ | M4 | 249 | 1499004 | T | C | [symbol] | CED85415 |
| X₄₁₆₉ | M4 | 249 | 1499008 | A | G | [symbol] | CED85415 |
| X₄₁₇₀ | M4 | 249 | 1502631 | G | T | [symbol] | CED85416 |
| X₄₁₇₁ | M4 | 249 | 1502641 | T | A | [symbol] | CED85416 |
| X₄₁₇₂ | M4 | 249 | 1502819 | T | G | [symbol] | CED85416 |
| X₄₁₇₃ | M4 | 249 | 1505138 | G | A | [symbol] | CED85416 |
| X₄₁₇₄ | M4 | 249 | 1518591 | T | A | [symbol] | CED85419 |
| X₄₁₇₅ | M4 | 249 | 1519431 | A | G | [symbol] | CED85419 |
| X₄₁₇₆ | M4 | 249 | 1535511 | G | A | [symbol] | CED85423 |
| X₄₁₇₇ | M4 | 249 | 1619036 | G | A | [symbol] | CED85450 |
| X₄₁₇₈ | M4 | 249 | 1621516 | G | A | [symbol] | CED85451 |
| X₄₁₇₉ | M4 | 249 | 1623151 | G | A | [symbol] | CED85451 |
| X₄₁₈₀ | M4 | 249 | 1653615 | T | G | [symbol] | CED85457 |
| X₄₁₈₁ | M4 | 249 | 1653962 | C | T | [symbol] | CED85458 |
| X₄₁₈₂ | M4 | 249 | 1666185 | C | T | [symbol] | CED85460 |
| X₄₁₈₃ | M4 | 249 | 1691321 | G | A | [symbol] | CED85467 |
| X₄₁₈₄ | M4 | 249 | 1726777 | C | T | [symbol] | CED85474 |
| X₄₁₈₅ | M4 | 249 | 1730645 | C | T | [symbol] | CED85477 |
| X₄₁₈₆ | M4 | 249 | 1734722 | G | A | [symbol] | CED85477 |
| X₄₁₈₇ | M4 | 249 | 1741408 | C | T | [symbol] | CED85480 |
| X₄₁₈₈ | M4 | 249 | 1780551 | A | G | [symbol] | CED85493 |
| X₄₁₈₉ | M4 | 249 | 1780569 | A | G | [symbol] | CED85493 |
| X₄₁₉₀ | M4 | 249 | 1801965 | G | A | [symbol] | CED85501 |
| X₄₁₉₁ | M4 | 249 | 1803575 | C | T | [symbol] | CED85502 |
| X₄₁₉₂ | M4 | 249 | 1803790 | G | A | [symbol] | CED85502 |
| X₄₁₉₃ | M4 | 249 | 1880762 | G | A | [symbol] | CED85525 |
| X₄₁₉₄ | M4 | 249 | 1915336 | C | T | [symbol] | CED85537 |
| X₄₁₉₅ | M4 | 249 | 1944026 | G | A | [symbol] | CED85545 |
| X₄₁₉₆ | M4 | 249 | 1977554 | G | A | [symbol] | CED85556 |
| X₄₁₉₇ | M4 | 249 | 1981230 | G | A | [symbol] | CED85557 |
| X₄₁₉₈ | M4 | 249 | 1988505 | C | T | [symbol] | CED85560 |
| X₄₁₉₉ | M4 | 249 | 2010712 | G | A | [symbol] | CED85564 |
| X₄₂₀₀ | M4 | 249 | 2015272 | G | A | [symbol] | CED85567 |
| X₄₂₀₁ | M4 | 249 | 2027477 | G | A | [symbol] | CED85573 |
| X₄₂₀₂ | M4 | 249 | 2063221 | G | A | [symbol] | CED85586 |
| X₄₂₀₃ | M4 | 249 | 2110956 | C | T | [symbol] | CED85603 |
| X₄₂₀₄ | M4 | 249 | 2124517 | C | T | [symbol] | CED85607 |
| X₄₂₀₅ | M4 | 249 | 2178506 | G | A | [symbol] | CED85622 |
| X₄₂₀₆ | M4 | 249 | 2198205 | G | A | [symbol] | CED85628 |
| X₄₂₀₇ | M4 | 249 | 2198412 | G | A | [symbol] | CED85628 |
| X₄₂₀₈ | M4 | 249 | 2223626 | G | A | [symbol] | CED85633 |
| X₄₂₀₉ | M4 | 249 | 2254072 | G | A | [symbol] | CED85640 |
| X₄₂₁₀ | M4 | 249 | 2255547 | G | C | [symbol] | CED85640 |
| X₄₂₁₁ | M4 | 251 | 1089 | T | C | [symbol] | |
| X₄₂₁₂ | M4 | 251 | 1135 | G | A | [symbol] | |
| X₄₂₁₃ | M4 | 252 | 512 | C | T | [symbol] | |
| X₄₂₁₄ | M4 | 252 | 524 | C | T | [symbol] | |
| X₄₂₁₅ | M4 | 258 | 1139 | A | T | [symbol] | |
| X₄₂₁₆ | M4 | 260 | 156 | G | A | [symbol] | |
| X₄₂₁₇ | M4 | 262 | 4049 | G | A | [symbol] | CDZ98330 |
| X₄₂₁₈ | M4 | 262 | 16863 | C | T | [symbol] | CDZ98334 |
| X₄₂₁₉ | M4 | 262 | 30347 | G | A | [symbol] | CDZ98338 |
| X₄₂₂₀ | M4 | 262 | 30359 | G | A | [symbol] | CDZ98338 |
| X₄₂₂₁ | M4 | 262 | 81226 | G | A | [symbol] | CDZ98358 |
| X₄₂₂₂ | M4 | 262 | 108865 | C | T | [symbol] | CDZ98369 |
| X₄₂₂₃ | M4 | 262 | 109833 | C | T | [symbol] | CDZ98369 |
| X₄₂₂₄ | M4 | 262 | 134217 | G | A | [symbol] | CDZ98371 |
| X₄₂₂₅ | M4 | 262 | 148151 | C | T | [symbol] | CDZ98375 |
| X₄₂₂₆ | M4 | 262 | 164438 | G | A | [symbol] | CDZ98383 |
| X₄₂₂₇ | M4 | 262 | 175142 | G | A | [symbol] | CDZ98388 |
| X₄₂₂₈ | M4 | 262 | 201531 | G | A | [symbol] | CDZ98396 |
| X₄₂₂₉ | M4 | 262 | 221937 | C | T | [symbol] | CDZ98403 |
| X₄₂₃₀ | M4 | 262 | 286191 | C | T | [symbol] | CDZ98425 |
| X₄₂₃₁ | M4 | 262 | 286196 | T | A | [symbol] | CDZ98425 |
| X₄₂₃₂ | M4 | 262 | 319302 | G | A | [symbol] | CDZ98436 |
| X₄₂₃₃ | M4 | 262 | 380519 | C | T | [symbol] | CDZ98457 |
| X₄₂₃₄ | M4 | 262 | 383215 | C | T | [symbol] | CDZ98459 |
| X₄₂₃₅ | M4 | 262 | 392930 | C | T | [symbol] | CDZ98461 |
| X₄₂₃₆ | M4 | 262 | 397539 | G | A | [symbol] | CDZ98463 |
| X₄₂₃₇ | M4 | 262 | 414403 | C | T | [symbol] | CDZ98467 |
| X₄₂₃₈ | M4 | 262 | 420102 | G | A | [symbol] | CDZ98468 |
| X₄₂₃₉ | M4 | 262 | 444331 | G | A | [symbol] | CDZ98477 |
| X₄₂₄₀ | M4 | 262 | 446956 | C | T | [symbol] | CDZ98477 |
| X₄₂₄₁ | M4 | 262 | 539428 | G | A | [symbol] | CDZ98514 |
| X₄₂₄₂ | M4 | 262 | 539452 | A | G | [symbol] | CDZ98514 |
| X₄₂₄₃ | M4 | 262 | 539470 | A | G | [symbol] | CDZ98514 |
| X₄₂₄₄ | M4 | 262 | 557280 | G | A | [symbol] | CDZ98518 |
| X₄₂₄₅ | M4 | 262 | 560713 | G | A | [symbol] | CDZ98519 |
| X₄₂₄₆ | M4 | 262 | 562795 | C | T | [symbol] | CDZ98521 |
| X₄₂₄₇ | M4 | 262 | 567591 | G | A | [symbol] | CDZ98524 |
| X₄₂₄₈ | M4 | 262 | 567801 | G | A | [symbol] | CDZ98524 |
| X₄₂₄₉ | M4 | 262 | 573667 | C | T | [symbol] | CDZ98526 |
| X₄₂₅₀ | M4 | 262 | 618198 | G | A | [symbol] | CDZ98538 |
| X₄₂₅₁ | M4 | 262 | 638804 | G | C | [symbol] | CDZ98544 |
| X₄₂₅₂ | M4 | 262 | 639869 | G | C | [symbol] | CDZ98544 |
| X₄₂₅₃ | M4 | 262 | 639962 | A | G | [symbol] | CDZ98544 |
| X₄₂₅₄ | M4 | 262 | 653920 | A | G | [symbol] | CDZ98545 |
| X₄₂₅₅ | M4 | 262 | 655754 | A | T | [symbol] | CDZ98545 |
| X₄₂₅₆ | M4 | 262 | 655757 | T | C | [symbol] | CDZ98545 |
| X₄₂₅₇ | M4 | 262 | 656031 | C | A | [symbol] | CDZ98545 |
| X₄₂₅₈ | M4 | 262 | 668764 | C | T | [symbol] | CDZ98545 |
| X₄₂₅₉ | M4 | 262 | 673556 | G | A | [symbol] | CDZ98548 |
| X₄₂₆₀ | M4 | 262 | 691577 | C | T | [symbol] | CDZ98551 |
| X₄₂₆₁ | M4 | 262 | 822734 | G | A | [symbol] | CDZ98597 |
| X₄₂₆₂ | M4 | 262 | 835874 | C | T | [symbol] | CDZ98601 |
| X₄₂₆₃ | M4 | 262 | 865999 | G | A | [symbol] | CDZ98613 |
| X₄₂₆₄ | M4 | 262 | 969192 | G | A | [symbol] | CDZ98649 |
| X₄₂₆₅ | M4 | 262 | 971713 | G | A | [symbol] | CDZ98649 |
| X₄₂₆₆ | M4 | 262 | 1011054 | G | A | [symbol] | CDZ98659 |
| X₄₂₆₇ | M4 | 262 | 1051389 | C | T | [symbol] | CDZ98670 |
| X₄₂₆₈ | M4 | 262 | 1060326 | C | T | [symbol] | CDZ98672 |
| X₄₂₆₉ | M4 | 262 | 1076581 | G | A | [symbol] | CDZ98679 |
| X₄₂₇₀ | M4 | 262 | 1140198 | C | T | [symbol] | CDZ98701 |
| X₄₂₇₁ | M4 | 262 | 1169777 | G | A | [symbol] | CDZ98710 |
| X₄₂₇₂ | M4 | 262 | 1209662 | G | A | [symbol] | CDZ98723 |
| X₄₂₇₃ | M4 | 262 | 1226072 | C | T | [symbol] | CDZ98730 |
| X₄₂₇₄ | M4 | 262 | 1248058 | C | T | [symbol] | CDZ98737 |
| X₄₂₇₅ | M4 | 262 | 1257961 | C | T | [symbol] | CDZ98739 |
| X₄₂₇₆ | M4 | 262 | 1277604 | G | A | [symbol] | CDZ98747 |
| X₄₂₇₇ | M4 | 262 | 1305361 | G | A | [symbol] | CDZ98753 |
| X₄₂₇₈ | M4 | 262 | 1329643 | C | T | [symbol] | CDZ98760 |
| X₄₂₇₉ | M4 | 262 | 1350321 | G | A | [symbol] | CDZ98766 |
| X₄₂₈₀ | M4 | 262 | 1351116 | A | G | [symbol] | CDZ98766 |
| X₄₂₈₁ | M4 | 262 | 1415479 | C | T | [symbol] | CDZ98789 |
| X₄₂₈₂ | M4 | 262 | 1424293 | G | A | [symbol] | CDZ98791 |
| X₄₂₈₃ | M4 | 262 | 1455677 | G | A | [symbol] | CDZ98804 |
| X₄₂₈₄ | M4 | 262 | 1458863 | C | T | [symbol] | CDZ98807 |
| X₄₂₈₅ | M4 | 262 | 1550311 | C | T | [symbol] | CDZ98836 |
| X₄₂₈₆ | M4 | 262 | 1550456 | C | T | [symbol] | CDZ98837 |
| X₄₂₈₇ | M4 | 262 | 1577316 | G | A | [symbol] | CDZ98844 |
| X₄₂₈₈ | M4 | 262 | 1615762 | G | A | [symbol] | CDZ98855 |
| X₄₂₈₉ | M4 | 262 | 1677620 | G | A | [symbol] | CDZ98873 |
| X₄₂₉₀ | M4 | 262 | 1694625 | C | T | [symbol] | CDZ98878 |
| X₄₂₉₁ | M4 | 262 | 1711527 | G | A | [symbol] | CDZ98886 |
| X₄₂₉₂ | M4 | 262 | 1716385 | G | A | [symbol] | CDZ98887 |
| X₄₂₉₃ | M4 | 266 | 85 | C | T | [symbol] | |
| X₄₂₉₄ | M4 | 266 | 252 | C | T | [symbol] | |
| X₄₂₉₅ | M4 | 267 | 133 | T | C | [symbol] | |
| X₄₂₉₆ | M4 | 267 | 134 | c | T | [symbol] | |
| X₄₂₉₇ | M4 | 267 | 254 | G | T | [symbol] | |
| X₄₂₉₈ | M4 | 267 | 256 | A | G | [symbol] | |
| X₄₂₉₉ | M4 | 267 | 257 | T | C | [symbol] | |
| X₄₃₀₀ | M5 | 22 | 1643 | C | T | [symbol] | CED80056 |
| X₄₃₀₁ | M5 | 22 | 2524 | G | A | [symbol] | CED80056 |
| X₄₃₀₂ | M5 | 28 | 236 | G | A | [symbol] | CDZ96150 |
| X₄₃₀₃ | M5 | 28 | 377 | G | A | [symbol] | CDZ96150 |
| X₄₃₀₄ | M5 | 28 | 1506 | C | T | [symbol] | CDZ96150 |
| X₄₃₀₅ | M5 | 28 | 1677 | C | T | [symbol] | CDZ96150 |
| X₄₃₀₆ | M5 | 43 | 464 | G | A | [symbol] | CDZ96151 |
| X₄₃₀₇ | M5 | 43 | 753 | C | T | [symbol] | CDZ96151 |
| X₄₃₀₈ | M5 | 43 | 757 | G | A | [symbol] | CDZ96151 |
| X₄₃₀₉ | M5 | 43 | 1527 | C | T | [symbol] | CDZ96151 |
| X₄₃₁₀ | M5 | 43 | 1748 | G | A | [symbol] | CDZ96151 |
| X₄₃₁₁ | M5 | 43 | 1928 | C | T | [symbol] | CDZ96151 |
| X₄₃₁₂ | M5 | 62 | 26 | T | A | [symbol] | CDZ96152 |
| X₄₃₁₃ | M5 | 62 | 27 | T | C | [symbol] | CDZ96152 |
| X₄₃₁₄ | M5 | 62 | 55 | T | A | [symbol] | CDZ96152 |
| X₄₃₁₅ | M5 | 62 | 403 | C | T | [symbol] | CDZ96152 |
| X₄₃₁₆ | M5 | 62 | 875 | G | A | [symbol] | CDZ96152 |
| X₄₃₁₇ | M5 | 102 | 339 | C | T | [symbol] | CDZ96153 |
| X₄₃₁₈ | M5 | 102 | 951 | G | A | [symbol] | CDZ96153 |
| X₄₃₁₉ | M5 | 102 | 1042 | G | A | [symbol] | CDZ96153 |
| X₄₃₂₀ | M5 | 102 | 2334 | G | A | [symbol] | CDZ96153 |
| X₄₃₂₁ | M5 | 102 | 2590 | C | T | [symbol] | CDZ96153 |
| X₄₃₂₂ | M5 | 102 | 3427 | C | T | [symbol] | CDZ96153 |
| X₄₃₂₃ | M5 | 176 | 358 | G | A | [symbol] | CED80058 |
| X₄₃₂₄ | M5 | 176 | 1872 | G | A | [symbol] | CED80058 |
| X₄₃₂₅ | M5 | 176 | 1980 | G | A | [symbol] | CED80058 |
| X₄₃₂₆ | M5 | 179 | 1525 | G | A | [symbol] | CDZ96154 |
| X₄₃₂₇ | M5 | 179 | 1780 | C | T | [symbol] | CDZ96154 |
| X₄₃₂₈ | M5 | 179 | 2472 | G | A | [symbol] | CDZ96154 |
| X₄₃₂₉ | M5 | 179 | 2476 | C | T | [symbol] | CDZ96154 |
| X₄₃₃₀ | M5 | 188 | 815 | C | T | [symbol] | CED80060 |
| X₄₃₃₁ | M5 | 188 | 1174 | C | T | [symbol] | CED80060 |
| X₄₃₃₂ | M5 | 188 | 2163 | G | A | [symbol] | CED80060 |
| X₄₃₃₃ | M5 | 188 | 2170 | G | A | [symbol] | CED80060 |
| X₄₃₃₄ | M5 | 247 | 102 | G | A | [symbol] | CED80061 |
| X₄₃₃₅ | M5 | 247 | 989 | C | T | [symbol] | CED80061 |
| X₄₃₃₆ | M5 | 247 | 1053 | G | A | [symbol] | CED80061 |
| X₄₃₃₇ | M5 | 7 | 160 | T | C | [symbol] | |
| X₄₃₃₈ | M5 | 8 | 1110 | C | T | [symbol] | |
| X₄₃₃₉ | M5 | 11 | 154 | A | C | [symbol] | |
| X₄₃₄₀ | M5 | 11 | 158 | C | T | [symbol] | |
| X₄₃₄₁ | M5 | 15 | 28 | C | G | [symbol] | |
| X₄₃₄₂ | M5 | 24 | 513 | T | C | [symbol] | CDZ96160 |
| X₄₃₄₃ | M3 | 24 | 520 | C | G | [symbol] | CDZ96160 |
| X₄₃₄₄ | M5 | 24 | 5850 | C | T | [symbol] | CDZ96160 |
| X₄₃₄₅ | M5 | 24 | 29899 | C | T | [symbol] | CDZ96169 |
| X₄₃₄₆ | M5 | 24 | 169574 | C | T | [symbol] | CDZ96213 |
| X₄₃₄₇ | M5 | 24 | 172698 | G | A | [symbol] | CDZ96215 |
| X₄₃₄₈ | M5 | 24 | 180340 | G | A | [symbol] | CDZ96216 |
| X₄₃₄₉ | M5 | 24 | 266697 | G | A | [symbol] | CDZ96242 |
| X₄₃₅₀ | M5 | 24 | 307114 | G | A | [symbol] | CDZ96255 |
| X₄₃₅₁ | M5 | 24 | 334227 | T | A | [symbol] | CDZ96263 |
| X₄₃₅₂ | M5 | 24 | 335171 | C | T | [symbol] | CDZ96265 |
| X₄₃₅₃ | M5 | 24 | 340663 | T | C | [symbol] | CDZ96265 |
| X₄₃₅₄ | M5 | 24 | 400418 | C | T | [symbol] | CDZ96287 |
| X₄₃₅₅ | M5 | 24 | 420108 | G | A | [symbol] | CDZ96291 |
| X₄₃₅₆ | M5 | 27 | 445 | C | T | [symbol] | |
| X₄₃₅₇ | M5 | 27 | 1012 | A | C | [symbol] | |
| X₄₃₅₈ | M5 | 27 | 1013 | T | A | [symbol] | |
| X₄₃₅₉ | M5 | 32 | 158 | C | T | [symbol] | CDZ96332 |
| X₄₃₆₀ | M5 | 32 | 215 | C | T | [symbol] | CDZ96332 |
| X₄₃₆₁ | M5 | 32 | 2438 | C | T | [symbol] | CDZ96332 |
| X₄₃₆₂ | M5 | 32 | 2734 | C | T | [symbol] | CDZ96332 |
| X₄₃₆₃ | M5 | 32 | 2821 | C | T | [symbol] | CDZ96332 |
| X₄₃₆₄ | M5 | 32 | 3067 | C | T | [symbol] | CDZ96332 |
| X₄₃₆₅ | M5 | 32 | 3506 | C | T | [symbol] | CDZ96332 |
| X₄₃₆₆ | M5 | 32 | 3562 | G | A | [symbol] | CDZ96332 |
| X₄₃₆₇ | M5 | 33 | 399 | T | A | [symbol] | CED82002 |
| X₄₃₆₈ | M5 | 33 | 20227 | G | A | [symbol] | CED82006 |
| X₄₃₆₉ | M5 | 33 | 45488 | C | T | [symbol] | CED82012 |
| X₄₃₇₀ | M5 | 33 | 64676 | G | A | [symbol] | CED82019 |
| X₄₃₇₁ | M5 | 33 | 79913 | G | A | [symbol] | CED82024 |
| X₄₃₇₂ | M5 | 33 | 105276 | G | A | [symbol] | CED82036 |
| X₄₃₇₃ | M5 | 33 | 109397 | G | A | [symbol] | CED82038 |
| X₄₃₇₄ | M5 | 33 | 129884 | G | A | [symbol] | CED82045 |
| X₄₃₇₅ | M5 | 33 | 198050 | C | T | [symbol] | CED82067 |
| X₄₃₇₆ | M5 | 33 | 205554 | C | T | [symbol] | CED82069 |
| X₄₃₇₇ | M5 | 33 | 223703 | G | A | [symbol] | CED82075 |
| X₄₃₇₈ | M5 | 33 | 236149 | C | T | [symbol] | CED82078 |
| X₄₃₇₉ | M5 | 33 | 257786 | C | T | [symbol] | CED82084 |
| X₄₃₈₀ | M5 | 33 | 260027 | G | A | [symbol] | CED82084 |
| X₄₃₈₁ | M5 | 33 | 274627 | G | A | [symbol] | CED82091 |
| X₄₃₈₂ | M5 | 33 | 283808 | C | T | [symbol] | CED82093 |
| X₄₃₈₃ | M5 | 33 | 304408 | C | T | [symbol] | CED82099 |
| X₄₃₈₄ | M5 | 33 | 317713 | G | A | [symbol] | CED82104 |
| X₄₃₈₅ | M5 | 33 | 326016 | T | C | [symbol] | CED82108 |
| X₄₃₈₆ | M5 | 33 | 327840 | C | T | [symbol] | CED82108 |
| X₄₃₈₇ | M5 | 33 | 341890 | G | A | [symbol] | CED82113 |
| X₄₃₈₈ | M5 | 33 | 371277 | G | A | [symbol] | CED82121- |
| | | | | | | | CED82122 |
| X₄₃₈₉ | M5 | 33 | 374131 | A | G | [symbol] | CED82121- |
| | | | | | | | CED82122 |
| X₄₃₉₀ | M5 | 33 | 374134 | A | G | [symbol] | CED82121- |
| | | | | | | | CED82122 |
| X₄₃₉₁ | M5 | 33 | 374137 | A | T | [symbol] | CED82121- |
| | | | | | | | CED82122 |
| X₄₃₉₂ | M5 | 33 | 374150 | A | G | [symbol] | CED82121- |
| | | | | | | | CED82122 |
| X₄₃₉₃ | M5 | 33 | 374340 | A | G | [symbol] | CED82121- |
| | | | | | | | CED82122 |
| X₄₃₉₄ | M5 | 33 | 375339 | A | G | [symbol] | CED82121- |
| | | | | | | | CED82122 |
| X₄₃₉₅ | M5 | 33 | 375366 | T | C | [symbol] | CED82121- |
| | | | | | | | CED82122 |
| X₄₃₉₆ | M5 | 33 | 382577 | C | T | [symbol] | CED82122 |
| X₄₃₉₇ | M5 | 33 | 383212 | G | A | [symbol] | CED82122 |
| X₄₃₉₈ | M5 | 33 | 383308 | C | T | [symbol] | CED82122 |
| X₄₃₉₉ | M5 | 33 | 385319 | A | C | [symbol] | CED82122 |
| X₄₄₀₀ | M5 | 33 | 412908 | A | G | [symbol] | CED82131 |
| X₄₄₀₁ | M5 | 33 | 428329 | G | A | [symbol] | CED82136 |
| X₄₄₀₂ | M5 | 33 | 448815 | G | A | [symbol] | CED82144 |
| X₄₄₀₃ | M5 | 33 | 453975 | C | T | [symbol] | CED82147 |
| X₄₄₀₄ | M5 | 33 | 455451 | C | T | [symbol] | CED82146 |
| X₄₄₀₅ | M5 | 33 | 505339 | C | T | [symbol] | CED82165 |
| X₄₄₀₆ | M5 | 33 | 509127 | C | T | [symbol] | CED82166 |
| X₄₄₀₇ | M5 | 33 | 570390 | G | A | [symbol] | CED82188 |
| X₄₄₀₈ | M5 | 33 | 626521 | C | T | [symbol] | CED82203 |
| X₄₄₀₉ | M5 | 33 | 639242 | G | A | [symbol] | CED82208 |
| X₄₄₁₀ | M5 | 33 | 643436 | G | A | [symbol] | CED82208 |
| X₄₄₁₁ | M5 | 33 | 693516 | C | T | [symbol] | CED82225 |
| X₄₄₁₂ | M5 | 33 | 699423 | C | T | [symbol] | CED82227 |
| X₄₄₁₃ | M5 | 33 | 729705 | C | T | [symbol] | CED82234 |
| X₄₄₁₄ | M5 | 33 | 794549 | C | T | [symbol] | CED82254 |
| X₄₄₁₅ | M5 | 33 | 800536 | G | A | [symbol] | CED82259 |
| X₄₄₁₆ | M5 | 33 | 829825 | C | T | [symbol] | CED82271 |
| X₄₄₁₇ | M5 | 33 | 850373 | G | A | [symbol] | CED82278 |
| X₄₄₁₈ | M5 | 33 | 911146 | G | C | [symbol] | CED82293 |
| X₄₄₁₉ | M5 | 33 | 917545 | A | G | [symbol] | CED82294 |
| X₄₄₂₀ | M5 | 33 | 917558 | G | A | [symbol] | CED82294 |
| X₄₄₂₁ | M5 | 33 | 917586 | T | A | [symbol] | CED82294 |
| X₄₄₂₂ | M5 | 33 | 917771 | A | T | [symbol] | CED82294 |
| X₄₄₂₃ | M5 | 33 | 936350 | T | A | [symbol] | CED82300 |
| X₄₄₂₄ | M5 | 33 | 936571 | A | G | [symbol] | CED82300 |
| X₄₄₂₅ | M5 | 33 | 936600 | G | A | [symbol] | CED82300 |
| X₄₄₂₆ | M5 | 33 | 995886 | G | A | [symbol] | CED82318 |
| X₄₄₂₇ | M5 | 33 | 1038506 | C | T | [symbol] | CED82330 |
| X₄₄₂₈ | M5 | 33 | 1049699 | G | A | [symbol] | CED82334 |
| X₄₄₂₉ | M5 | 33 | 1138444 | C | T | [symbol] | CED82363 |
| X₄₄₃₀ | M5 | 33 | 1165914 | G | A | [symbol] | CED82372 |
| X₄₄₃₁ | M5 | 33 | 1169025 | C | T | [symbol] | CED82372 |
| X₄₄₃₂ | M5 | 33 | 1169999 | G | A | [symbol] | CED82372 |
| X₄₄₃₃ | M5 | 33 | 1183030 | T | C | [symbol] | CED82377 |
| X₄₄₃₄ | M5 | 33 | 1190451 | G | A | [symbol] | CED82378 |
| X₄₄₃₅ | M5 | 33 | 1191727 | C | T | [symbol] | CED82379 |
| X₄₄₃₆ | M5 | 33 | 1246468 | C | T | [symbol] | CED82392 |
| X₄₄₃₇ | M5 | 33 | 1248614 | C | T | [symbol] | CED82393 |
| X₄₄₃₈ | M5 | 33 | 1311181 | G | A | [symbol] | CED82413 |
| X₄₄₃₉ | M5 | 33 | 1316789 | C | T | [symbol] | CED82415 |
| X₄₄₄₀ | M5 | 33 | 1324395 | G | A | [symbol] | CED82417 |
| X₄₄₄₁ | M5 | 33 | 1333932 | G | A | [symbol] | CED82421 |
| X₄₄₄₂ | M5 | 33 | 1339376 | C | T | [symbol] | CED82424 |
| X₄₄₄₃ | M5 | 33 | 1396438 | C | T | [symbol] | CED82442 |
| X₄₄₄₄ | M5 | 33 | 1406738 | G | A | [symbol] | CED82444 |
| X₄₄₄₅ | M5 | 33 | 1411059 | C | T | [symbol] | CED82446 |
| X₄₄₄₆ | M5 | 33 | 1499347 | G | A | [symbol] | CED82472 |
| X₄₄₄₇ | M5 | 33 | 1502644 | G | A | [symbol] | CED82474 |
| X₄₄₄₈ | M5 | 33 | 1515148 | G | A | [symbol] | CED82478 |
| X₄₄₄₉ | M5 | 33 | 1515369 | G | A | [symbol] | CED82478 |
| X₄₄₅₀ | M5 | 33 | 1535309 | C | A | [symbol] | CED82484 |
| X₄₄₅₁ | M5 | 33 | 1535314 | T | G | [symbol] | CED82484 |
| X₄₄₅₂ | M5 | 33 | 1535316 | G | C | [symbol] | CED82484 |
| X₄₄₅₃ | M5 | 33 | 1535434 | A | T | [symbol] | CED82483 |
| X₄₄₅₄ | M5 | 33 | 1537493 | C | A | [symbol] | CED82485 |
| X₄₄₅₅ | M5 | 33 | 1537824 | C | T | [symbol] | CED82483 |
| X₄₄₅₆ | M5 | 33 | 1537835 | G | A | [symbol] | CED82483 |
| X₄₄₅₇ | M5 | 33 | 1544767 | A | C | [symbol] | CED82485- |
| | | | | | | | CED82486 |
| X₄₄₅₈ | M5 | 33 | 1544951 | C | G | [symbol] | CED82485- |
| | | | | | | | CED82486 |
| X₄₄₅₉ | M5 | 33 | 1572498 | C | T | [symbol] | CED82491 |
| X₄₄₆₀ | M5 | 33 | 1587443 | C | T | [symbol] | CED82497 |
| X₄₄₆₁ | M5 | 33 | 1596242 | C | T | [symbol] | CED82498 |
| X₄₄₆₂ | M5 | 33 | 1628812 | C | T | [symbol] | CED82510 |
| X₄₄₆₃ | M5 | 33 | 1638726 | G | A | [symbol] | CED82513 |
| X₄₄₆₄ | M5 | 33 | 1642659 | G | A | [symbol] | CED82515 |
| X₄₄₆₅ | M5 | 33 | 1666039 | G | A | [symbol] | CED82521 |
| X₄₄₆₆ | M5 | 33 | 1682149 | C | T | [symbol] | CED82526 |
| X₄₄₆₇ | M5 | 33 | 1689192 | C | T | [symbol] | CED82529 |
| X₄₄₆₈ | M5 | 33 | 1700000 | G | A | [symbol] | CED82534 |
| X₄₄₆₉ | M5 | 33 | 1714108 | G | A | [symbol] | CED82537 |
| X₄₄₇₀ | M5 | 33 | 1723348 | C | T | [symbol] | CED82539 |
| X₄₄₇₁ | M5 | 33 | 1767636 | C | T | [symbol] | CED82552 |
| X₄₄₇₂ | M5 | 33 | 1823362 | C | T | [symbol] | CED82571 |
| X₄₄₇₃ | M5 | 33 | 1848935 | C | T | [symbol] | CED82579 |
| X₄₄₇₄ | M5 | 33 | 1860991 | G | A | [symbol] | CED82583 |
| X₄₄₇₅ | M5 | 33 | 1861675 | C | T | [symbol] | CED82583 |
| X₄₄₇₆ | M5 | 33 | 1881896 | T | C | [symbol] | CED82588 |
| X₄₄₇₇ | M5 | 33 | 1887401 | C | T | [symbol] | CED82591 |
| X₄₄₇₈ | M5 | 33 | 1888706 | C | T | [symbol] | CED82592 |
| X₄₄₇₉ | M5 | 33 | 1938614 | G | A | [symbol] | CED82612 |
| X₄₄₈₀ | M5 | 33 | 1959142 | G | A | [symbol] | CED82619 |
| X₄₄₈₁ | M5 | 33 | 1975079 | G | A | [symbol] | CED82625 |
| X₄₄₈₂ | M5 | 33 | 2010230 | C | T | [symbol] | CED82636 |
| X₄₄₈₃ | M5 | 33 | 2014235 | C | T | [symbol] | CED82637 |
| X₄₄₈₄ | M5 | 33 | 2044014 | G | A | [symbol] | CED82647 |
| X₄₄₈₅ | M5 | 33 | 2046185 | C | T | [symbol] | CED82650 |
| X₄₄₈₆ | M5 | 33 | 2050847 | G | A | [symbol] | CED82651 |
| X₄₄₈₇ | M5 | 36 | 320 | G | A | [symbol] | |
| X₄₄₈₈ | M5 | 36 | 1056 | G | A | [symbol] | |
| X₄₄₈₉ | M5 | 36 | 1295 | C | T | [symbol] | |
| X₄₄₉₀ | M5 | 36 | 1461 | A | T | [symbol] | |
| X₄₄₉₁ | M5 | 42 | 804 | C | T | [symbol] | CDZ96333 |
| X₄₄₉₂ | M5 | 42 | 1559 | G | A | [symbol] | CDZ96333 |
| X₄₄₉₃ | M5 | 45 | 289 | G | A | [symbol] | |
| X₄₄₉₄ | M5 | 48 | 405 | G | A | [symbol] | |
| X₄₄₉₅ | M5 | 48 | 563 | C | T | [symbol] | |
| X₄₄₉₆ | M5 | 48 | 565 | T | C | [symbol] | |
| X₄₄₉₇ | M5 | 48 | 576 | G | A | [symbol] | |
| X₄₄₉₈ | M5 | 48 | 580 | T | A | [symbol] | |
| X₄₄₉₉ | M5 | 48 | 720 | A | G | [symbol] | |
| X₄₅₀₀ | M5 | 50 | 145 | G | A | [symbol] | |
| X₄₅₀₁ | M5 | 52 | 3470 | G | C | [symbol] | CED82664 |
| X₄₅₀₂ | M5 | 52 | 6285 | C | T | [symbol] | CED82665 |
| X₄₅₀₃ | M5 | 52 | 63859 | C | T | [symbol] | CED82686 |
| X₄₅₀₄ | M5 | 52 | 144382 | C | T | [symbol] | CED82709 |
| X₄₅₀₅ | M5 | 52 | 150382 | C | T | [symbol] | CED82712 |
| X₄₅₀₆ | M5 | 52 | 151974 | C | T | [symbol] | CED82712 |
| X₄₅₀₇ | M5 | 52 | 183986 | C | T | [symbol] | CED82722 |
| X₄₅₀₈ | M5 | 52 | 203253 | A | G | [symbol] | CED82730 |
| X₄₅₀₉ | M5 | 52 | 207354 | C | T | [symbol] | CED82730 |
| X₄₅₁₀ | M5 | 52 | 240075 | G | C | [symbol] | CED82734 |
| X₄₅₁₁ | M5 | 52 | 241012 | A | G | [symbol] | CED82734 |
| X₄₅₁₂ | M5 | 52 | 284733 | G | A | [symbol] | CED82747 |
| X₄₅₁₃ | M5 | 52 | 390095 | G | A | [symbol] | CED82784 |
| X₄₅₁₄ | M5 | 52 | 395374 | G | A | [symbol] | CED82786 |
| X₄₅₁₅ | M5 | 52 | 398723 | C | T | [symbol] | CED82786 |
| X₄₅₁₆ | M5 | 52 | 398728 | C | T | [symbol] | CED82786 |
| X₄₅₁₇ | M5 | 52 | 487472 | C | T | [symbol] | CED82814 |
| X₄₅₁₈ | M5 | 52 | 516267 | C | T | [symbol] | CED82823 |
| X₄₅₁₉ | M5 | 52 | 552099 | G | A | [symbol] | CED82837 |
| X₄₅₂₀ | M5 | 52 | 552173 | G | A | [symbol] | CED82837 |
| X₄₅₂₁ | M5 | 52 | 631479 | C | T | [symbol] | CED82860 |
| X₄₅₂₂ | M5 | 52 | 638622 | G | A | [symbol] | CED82862 |
| X₄₅₂₃ | M5 | 52 | 692048 | C | T | [symbol] | CED82884 |
| X₄₅₂₄ | M5 | 52 | 700204 | G | A | [symbol] | CED82888 |
| X₄₅₂₅ | M5 | 52 | 783981 | C | T | [symbol] | CED82919 |
| X₄₅₂₆ | M5 | 52 | 809156 | C | T | [symbol] | CED82928 |
| X₄₅₂₇ | M5 | 52 | 817452 | T | A | [symbol] | CED82928 |
| X₄₅₂₈ | M5 | 52 | 840755 | C | T | [symbol] | CED82935 |
| X₄₅₂₉ | M5 | 52 | 842352 | C | T | [symbol] | CED82934 |
| X₄₅₃₀ | M5 | 52 | 849671 | G | A | [symbol] | CED82940 |
| X₄₅₃₁ | M5 | 52 | 861376 | C | T | [symbol] | CED82946 |
| X₄₅₃₂ | M5 | 52 | 938650 | G | A | [symbol] | CED82973 |
| X₄₅₃₃ | M5 | 52 | 967316 | A | T | [symbol] | CED82984 |
| X₄₅₃₄ | M5 | 52 | 967701 | T | A | [symbol] | CED82983 |
| X₄₅₃₅ | M5 | 52 | 978727 | C | T | [symbol] | CED82988 |
| X₄₅₃₆ | M5 | 52 | 1003899 | G | A | [symbol] | CED83001 |
| X₄₅₃₇ | M5 | 52 | 1021202 | C | T | [symbol] | CED83005 |
| X₄₅₃₈ | M5 | 52 | 1029498 | G | A | [symbol] | CED83007 |
| X₄₅₃₉ | M5 | 52 | 1043011 | C | T | [symbol] | CED83012 |
| X₄₅₄₀ | M5 | 52 | 1067895 | C | T | [symbol] | CED83020 |
| X₄₅₄₁ | M5 | 52 | 1151398 | G | A | [symbol] | CED83046 |
| X₄₅₄₂ | M5 | 52 | 1158103 | C | T | [symbol] | CED83051 |
| X₄₅₄₃ | M5 | 52 | 1214927 | C | T | [symbol] | CED83068 |
| X₄₅₄₄ | M5 | 52 | 1219894 | C | T | [symbol] | CED83071 |
| X₄₅₄₅ | M5 | 52 | 1255291 | G | A | [symbol] | CED83086 |
| X₄₅₄₆ | M5 | 52 | 1350463 | C | T | [symbol] | CED83118 |
| X₄₅₄₇ | M5 | 52 | 1358630 | C | T | [symbol] | CED83119 |
| X₄₅₄₈ | M5 | 52 | 1363357 | G | A | [symbol] | CED83122 |
| X₄₅₄₉ | M5 | 52 | 1363405 | C | T | [symbol] | CED83123 |
| X₄₅₅₀ | M5 | 52 | 1365822 | C | T | [symbol] | CED83124 |
| X₄₅₅₁ | M5 | 52 | 1389320 | G | A | [symbol] | CED83130 |
| X₄₅₅₂ | M5 | 52 | 1399439 | G | A | [symbol] | CED83134 |
| X₄₅₅₃ | M5 | 52 | 1409725 | G | A | [symbol] | CED83139 |
| X₄₅₅₄ | M5 | 52 | 1458571 | C | T | [symbol] | CED83158 |
| X₄₅₅₅ | M5 | 52 | 1465985 | G | A | [symbol] | CED83159 |
| X₄₅₅₆ | M5 | 52 | 1474315 | G | A | [symbol] | CED83164 |
| X₄₅₅₇ | M5 | 52 | 1474412 | G | A | [symbol] | CED83166 |
| X₄₅₅₈ | M5 | 52 | 1526796 | G | A | [symbol] | CED83181 |
| X₄₅₅₉ | M5 | 52 | 1540879 | C | T | [symbol] | CED83186 |
| X₄₅₆₀ | M5 | 52 | 1546812 | G | A | [symbol] | CED83188 |
| X₄₅₆₁ | M5 | 52 | 1570053 | C | T | [symbol] | CED83200 |
| X₄₅₆₂ | M5 | 52 | 1583655 | C | T | [symbol] | CED83206 |
| X₄₅₆₃ | M5 | 52 | 1621166 | C | T | [symbol] | CED83219 |
| X₄₅₆₄ | M5 | 52 | 1665003 | A | G | [symbol] | CED83235 |
| X₄₅₆₅ | M5 | 52 | 1688685 | C | T | [symbol] | CED83243 |
| X₄₅₆₆ | M5 | 52 | 1708900 | A | G | [symbol] | CED83249 |
| X₄₅₆₇ | M5 | 52 | 1716210 | C | T | [symbol] | CED83250 |
| X₄₅₆₈ | M5 | 52 | 1765533 | G | A | [symbol] | CED83268 |
| X₄₅₆₉ | M5 | 52 | 1793370 | G | A | [symbol] | CED83275 |
| X₄₅₇₀ | M5 | 52 | 1796780 | G | A | [symbol] | CED83279 |
| X₄₅₇₁ | M5 | 52 | 1807309 | G | A | [symbol] | CED83283 |
| X₄₅₇₂ | M5 | 52 | 1871310 | C | T | [symbol] | CED83304 |
| X₄₅₇₃ | M5 | 52 | 1874150 | G | T | [symbol] | CED83305 |
| X₄₅₇₄ | M5 | 52 | 1893352 | G | A | [symbol] | CED83313 |
| X₄₅₇₅ | M5 | 52 | 1915927 | G | A | [symbol] | CED83315 |
| X₄₅₇₆ | M5 | 52 | 1938393 | C | T | [symbol] | CED83322 |
| X₄₅₇₇ | M5 | 52 | 1969873 | C | T | [symbol] | CED83333 |
| X₄₅₇₈ | M5 | 52 | 1987096 | G | A | [symbol] | CED83341 |
| X₄₅₇₉ | M5 | 52 | 1995167 | G | A | [symbol] | CED83342 |
| X₄₅₈₀ | M5 | 52 | 2029893 | G | A | [symbol] | CED83351 |
| X₄₅₈₁ | M5 | 52 | 2041781 | C | T | [symbol] | CED83355 |
| X₄₅₈₂ | M5 | 52 | 2048018 | G | A | [symbol] | CED83358 |
| X₄₅₈₃ | M5 | 52 | 2050245 | G | A | [symbol] | CED83359 |
| X₄₅₈₄ | M5 | 52 | 2071127 | C | T | [symbol] | CED83365 |
| X₄₅₈₅ | M5 | 52 | 2081390 | G | A | [symbol] | CED83367 |
| X₄₅₈₆ | M5 | 52 | 2093148 | C | T | [symbol] | CED83368 |
| X₄₅₈₇ | M5 | 52 | 2093251 | C | T | [symbol] | CED83368 |
| X₄₅₈₈ | M5 | 52 | 2102269 | C | T | [symbol] | CED83371 |
| X₄₅₈₉ | M5 | 52 | 2120665 | C | T | [symbol] | CED83376 |
| X₄₅₉₀ | M5 | 52 | 2136885 | A | G | [symbol] | CED83382 |
| X₄₅₉₁ | M5 | 52 | 2162878 | G | A | [symbol] | CED83392 |
| X₄₅₉₂ | M5 | 52 | 2211680 | G | A | [symbol] | CED83407 |
| X₄₅₉₃ | M5 | 52 | 2229000 | G | A | [symbol] | CED83410 |
| X₄₅₉₄ | M5 | 52 | 2248910 | G | A | [symbol] | CED83417 |
| X₄₅₉₅ | M5 | 52 | 2258192 | C | T | [symbol] | CED83422 |
| X₄₅₉₆ | M5 | 52 | 2265219 | C | T | [symbol] | CED83425 |
| X₄₅₉₇ | M5 | 52 | 2266378 | C | T | [symbol] | CED83423 |
| X₄₅₉₈ | M5 | 52 | 2296638 | G | A | [symbol] | CED83432 |
| X₄₅₉₉ | M5 | 52 | 2327266 | C | T | [symbol] | CED83445 |
| X₄₆₀₀ | M5 | 52 | 2364315 | G | A | [symbol] | CED83455 |
| X₄₆₀₁ | M5 | 52 | 2373120 | C | T | [symbol] | CED83456 |
| X₄₆₀₂ | M5 | 52 | 2400778 | C | T | [symbol] | CED83463 |
| X₄₆₀₃ | M5 | 52 | 2415283 | C | T | [symbol] | CED83469 |
| X₄₆₀₄ | M5 | 52 | 2421337 | G | A | [symbol] | CED83471 |
| X₄₆₀₅ | M5 | 52 | 2482102 | G | A | [symbol] | CED83491 |
| X₄₆₀₆ | M5 | 52 | 2543220 | C | T | [symbol] | CED83509 |
| X₄₆₀₇ | M5 | 53 | 26291 | G | A | [symbol] | CDZ96348 |
| X₄₆₀₈ | M5 | 53 | 55702 | C | T | [symbol] | CDZ96359 |
| X₄₆₀₉ | M5 | 54 | 4815 | G | A | [symbol] | CDZ96384 |
| X₄₆₁₀ | M5 | 54 | 4816 | A | T | [symbol] | CDZ96384 |
| X₄₆₁₁ | M5 | 54 | 4817 | G | C | [symbol] | CDZ96384 |
| X₄₆₁₂ | M5 | 54 | 4821 | G | A | [symbol] | CDZ96384 |
| X₄₆₁₃ | M5 | 54 | 16963 | C | T | [symbol] | CDZ96386 |
| X₄₆₁₄ | M5 | 54 | 83852 | G | A | [symbol] | CDZ96409 |
| X₄₆₁₅ | M5 | 54 | 93810 | G | A | [symbol] | CDZ96414 |
| X₄₆₁₆ | M5 | 54 | 106086 | G | A | [symbol] | CDZ96416 |
| X₄₆₁₇ | M5 | 54 | 194230 | G | A | [symbol] | CDZ96446 |
| X₄₆₁₈ | M5 | 54 | 202467 | C | T | [symbol] | CDZ96448 |
| X₄₆₁₉ | M5 | 54 | 206494 | G | A | [symbol] | CDZ96450 |
| X₄₆₂₀ | M5 | 54 | 207737 | C | T | [symbol] | CDZ96450 |
| X₄₆₂₁ | M5 | 54 | 245840 | G | A | [symbol] | CDZ96464 |
| X₄₆₂₂ | M5 | 54 | 274617 | A | T | [symbol] | CDZ96471 |
| X₄₆₂₃ | M5 | 54 | 278479 | C | T | [symbol] | CDZ96474 |
| X₄₆₂₄ | M5 | 54 | 290948 | C | T | [symbol] | CDZ96479 |
| X₄₆₂₅ | M5 | 54 | 317033 | C | A | [symbol] | CDZ96487 |
| X₄₆₂₆ | M5 | 54 | 354688 | C | T | [symbol] | CDZ96493 |
| X₄₆₂₇ | M5 | 54 | 357141 | G | A | [symbol] | CDZ96496 |
| X₄₆₂₈ | M5 | 54 | 370320 | G | A | [symbol] | CDZ96499 |
| X₄₆₂₉ | M5 | 54 | 383172 | C | T | [symbol] | CDZ96506 |
| X₄₆₃₀ | M5 | 54 | 391223 | A | G | [symbol] | CDZ96509 |
| X₄₆₃₁ | M5 | 54 | 402099 | G | A | [symbol] | CDZ96511 |
| X₄₆₃₂ | M5 | 54 | 413765 | G | A | [symbol] | CDZ96516 |
| X₄₆₃₃ | M5 | 54 | 427542 | C | T | [symbol] | CDZ96520 |
| X₄₆₃₄ | M5 | 54 | 431851 | C | T | [symbol] | CDZ96520 |
| X₄₆₃₅ | M5 | 54 | 437080 | G | A | [symbol] | CDZ96522 |
| X₄₆₃₆ | M5 | 54 | 478527 | C | T | [symbol] | CDZ96537 |
| X₄₆₃₇ | M5 | 54 | 555986 | G | A | [symbol] | CDZ96563 |
| X₄₆₃₈ | M5 | 54 | 564688 | C | T | [symbol] | CDZ96566 |
| X₄₆₃₉ | M5 | 54 | 616268 | A | G | [symbol] | CDZ96581 |
| X₄₆₄₀ | M5 | 54 | 619019 | G | A | [symbol] | CDZ96580 |
| X₄₆₄₁ | M5 | 54 | 648472 | G | A | [symbol] | CDZ96590 |
| X₄₆₄₂ | M5 | 54 | 709210 | G | A | [symbol] | CDZ96613 |
| X₄₆₄₃ | M5 | 54 | 733193 | T | C | [symbol] | CDZ96619 |
| X₄₆₄₄ | M5 | 54 | 743396 | G | A | [symbol] | CDZ96621 |
| X₄₆₄₅ | M5 | 58 | 93 | T | C | [symbol] | |
| X₄₆₄₆ | M5 | 64 | 2756 | A | C | [symbol] | CDZ96626 |
| X₄₆₄₇ | M5 | 64 | 2767 | G | A | [symbol] | CDZ96626 |
| X₄₆₄₈ | M5 | 64 | 2770 | C | T | [symbol] | CDZ96626 |
| X₄₆₄₉ | M5 | 64 | 2783 | C | T | [symbol] | CDZ96626 |
| X₄₆₅₀ | M5 | 67 | 111 | G | A | [symbol] | |
| X₄₆₅₁ | M5 | 69 | 20845 | C | T | [symbol] | CED83532 |
| X₄₆₅₂ | M5 | 69 | 29006 | G | A | [symbol] | CED83534 |
| X₄₆₅₃ | M5 | 69 | 48869 | G | A | [symbol] | CED83542 |
| X₄₆₅₄ | M5 | 69 | 52428 | G | A | [symbol] | CED83541 |
| X₄₆₅₅ | M5 | 69 | 82710 | G | A | [symbol] | CED83554 |
| X₄₆₅₆ | M5 | 69 | 84820 | G | A | [symbol] | CED83555 |
| X₄₆₅₇ | M5 | 69 | 97985 | G | A | [symbol] | CED83559 |
| X₄₆₅₈ | M5 | 69 | 107920 | C | T | [symbol] | CED83561 |
| X₄₆₅₉ | M5 | 69 | 173697 | G | A | [symbol] | CED83585 |
| X₄₆₆₀ | M5 | 69 | 179873 | C | T | [symbol] | CED83585 |
| X₄₆₆₁ | M5 | 69 | 201005 | G | A | [symbol] | CED83595 |
| X₄₆₆₂ | M5 | 69 | 201292 | G | A | [symbol] | CED83595 |
| X₄₆₆₃ | M5 | 69 | 293602 | G | A | [symbol] | CED83626 |
| X₄₆₆₄ | M5 | 69 | 305997 | C | T | [symbol] | CED83631 |
| X₄₆₆₅ | M5 | 69 | 384418 | G | A | [symbol] | CED83656 |
| X₄₆₆₆ | M5 | 69 | 415659 | C | T | [symbol] | CED83665 |
| X₄₆₆₇ | M5 | 69 | 461021 | C | T | [symbol] | CED83680 |
| X₄₆₆₈ | M5 | 69 | 461986 | G | A | [symbol] | CED83680 |
| X₄₆₆₉ | M5 | 69 | 467686 | C | T | [symbol] | CED83681 |
| X₄₆₇₀ | M5 | 69 | 566212 | G | A | [symbol] | CED83713 |
| X₄₆₇₁ | M5 | 69 | 585845 | G | A | [symbol] | CED83722 |
| X₄₆₇₂ | M5 | 69 | 599390 | G | A | [symbol] | CED83728 |
| X₄₆₇₃ | M5 | 69 | 631511 | G | A | [symbol] | CED83742 |
| X₄₆₇₄ | M5 | 69 | 637299 | T | C | [symbol] | CED83744 |
| X₄₆₇₅ | M5 | 69 | 675579 | G | A | [symbol] | CED83760 |
| X₄₆₇₆ | M5 | 69 | 676581 | G | A | [symbol] | CED83760 |
| X₄₆₇₇ | M5 | 69 | 676853 | G | A | [symbol] | CED83759 |
| X₄₆₇₈ | M5 | 69 | 678406 | C | T | [symbol] | CED83759 |
| X₄₆₇₉ | M5 | 69 | 682770 | C | T | [symbol] | CED83763 |
| X₄₆₈₀ | M5 | 69 | 703602 | C | T | [symbol] | CED83770 |
| X₄₆₈₁ | M5 | 69 | 741255 | C | T | [symbol] | CED83781 |
| X₄₆₈₂ | M5 | 69 | 781048 | C | T | [symbol] | CED83793 |
| X₄₆₈₃ | M5 | 69 | 865820 | C | T | [symbol] | CED83814 |
| X₄₆₈₄ | M5 | 69 | 869706 | G | A | [symbol] | CED83815 |
| X₄₆₈₅ | M5 | 69 | 872470 | G | A | [symbol] | CED83815 |
| X₄₆₈₆ | M5 | 69 | 892199 | G | A | [symbol] | CED83822 |
| X₄₆₈₇ | M5 | 69 | 894019 | G | A | [symbol] | CED83821 |
| X₄₆₈₈ | M5 | 69 | 894462 | C | T | [symbol] | CED83821 |
| X₄₆₈₉ | M5 | 69 | 898044 | C | T | [symbol] | CED83823 |
| X₄₆₉₀ | M3 | 69 | 949982 | C | T | [symbol] | CED83842 |
| X₄₆₉₁ | M5 | 69 | 971219 | C | T | [symbol] | CED83847 |
| X₄₆₉₂ | M5 | 69 | 988364 | G | A | [symbol] | CED83857 |
| X₄₆₉₃ | M5 | 69 | 1001408 | G | A | [symbol] | CED83859 |
| X₄₅₉₄ | M5 | 69 | 1021196 | G | A | [symbol] | CED83867 |
| X₄₆₉₅ | M5 | 69 | 1084824 | G | A | [symbol] | CED83891 |
| X₄₆₉₆ | M5 | 69 | 1084835 | C | T | [symbol] | CED83891 |
| X₄₆₉₇ | M5 | 69 | 1084848 | A | G | [symbol] | CED83891 |
| X₄₆₉₈ | M5 | 69 | 1084866 | A | G | [symbol] | CED83891 |
| X₄₆₉₉ | M5 | 69 | 1084931 | C | T | [symbol] | CED83891 |
| X₄₇₀₀ | M5 | 69 | 1102164 | C | T | [symbol] | CED83897 |
| X₄₇₀₁ | M5 | 69 | 1105560 | C | T | [symbol] | CED83899 |
| X₄₇₀₂ | M5 | 69 | 1109785 | C | T | [symbol] | CED83899 |
| X₄₇₀₃ | M5 | 69 | 1109813 | A | G | [symbol] | CED83899 |
| X₄₇₀₄ | M5 | 69 | 1109818 | A | G | [symbol] | CED83899 |
| X₄₇₀₅ | M5 | 69 | 1109819 | T | A | [symbol] | CED83899 |
| X₄₇₀₆ | M5 | 69 | 1109823 | T | C | [symbol] | CED83899 |
| X₄₇₀₇ | M5 | 69 | 1109830 | A | G | [symbol] | CED83899 |
| X₄₇₀₈ | M5 | 69 | 1109831 | C | A | [symbol] | CED83899 |
| X₄₇₀₉ | M5 | 69 | 1109835 | A | G | [symbol] | CED83899 |
| X₄₇₁₀ | M5 | 69 | 1153118 | G | A | [symbol] | CED83915 |
| X₄₇₁₁ | M5 | 69 | 1161041 | A | G | [symbol] | CED83918 |
| X₄₇₁₂ | M5 | 69 | 1179032 | G | A | [symbol] | CED83923 |
| X₄₇₁₃ | M5 | 69 | 1215253 | G | A | [symbol] | CED83936 |
| X₄₇₁₄ | M5 | 69 | 1218409 | G | A | [symbol] | CED83936 |
| X₄₇₁₅ | M5 | 69 | 1260087 | G | A | [symbol] | CED83949 |
| X₄₇₁₆ | M5 | 69 | 1342909 | G | A | [symbol] | CED83975 |
| X₄₇₁₇ | M5 | 69 | 1372486 | C | T | [symbol] | CED83987 |
| X₄₇₁₈ | M5 | 69 | 1396045 | G | A | [symbol] | CED83994 |
| X₄₇₁₉ | M5 | 69 | 1400546 | G | A | [symbol] | CED83995 |
| X₄₇₂₀ | M5 | 69 | 1411237 | C | T | [symbol] | CED84001 |
| X₄₇₂₁ | M5 | 69 | 1411421 | C | T | [symbol] | CED83999 |
| X₄₇₂₂ | M5 | 69 | 1492842 | C | T | [symbol] | CED84026 |
| X₄₇₂₃ | M5 | 69 | 1539964 | C | T | [symbol] | CED84041 |
| X₄₇₂₄ | M5 | 69 | 1568637 | G | A | [symbol] | CED84053 |
| X₄₇₂₅ | M5 | 69 | 1590302 | G | A | [symbol] | CED84059 |
| X₄₇₂₆ | M5 | 69 | 1652288 | C | T | [symbol] | CED84077 |
| X₄₇₂₇ | M5 | 69 | 1674261 | C | T | [symbol] | CED84084 |
| X₄₇₂₈ | M5 | 69 | 1687394 | G | A | [symbol] | CED84087 |
| X₄₇₂₉ | M5 | 69 | 1688555 | C | T | [symbol] | CED84088 |
| X₄₇₃₀ | M5 | 69 | 1701017 | G | A | [symbol] | CED84094 |
| X₄₇₃₁ | M5 | 69 | 1714728 | G | A | [symbol] | CED84097 |
| X₄₇₃₂ | M5 | 69 | 1715549 | G | A | [symbol] | CED84101 |
| X₄₇₃₃ | M5 | 69 | 1720116 | G | A | [symbol] | CED84102 |
| X₄₇₃₄ | M5 | 69 | 1720246 | C | T | [symbol] | CED84101 |
| X₄₇₃₅ | M5 | 69 | 1741179 | C | T | [symbol] | CED84109 |
| X₄₇₃₆ | M5 | 69 | 1790823 | C | T | [symbol] | CED84125 |
| X₄₇₃₇ | M5 | 69 | 1792597 | C | T | [symbol] | CED84126 |
| X₄₇₃₈ | M5 | 69 | 1800584 | G | A | [symbol] | CED84129 |
| X₄₇₃₉ | M5 | 69 | 1803813 | G | A | [symbol] | CED84128 |
| X₄₇₄₀ | M5 | 69 | 1854739 | G | A | [symbol] | CED84145 |
| X₄₇₄₁ | M5 | 69 | 1924621 | C | T | [symbol] | CED84172 |
| X₄₇₄₂ | M5 | 69 | 1967529 | C | T | [symbol] | CED84189 |
| X₄₇₄₃ | M5 | 69 | 1968848 | A | G | [symbol] | CED84189 |
| X₄₇₄₄ | M5 | 69 | 1975946 | G | A | [symbol] | CED84193 |
| X₄₇₄₅ | M5 | 69 | 1978129 | C | G | [symbol] | CED84193 |
| X₄₇₄₆ | M5 | 69 | 2001469 | C | T | [symbol] | CED84197 |
| X₄₇₄₇ | M5 | 69 | 2151569 | C | T | [symbol] | CED84251 |
| X₄₇₄₅ | M5 | 69 | 2160207 | C | T | [symbol] | CED84255 |
| X₄₇₄₉ | M5 | 69 | 2226113 | C | T | [symbol] | CED84272 |
| X₄₇₅₀ | M5 | 69 | 2231926 | G | A | [symbol] | CED84274 |
| X₄₇₅₁ | M5 | 69 | 2240834 | C | T | [symbol] | CED84277 |
| X₄₇₅₂ | M5 | 69 | 2255001 | G | A | [symbol] | CED84282 |
| X₄₇₅₃ | M5 | 69 | 2260222 | C | T | [symbol] | CED84282 |
| X₄₇₅₄ | M5 | 69 | 2325544 | C | T | [symbol] | CED84307 |
| X₄₇₅₅ | M5 | 69 | 2438727 | C | T | [symbol] | CED84343 |
| X₄₇₅₆ | M5 | 69 | 2443210 | T | A | [symbol] | CED84345 |
| X₄₇₅₇ | M5 | 69 | 2483433 | G | A | [symbol] | CED84352 |
| X₄₇₅₈ | M5 | 70 | 22 | T | C | [symbol] | |
| X₄₇₅₉ | M5 | 72 | 93 | T | C | [symbol] | |
| X₄₇₆₀ | M5 | 72 | 584 | G | A | [symbol] | |
| X₄₇₆₁ | M5 | 72 | 856 | C | T | [symbol] | |
| X₄₇₆₂ | M5 | 72 | 1163 | C | T | [symbol] | |
| X₄₇₆₃ | M5 | 77 | 34978 | G | T | [symbol] | CDZ96642 |
| X₄₇₆₄ | M5 | 77 | 39842 | G | A | [symbol] | CDZ96646 |
| X₄₇₆₅ | M5 | 77 | 47151 | C | T | [symbol] | CDZ96648 |
| X₄₇₆₆ | M5 | 77 | 65419 | G | A | [symbol] | CDZ96655 |
| X₄₇₆₇ | M5 | 77 | 84022 | G | A | [symbol] | CDZ96659 |
| X₄₇₆₈ | M5 | 78 | 1865 | C | T | [symbol] | CED84359 |
| X₄₇₆₉ | M5 | 78 | 6333 | G | A | [symbol] | CED84360 |
| X₄₇₇₀ | M5 | 78 | 35200 | G | A | [symbol] | CED84371 |
| X₄₇₇₁ | M5 | 78 | 155757 | C | T | [symbol] | CED84404 |
| X₄₇₇₂ | M5 | 78 | 238854 | C | T | [symbol] | CED84430 |
| X₄₇₇₃ | M5 | 78 | 262683 | G | A | [symbol] | CED84438 |
| X₄₇₇₄ | M5 | 78 | 263828 | T | C | [symbol] | CED84438 |
| X₄₇₇₅ | M5 | 78 | 276239 | T | A | [symbol] | CED84440 |
| X₄₇₇₆ | M5 | 78 | 276361 | T | C | [symbol] | CED84440 |
| X₄₇₇₇ | M5 | 78 | 276362 | C | T | [symbol] | CED84440 |
| X₄₇₇₈ | M5 | 78 | 281454 | C | A | [symbol] | CED84441 |
| X₄₇₇₉ | M5 | 78 | 298141 | C | G | [symbol] | CED84443 |
| X₄₇₈₀ | M5 | 78 | 299644 | G | A | [symbol] | CED84443 |
| X₄₇₈₁ | M5 | 78 | 301815 | T | C | [symbol] | CED84443 |
| X₄₇₈₂ | M5 | 78 | 302700 | A | G | [symbol] | CED84443 |
| X₄₇₈₃ | M5 | 78 | 333312 | A | G | [symbol] | CED84452 |
| X₄₇₈₄ | M5 | 78 | 368561 | G | A | [symbol] | CED84462 |
| X₄₇₈₅ | M5 | 78 | 386356 | C | T | [symbol] | CED84472 |
| X₄₇₈₆ | M5 | 78 | 404988 | G | A | [symbol] | CED84475 |
| X₄₇₈₇ | M5 | 78 | 415432 | G | A | [symbol] | CED84479 |
| X₄₇₈₈ | M5 | 78 | 440606 | C | T | [symbol] | CED84487 |
| X₄₇₈₉ | M5 | 78 | 444292 | C | T | [symbol] | CED84490 |
| X₄₇₉₀ | M5 | 78 | 480848 | C | T | [symbol] | CED84500 |
| X₄₇₉₁ | M5 | 78 | 506703 | G | A | [symbol] | CED84508 |
| X₄₇₉₂ | M5 | 78 | 611362 | C | T | [symbol] | CED84546 |
| X₄₇₉₃ | M5 | 78 | 666005 | C | T | [symbol] | CED84562 |
| X₄₇₉₄ | M5 | 78 | 708376 | C | T | [symbol] | CED84580 |
| X₄₇₉₅ | M5 | 78 | 763771 | G | A | [symbol] | CED84600 |
| X₄₇₉₆ | M5 | 78 | 774252 | G | A | [symbol] | CED84602 |
| X₄₇₉₇ | M5 | 78 | 811274 | G | A | [symbol] | CED84614 |
| X₄₇₉₈ | M5 | 78 | 895505 | C | T | [symbol] | CED84642 |
| X₄₇₉₉ | M5 | 78 | 904287 | G | A | [symbol] | CED84646 |
| X₄₈₀₀ | M5 | 78 | 952815 | G | A | [symbol] | CED84662 |
| X₄₈₀₁ | M5 | 78 | 952860 | G | A | [symbol] | CED84662 |
| X₄₈₀₂ | M5 | 78 | 988551 | G | A | [symbol] | CED84675 |
| X₄₈₀₃ | M5 | 78 | 1023381 | G | A | [symbol] | CED84688 |
| X₄₈₀₄ | M5 | 78 | 1108918 | C | T | [symbol] | CED84721 |
| X₄₈₀₅ | M5 | 78 | 1115511 | G | A | [symbol] | CED84723 |
| X₄₈₀₆ | M5 | 78 | 1216573 | C | T | [symbol] | CED84752 |
| X₄₈₀₇ | M5 | 78 | 1247678 | C | T | [symbol] | CED84761 |
| X₄₈₀₈ | M5 | 78 | 1266077 | G | A | [symbol] | CED84770 |
| X₄₈₀₉ | M5 | 78 | 1302286 | C | T | [symbol] | CED84782 |
| X₄₈₁₀ | M5 | 78 | 1316520 | T | C | [symbol] | CED84788 |
| X₄₈₁₁ | M5 | 78 | 1317124 | G | A | [symbol] | CED84787 |
| X₄₈₁₂ | M5 | 78 | 1344640 | C | T | [symbol] | CED84795 |
| X₄₈₁₃ | M5 | 78 | 1360288 | G | A | [symbol] | CED84802 |
| X₄₈₁₄ | M5 | 78 | 1406981 | C | T | [symbol] | CED84821 |
| X₄₈₁₅ | M5 | 78 | 1410781 | G | A | [symbol] | CED84825 |
| X₄₈₁₆ | M5 | 78 | 1426722 | C | T | [symbol] | CED84829 |
| X₄₈₁₇ | M5 | 78 | 1475803 | G | A | [symbol] | CED84845 |
| X₄₈₁₈ | M5 | 78 | 1495995 | C | T | [symbol] | CED84852 |
| X₄₈₁₉ | M5 | 78 | 1498179 | G | A | [symbol] | CED84852 |
| X₄₈₂₀ | M5 | 78 | 1568326 | C | T | [symbol] | CED84868 |
| X₄₈₂₁ | M5 | 78 | 1607916 | C | T | [symbol] | CED84878 |
| X₄₈₂₂ | M5 | 78 | 1642170 | G | A | [symbol] | CED84889 |
| X₄₈₂₃ | M5 | 78 | 1660408 | G | A | [symbol] | CED84897 |
| X₄₈₂₄ | M5 | 78 | 1694684 | C | T | [symbol] | CED84912 |
| X₄₈₂₅ | M5 | 78 | 1742796 | G | A | [symbol] | CED84926 |
| X₄₈₂₆ | M5 | 79 | 65 | G | A | [symbol] | CDZ96674 |
| X₄₈₂₇ | M5 | 79 | 3779 | G | A | [symbol] | CDZ96674 |
| X₄₈₂₈ | M5 | 79 | 41271 | C | T | [symbol] | CDZ96684 |
| X₄₈₂₉ | M5 | 79 | 47085 | G | A | [symbol] | CDZ96684 |
| X₄₈₃₀ | M5 | 79 | 57804 | G | A | [symbol] | CDZ96687 |
| X₄₈₃₁ | M5 | 79 | 71637 | C | T | [symbol] | CDZ96691 |
| X₄₈₃₂ | M5 | 79 | 132683 | C | T | [symbol] | CDZ96713 |
| X₄₈₃₃ | M5 | 79 | 171814 | C | T | [symbol] | CDZ96727 |
| X₄₈₃₄ | M5 | 79 | 241350 | C | T | [symbol] | CDZ96753 |
| X₄₈₃₅ | M5 | 79 | 281783 | C | T | [symbol] | CDZ96768 |
| X₄₈₃₆ | M5 | 79 | 307021 | C | T | [symbol] | CDZ96777 |
| X₄₈₃₇ | M5 | 79 | 324145 | C | T | [symbol] | CDZ96781 |
| X₄₈₃₈ | M5 | 79 | 346823 | G | A | [symbol] | CDZ96789 |
| X₄₈₃₉ | M5 | 79 | 368176 | G | A | [symbol] | CDZ96795 |
| X₄₈₄₀ | M5 | 79 | 369258 | G | A | [symbol] | CDZ96793 |
| X₄₈₄₁ | M5 | 79 | 489676 | G | A | [symbol] | CDZ96839 |
| X₄₈₄₂ | M5 | 79 | 492523 | C | T | [symbol] | CDZ96842 |
| X₄₈₄₃ | M5 | 79 | 575411 | C | T | [symbol] | CDZ96868 |
| X₄₈₄₄ | M5 | 79 | 579674 | G | A | [symbol] | CDZ96871 |
| X₄₈₄₅ | M5 | 79 | 604739 | G | A | [symbol] | CDZ96879 |
| X₄₈₄₆ | M5 | 79 | 611702 | C | T | [symbol] | CDZ96881 |
| X₄₈₄₇ | M5 | 79 | 617057 | C | T | [symbol] | CDZ96882 |
| X₄₈₄₈ | M5 | 79 | 679140 | C | T | [symbol] | CDZ96904 |
| X₄₈₄₉ | M5 | 79 | 691309 | C | T | [symbol] | CDZ96911 |
| X₄₈₅₀ | M5 | 79 | 696174 | G | A | [symbol] | CDZ96911 |
| X₄₈₅₁ | M5 | 79 | 735053 | T | C | [symbol] | CDZ96928 |
| X₄₈₅₂ | M5 | 79 | 747717 | A | G | [symbol] | CDZ96929 |
| X₄₈₅₃ | M5 | 79 | 749595 | A | C | [symbol] | CDZ96930 |
| X₄₈₅₄ | M5 | 79 | 759403 | C | T | [symbol] | CDZ96931 |
| X₄₈₅₅ | M5 | 79 | 759513 | G | A | [symbol] | CDZ96931 |
| X₄₈₅₆ | M5 | 79 | 759589 | G | A | [symbol] | CDZ96932 |
| X₄₈₅₇ | M5 | 79 | 759659 | G | A | [symbol] | CDZ96931 |
| X₄₈₅₈ | M5 | 79 | 760430 | T | C | [symbol] | CDZ96932 |
| X₄₈₅₉ | M5 | 79 | 760541 | A | G | [symbol] | CDZ96932 |
| X₄₈₆₀ | M5 | 79 | 760891 | A | G | [symbol] | CDZ96932 |
| X₄₈₆₁ | M5 | 79 | 760988 | G | T | [symbol] | CDZ96932 |
| X₄₈₆₂ | M5 | 79 | 761056 | T | C | [symbol] | CDZ96932 |
| X₄₈₆₃ | M5 | 79 | 768537 | A | G | [symbol] | CDZ96933 |
| X₄₈₆₄ | M5 | 79 | 771663 | T | G | [symbol] | CDZ96933 |
| X₄₈₆₅ | M5 | 79 | 776112 | A | G | [symbol] | CDZ96934 |
| X₄₈₆₆ | M5 | 79 | 780012 | T | C | [symbol] | CDZ96934 |
| X₄₈₆₇ | M5 | 79 | 786064 | A | G | [symbol] | CDZ96934 |
| X₄₈₆₈ | M5 | 79 | 798799 | C | T | [symbol] | CDZ96939 |
| X₄₈₆₉ | M5 | 79 | 827202 | G | A | [symbol] | CDZ96946 |
| X₄₈₇₀ | M5 | 79 | 907000 | C | T | [symbol] | CDZ96976 |
| X₄₈₇₁ | M5 | 79 | 914302 | C | T | [symbol] | CDZ96977 |
| X₄₈₇₂ | M5 | 79 | 928047 | G | A | [symbol] | CDZ96986 |
| X₄₈₇₃ | M5 | 79 | 933234 | G | A | [symbol] | CDZ96987 |
| X₄₈₇₄ | M5 | 79 | 959497 | C | T | [symbol] | CDZ96997 |
| X₄₈₇₅ | M5 | 79 | 1000786 | A | G | [symbol] | CDZ97007 |
| X₄₈₇₆ | M5 | 79 | 1045859 | C | T | [symbol] | CDZ97023 |
| X₄₈₇₇ | M5 | 79 | 1052968 | C | T | [symbol] | CDZ97024 |
| X₄₈₇₈ | M5 | 79 | 1081745 | C | T | [symbol] | CDZ97037 |
| X₄₈₇₉ | M5 | 79 | 1086267 | G | A | [symbol] | CDZ97038 |
| X₄₈₈₀ | M5 | 79 | 1117040 | C | T | [symbol] | CDZ97047 |
| X₄₈₈₁ | M5 | 79 | 1123288 | C | T | [symbol] | CDZ97049 |
| X₄₈₈₂ | M5 | 79 | 1140763 | G | A | [symbol] | CDZ97053 |
| X₄₈₈₃ | M5 | 79 | 1209208 | G | A | [symbol] | CDZ97077 |
| X₄₈₈₄ | M5 | 79 | 1229129 | G | A | [symbol] | CDZ97086 |
| X₄₈₈₅ | M5 | 79 | 1231740 | C | T | [symbol] | CDZ97087 |
| X₄₈₈₆ | M5 | 79 | 1254757 | G | A | [symbol] | CDZ97095 |
| X₄₈₈₇ | M5 | 79 | 1284476 | C | T | [symbol] | CDZ97106 |
| X₄₈₈₈ | M5 | 79 | 1318034 | C | T | [symbol] | CDZ97117 |
| X₄₈₈₉ | M5 | 79 | 1336766 | C | T | [symbol] | CDZ97121 |
| X₄₈₉₀ | M5 | 79 | 1367232 | C | T | [symbol] | CDZ97129 |
| X₄₈₉₁ | M5 | 79 | 1394034 | G | A | [symbol] | CDZ97137 |
| X₄₈₉₂ | M5 | 79 | 1414969 | G | A | [symbol] | CDZ97147 |
| X₄₈₉₃ | M5 | 79 | 1430954 | G | A | [symbol] | CDZ97152 |
| X₄₈₉₄ | M5 | 79 | 1447480 | G | A | [symbol] | CDZ97156 |
| X₄₈₉₅ | M5 | 79 | 1517815 | C | T | [symbol] | CDZ97180 |
| X₄₈₉₆ | M5 | 79 | 1533781 | C | T | [symbol] | CDZ97185 |
| X₄₈₉₇ | M5 | 79 | 1540205 | C | T | [symbol] | CDZ97186 |
| X₄₈₉₈ | M5 | 79 | 1624415 | G | A | [symbol] | CDZ97217 |
| X₄₈₉₉ | M5 | 79 | 1633005 | A | T | [symbol] | CDZ97217 |
| X₄₉₀₀ | M5 | 79 | 1658469 | C | T | [symbol] | CDZ97227 |
| X₄₉₀₁ | M5 | 79 | 1674448 | G | A | [symbol] | CDZ97228 |
| X₄₉₀₂ | M5 | 79 | 1694516 | C | T | [symbol] | CDZ97233 |
| X₄₉₀₃ | M5 | 79 | 1696776 | G | A | [symbol] | CDZ97234 |
| X₄₉₀₄ | M5 | 79 | 1704321 | G | A | [symbol] | CDZ97235 |
| X₄₉₀₅ | M5 | 79 | 1797660 | C | T | [symbol] | CDZ97265 |
| X₄₉₀₆ | M5 | 79 | 1797676 | G | A | [symbol] | CDZ97265 |
| X₄₉₀₇ | M5 | 79 | 1809211 | C | T | [symbol] | CDZ97268 |
| X₄₉₀₈ | M5 | 79 | 1819746 | C | T | [symbol] | CDZ97273 |
| X₄₉₀₉ | M5 | 79 | 1842448 | G | A | [symbol] | CDZ97282 |
| X₄₉₁₀ | M5 | 79 | 1850295 | G | A | [symbol] | CDZ97285 |
| X₄₉₁₁ | M5 | 79 | 1854359 | G | A | [symbol] | CDZ97285 |
| X₄₉₁₂ | M5 | 79 | 1855037 | A | G | [symbol] | CDZ97285 |
| X₄₉₁₃ | M5 | 79 | 1859220 | A | G | [symbol] | CDZ97291 |
| X₄₉₁₄ | M5 | 79 | 1864111 | C | T | [symbol] | CDZ97291 |
| X₄₉₁₅ | M5 | 79 | 1912360 | G | A | [symbol] | CDZ97307 |
| X₄₉₁₆ | M5 | 79 | 1930688 | G | A | [symbol] | CDZ97315 |
| X₄₉₁₇ | M5 | 79 | 2013361 | C | T | [symbol] | CDZ97344 |
| X₄₉₁₈ | M5 | 79 | 2027861 | C | T | [symbol] | CDZ97350 |
| X₄₉₁₉ | M5 | 79 | 2089423 | C | T | [symbol] | CDZ97372 |
| X₄₉₂₀ | M5 | 79 | 2115870 | G | A | [symbol] | CDZ97380 |
| X₄₉₂₁ | M5 | 79 | 2116476 | C | T | [symbol] | CDZ97380 |
| X₄₉₂₂ | M5 | 79 | 2121041 | G | A | [symbol] | CDZ97380 |
| X₄₉₂₃ | M5 | 79 | 2152573 | C | T | [symbol] | CDZ97392 |
| X₄₉₂₄ | M5 | 79 | 2159433 | G | T | [symbol] | CDZ97394 |
| X₄₉₂₅ | M5 | 79 | 2188410 | G | A | [symbol] | CDZ97405 |
| X₄₉₂₆ | M5 | 79 | 2268540 | C | T | [symbol] | CDZ97435 |
| X₄₉₂₇ | M5 | 79 | 2271463 | G | A | [symbol] | CDZ97437 |
| X₄₉₂₈ | M5 | 79 | 2294761 | G | A | [symbol] | CDZ97444 |
| X₄₉₂₉ | M5 | 79 | 2315869 | A | C | [symbol] | CDZ97452 |
| X₄₉₃₀ | M5 | 79 | 2317043 | G | A | [symbol] | CDZ97452 |
| X₄₉₃₁ | M5 | 79 | 2323713 | C | T | [symbol] | CDZ97455 |
| X₄₉₃₂ | M5 | 79 | 2339881 | C | G | [symbol] | CDZ97460 |
| X₄₉₃₃ | M5 | 79 | 2340326 | G | A | [symbol] | CDZ97462 |
| X₄₉₃₄ | M5 | 79 | 2340636 | T | C | [symbol] | CDZ97462 |
| X₄₉₃₅ | M5 | 85 | 462 | G | A | [symbol] | |
| X₄₉₃₆ | M5 | 85 | 463 | A | G | [symbol] | |
| X₄₉₃₇ | M5 | 85 | 467 | A | T | [symbol] | |
| X₄₉₃₈ | M5 | 85 | 512 | A | G | [symbol] | |
| X₄₉₃₉ | M5 | 85 | 516 | G | A | [symbol] | |
| X₄₉₄₀ | M5 | 85 | 521 | C | T | [symbol] | |
| X₄₉₄₁ | M5 | 85 | 522 | A | G | [symbol] | |
| X₄₉₄₂ | M5 | 86 | 230 | A | G | [symbol] | |
| X₄₉₄₃ | M5 | 88 | 119 | C | T | [symbol] | CDZ97464 |
| X₄₉₄₄ | M5 | 88 | 196 | G | A | [symbol] | CDZ97464 |
| X₄₉₄₅ | M5 | 88 | 898 | C | A | [symbol] | CDZ97464 |
| X₄₉₄₆ | M5 | 93 | 1037 | A | C | [symbol] | |
| X₄₉₄₇ | M5 | 99 | 245 | G | A | [symbol] | |
| X₄₉₄₈ | M5 | 103 | 768 | C | T | [symbol] | |
| X₄₉₄₉ | M5 | 105 | 258 | A | G | [symbol] | CDZ97474 |
| X₄₉₅₀ | M5 | 109 | 396 | T | C | [symbol] | |
| X₄₉₅₁ | M5 | 118 | 396 | C | T | [symbol] | CDZ97478 |
| X₄₉₅₂ | M5 | 118 | 870 | G | A | [symbol] | CDZ97478 |
| X₄₉₅₃ | M5 | 118 | 1491 | G | A | [symbol] | CDZ97478 |
| X₄₉₅₄ | M5 | 124 | 45141 | G | A | [symbol] | CDZ97491 |
| X₄₉₅₅ | M5 | 124 | 72117 | G | A | [symbol] | CDZ97501 |
| X₄₉₅₆ | M5 | 124 | 72760 | G | A | [symbol] | CDZ97501 |
| X₄₉₅₇ | M5 | 124 | 94611 | G | A | [symbol] | CDZ97507 |
| X₄₉₅₈ | M5 | 124 | 111749 | G | A | [symbol] | CDZ97512 |
| X₄₉₅₉ | M5 | 124 | 156052 | G | A | [symbol] | CDZ97524 |
| X₄₉₆₀ | M5 | 124 | 207992 | C | T | [symbol] | CDZ97541 |
| X₄₉₆₁ | M5 | 124 | 222249 | C | T | [symbol] | CDZ97547 |
| X₄₉₆₂ | M5 | 124 | 253872 | C | T | [symbol] | CDZ97553 |
| X₄₉₆₃ | M5 | 125 | 9173 | C | T | [symbol] | CDZ97563 |
| X₄₉₆₄ | M5 | 125 | 35864 | T | C | [symbol] | CDZ97573 |
| X₄₉₆₅ | M5 | 129 | 299 | G | A | [symbol] | CDZ97577 |
| X₄₉₆₆ | M5 | 129 | 433 | G | A | [symbol] | CDZ97577 |
| X₄₉₆₇ | M5 | 129 | 856 | G | A | [symbol] | CDZ97577 |
| X₄₉₆₈ | M5 | 129 | 1013 | C | T | [symbol] | CDZ97577 |
| X₄₉₆₉ | M5 | 130 | 674 | C | T | [symbol] | CDZ97578 |
| X₄₉₇₀ | M5 | 138 | 123 | G | T | [symbol] | |
| X₄₉₇₁ | M5 | 141 | 10162 | G | A | [symbol] | CDZ97582 |
| X₄₉₇₂ | M5 | 141 | 15764 | C | T | [symbol] | CDZ97587 |
| X₄₉₇₃ | M5 | 149 | 2074 | T | G | [symbol] | CDZ97598 |
| X₄₉₇₄ | M5 | 149 | 2453 | C | T | [symbol] | CDZ97598 |
| X₄₉₇₅ | M5 | 159 | 106 | A | C | [symbol] | |
| X₄₉₇₆ | M5 | 162 | 70025 | C | T | [symbol] | CDZ97625 |
| X₄₉₇₇ | M5 | 162 | 70405 | A | G | [symbol] | CDZ97625 |
| X₄₉₇₈ | M5 | 162 | 93443 | G | A | [symbol] | CDZ97631 |
| X₄₉₇₉ | M5 | 162 | 96194 | G | A | [symbol] | CDZ97631 |
| X₄₉₈₀ | M5 | 162 | 117736 | G | A | [symbol] | CDZ97639 |
| X₄₉₈₁ | M5 | 162 | 199495 | G | A | [symbol] | CDZ97664 |
| X₄₉₈₂ | M5 | 162 | 214099 | G | A | [symbol] | CDZ97671 |
| X₄₉₈₃ | M5 | 162 | 218351 | G | A | [symbol] | CDZ97671 |
| X₄₉₈₄ | M5 | 162 | 223407 | C | T | [symbol] | CDZ97674 |
| X₄₉₈₅ | M5 | 162 | 308369 | T | C | [symbol] | CDZ97702 |
| X₄₉₈₆ | M5 | 162 | 311666 | A | G | [symbol] | CDZ97702 |
| X₄₉₈₇ | M5 | 162 | 311707 | C | G | [symbol] | CDZ97702 |
| X₄₉₈₈ | M5 | 162 | 321070 | C | T | [symbol] | CDZ97703 |
| X₄₉₈₉ | M5 | 162 | 321073 | A | G | [symbol] | CDZ97703 |
| X₄₉₉₀ | M5 | 162 | 321460 | C | G | [symbol] | CDZ97703 |
| X₄₉₉₁ | M5 | 162 | 321463 | A | C | [symbol] | CDZ97703 |
| X₄₉₉₂ | M5 | 162 | 322591 | G | A | [symbol] | CDZ97703 |
| X₄₉₉₃ | M5 | 162 | 323448 | T | G | [symbol] | CDZ97703 |
| X₄₉₉₄ | M5 | 162 | 323735 | A | G | [symbol] | CDZ97703 |
| X₄₉₉₅ | M5 | 162 | 324114 | T | C | [symbol] | CDZ97703 |
| X₄₉₉₆ | M5 | 162 | 324139 | C | T | [symbol] | CDZ97703 |
| X₄₉₉₇ | M5 | 162 | 324568 | A | G | [symbol] | CDZ97703 |
| X₄₉₉₈ | M5 | 162 | 360320 | G | A | [symbol] | CDZ97714 |
| X₄₉₉₉ | M5 | 162 | 398165 | C | T | [symbol] | CDZ97730 |
| X₅₀₀₀ | M5 | 162 | 423180 | C | T | [symbol] | CDZ97740 |
| X₅₀₀₁ | M5 | 162 | 424391 | C | T | [symbol] | CDZ97740 |
| X₅₀₀₂ | M5 | 162 | 444123 | T | C | [symbol] | CDZ97748 |
| X₅₀₀₃ | M5 | 162 | 467207 | C | T | [symbol] | CDZ97755 |
| X₅₀₀₄ | M5 | 162 | 480722 | G | A | [symbol] | CDZ97761 |
| X₅₀₀₅ | M5 | 162 | 487433 | G | A | [symbol] | CDZ97763 |
| X₅₀₀₆ | M5 | 162 | 491906 | G | A | [symbol] | CDZ97764 |
| X₅₀₀₇ | M5 | 162 | 492101 | G | A | [symbol] | CDZ97764 |
| X₅₀₀₈ | M5 | 162 | 501886 | C | T | [symbol] | CDZ97769 |
| X₅₀₀₉ | M5 | 162 | 631700 | G | A | [symbol] | CDZ97811 |
| X₅₀₁₀ | M5 | 162 | 632311 | G | A | [symbol] | CDZ97814 |
| X₅₀₁₁ | M5 | 162 | 633321 | G | A | [symbol] | CDZ97814 |
| X₅₀₁₂ | M5 | 162 | 633633 | G | A | [symbol] | CDZ97814 |
| X₅₀₁₃ | M5 | 162 | 640005 | C | T | [symbol] | CDZ97815 |
| X₅₀₁₄ | M5 | 162 | 721840 | G | A | [symbol] | CDZ97838 |
| X₅₀₁₅ | M5 | 162 | 738675 | G | A | [symbol] | CDZ97842 |
| X₅₀₁₆ | M5 | 162 | 738686 | C | T | [symbol] | CDZ97842 |
| X₅₀₁₇ | M5 | 162 | 808830 | G | A | [symbol] | CDZ97869 |
| X₅₀₁₈ | M5 | 162 | 825209 | G | A | [symbol] | CDZ97877 |
| X₅₀₁₉ | M5 | 162 | 871911 | C | T | [symbol] | CDZ97890 |
| X₅₀₂₀ | M5 | 162 | 914850 | C | T | [symbol] | CDZ97904 |
| X₅₀₂₁ | M5 | 162 | 952036 | T | A | [symbol] | CDZ97918 |
| X₅₀₂₂ | M5 | 185 | 21 | C | T | [symbol] | CDZ97957 |
| X₅₀₂₃ | M5 | 189 | 96257 | C | T | [symbol] | CDZ97987 |
| X₅₀₂₄ | M5 | 189 | 126573 | G | A | [symbol] | CDZ97996 |
| X₅₀₂₅ | M5 | 189 | 127356 | G | A | [symbol] | CDZ97996 |
| X₅₀₂₆ | M5 | 189 | 149091 | G | A | [symbol] | CDZ98004 |
| X₅₀₂₇ | M5 | 189 | 194647 | A | G | [symbol] | CDZ98020 |
| X₅₀₂₈ | M5 | 189 | 194665 | A | G | [symbol] | CDZ98020 |
| X₅₀₂₉ | M5 | 189 | 298487 | C | T | [symbol] | CDZ98056 |
| X₅₀₃₀ | M5 | 189 | 323680 | C | T | [symbol] | CDZ98063 |
| X₅₀₃₁ | M5 | 189 | 371247 | G | A | [symbol] | CDZ98078 |
| X₅₀₃₂ | M5 | 189 | 452298 | G | A | [symbol] | CDZ98106 |
| X₅₀₃₃ | M5 | 191 | 342 | A | G | [symbol] | CDZ98107 |
| X₅₀₃₄ | M5 | 191 | 347 | C | T | [symbol] | CDZ98107 |
| X₅₀₃₅ | M5 | 191 | 427 | C | T | [symbol] | CDZ98107 |
| X₅₀₃₆ | M5 | 191 | 451 | C | T | [symbol] | CDZ98107 |
| X₅₀₃₇ | M5 | 191 | 487 | A | G | [symbol] | CDZ98107 |
| X₅₀₃₈ | M5 | 197 | 624 | C | T | [symbol] | CDZ98111 |
| X₅₀₃₉ | M5 | 198 | 202 | C | A | [symbol] | |
| X₅₀₄₀ | M5 | 198 | 203 | G | A | [symbol] | |
| X₅₀₄₁ | M5 | 198 | 238 | C | T | [symbol] | |
| X₅₀₄₂ | M5 | 198 | 265 | C | T | [symbol] | |
| X₅₀₄₃ | M5 | 199 | 688 | C | T | [symbol] | |
| X₅₀₄₄ | M5 | 199 | 911 | C | T | [symbol] | |
| X₅₀₄₅ | M5 | 199 | 971 | C | T | [symbol] | |
| X₅₀₄₆ | M5 | 199 | 1218 | C | T | [symbol] | |
| X₅₀₄₇ | M5 | 202 | 171 | C | T | [symbol] | |
| X₅₀₄₈ | M5 | 205 | 360 | C | T | [symbol] | CDZ98112 |
| X₅₀₄₉ | M5 | 205 | 981 | C | T | [symbol] | CDZ98112 |
| X₅₀₅₀ | M5 | 207 | 406 | G | A | [symbol] | |
| X₅₀₅₁ | M5 | 208 | 117 | G | A | [symbol] | |
| X₅₀₅₂ | M5 | 208 | 476 | G | A | [symbol] | |
| X₅₀₅₃ | M5 | 208 | 616 | G | A | [symbol] | |
| X₅₀₅₄ | M5 | 208 | 935 | G | A | [symbol] | |
| X₅₀₅₅ | M5 | 209 | 312 | C | T | [symbol] | CDZ98113 |
| X₅₀₅₆ | M5 | 214 | 197 | C | G | [symbol] | CDZ98116 |
| X₅₀₅₇ | M5 | 223 | 93 | G | A | [symbol] | CDZ98118 |
| X₅₀₅₈ | M5 | 223 | 102 | A | G | [symbol] | CDZ98118 |
| X₅₀₅₉ | M5 | 223 | 133 | A | G | [symbol] | CDZ98118 |
| X₅₀₆₀ | M5 | 223 | 150 | T | C | [symbol] | CDZ98118 |
| X₅₀₆₁ | M5 | 223 | 155 | A | C | [symbol] | CDZ98118 |
| X₅₀₆₂ | M5 | 223 | 158 | T | C | [symbol] | CDZ98118 |
| X₅₀₆₃ | M5 | 223 | 160 | C | T | [symbol] | CDZ98118 |
| X₅₀₆₄ | M5 | 223 | 175 | G | A | [symbol] | CDZ98118 |
| X₅₀₆₅ | M5 | 223 | 177 | A | G | [symbol] | CDZ98118 |
| X₅₀₆₆ | M5 | 223 | 291 | C | A | [symbol] | CDZ98118 |
| X₅₀₆₇ | M5 | 225 | 317 | C | T | [symbol] | |
| X₅₀₆₈ | M5 | 227 | 202 | G | A | [symbol] | |
| X₅₀₆₉ | M5 | 232 | 340 | G | A | [symbol] | CDZ98119 |
| X₅₀₇₀ | M5 | 232 | 1379 | C | T | [symbol] | CDZ98119 |
| X₅₀₇₁ | M5 | 232 | 1521 | C | T | [symbol] | CDZ98119 |
| X₅₀₇₂ | M5 | 232 | 1662 | G | A | [symbol] | CDZ98119 |
| X₅₀₇₃ | M5 | 232 | 1761 | C | T | [symbol] | CDZ98119 |
| X₅₀₇₄ | M5 | 232 | 2027 | C | T | [symbol] | CDZ98119 |
| X₅₀₇₅ | M5 | 232 | 3060 | C | T | [symbol] | CDZ98120 |
| X₅₀₇₆ | M5 | 232 | 3284 | C | T | [symbol] | CDZ98119 |
| X₅₀₇₇ | M5 | 232 | 4437 | G | A | [symbol] | CDZ98121 |
| X₅₀₇₈ | M5 | 232 | 4561 | C | T | [symbol] | CDZ98120 |
| X₅₀₇₉ | M5 | 242 | 7334 | C | T | [symbol] | CDZ98125 |
| X₅₀₈₀ | M5 | 242 | 41710 | G | A | [symbol] | CDZ98131 |
| X₅₀₈₁ | M5 | 242 | 50262 | G | A | [symbol] | CDZ98135 |
| X₅₀₈₂ | M5 | 242 | 88037 | G | A | [symbol] | CDZ98147 |
| X₅₀₈₃ | M5 | 242 | 107587 | G | A | [symbol] | CDZ98153 |
| X₅₀₈₄ | M5 | 242 | 168689 | G | A | [symbol] | CDZ98172 |
| X₅₀₈₅ | M5 | 242 | 194983 | C | T | [symbol] | CDZ98179 |
| X₅₀₈₆ | M5 | 242 | 213399 | C | T | [symbol] | CDZ98185 |
| X₅₀₈₇ | M5 | 242 | 213986 | G | A | [symbol] | CDZ98185 |
| X₅₀₈₈ | M5 | 242 | 227271 | C | T | [symbol] | CDZ98191 |
| X₅₀₈₉ | M5 | 242 | 233088 | G | A | [symbol] | CDZ98193 |
| X₅₀₉₀ | M5 | 242 | 233141 | G | A | [symbol] | CDZ98193 |
| X₅₀₉₁ | M5 | 242 | 310353 | G | A | [symbol] | CDZ98216 |
| X₅₀₉₂ | M5 | 242 | 363677 | G | A | [symbol] | CDZ98233 |
| X₅₀₉₃ | M5 | 242 | 376713 | G | A | [symbol] | CDZ98238 |
| X₅₀₉₄ | M5 | 242 | 379812 | C | T | [symbol] | CDZ98238 |
| X₅₀₉₅ | M5 | 242 | 404132 | G | A | [symbol] | CDZ98248 |
| X₅₀₉₆ | M5 | 242 | 405825 | G | A | [symbol] | CDZ98250 |
| X₅₀₉₇ | M5 | 242 | 412676 | G | A | [symbol] | CDZ98249 |
| X₅₀₉₈ | M5 | 242 | 432104 | C | T | [symbol] | CDZ98255 |
| X₅₀₉₉ | M5 | 242 | 485936 | G | A | [symbol] | CDZ98270 |
| X₅₁₀₀ | M5 | 242 | 492389 | G | A | [symbol] | CDZ98274 |
| X₅₁₀₁ | M5 | 242 | 514780 | C | T | [symbol] | CDZ98282 |
| X₅₁₀₂ | M5 | 242 | 542663 | G | A | [symbol] | CDZ98290 |
| X₅₁₀₃ | M5 | 242 | 559999 | G | A | [symbol] | CDZ98297 |
| X₅₁₀₄ | M5 | 242 | 602456 | G | A | [symbol] | CDZ98308 |
| X₅₁₀₅ | M5 | 242 | 602531 | G | A | [symbol] | CDZ98308 |
| X₅₁₀₆ | M5 | 242 | 604704 | C | T | [symbol] | CDZ98309 |
| X₅₁₀₇ | M5 | 246 | 329 | C | G | [symbol] | CDZ98328 |
| X₅₁₀₈ | M5 | 246 | 331 | T | C | [symbol] | CDZ98328 |
| X₅₁₀₉ | M5 | 249 | 206 | G | A | [symbol] | CED84929 |
| X₅₁₁₀ | M5 | 249 | 72016 | C | T | [symbol] | CED84950 |
| X₅₁₁₁ | M5 | 249 | 110060 | C | T | [symbol] | CED84968 |
| X₅₁₁₂ | M5 | 249 | 123789 | C | T | [symbol] | CED84972 |
| X₅₁₁₃ | M5 | 249 | 142920 | G | A | [symbol] | CED84978 |
| X₅₁₁₄ | M5 | 249 | 157550 | C | T | [symbol] | CED84983 |
| X₅₁₁₅ | M5 | 249 | 191304 | C | T | [symbol] | CED84988 |
| X₅₁₁₆ | M5 | 249 | 238318 | C | T | [symbol] | CED85003 |
| X₅₁₁₇ | M5 | 249 | 253494 | C | T | [symbol] | CED85008 |
| X₅₁₁₈ | M5 | 249 | 269707 | G | A | [symbol] | CED85013 |
| X₅₁₁₉ | M5 | 249 | 272075 | C | T | [symbol] | CED85013 |
| X₅₁₂₀ | M5 | 249 | 305975 | G | A | [symbol] | CED85023 |
| X₅₁₂₁ | M5 | 249 | 420458 | C | T | [symbol] | CED85069 |
| X₅₁₂₂ | M5 | 249 | 436175 | G | A | [symbol] | CED85073 |
| X₅₁₂₃ | M5 | 249 | 445429 | G | A | [symbol] | CED85075 |
| X₅₁₂₄ | M5 | 249 | 476060 | A | G | [symbol] | CED85088 |
| X₅₁₂₅ | M5 | 249 | 485782 | C | T | [symbol] | CED85089 |
| X₅₁₂₆ | M5 | 249 | 501310 | C | T | [symbol] | CED85093 |
| X₅₁₂₇ | M5 | 249 | 501510 | T | C | [symbol] | CED85093 |
| X₅₁₂₈ | M5 | 249 | 506067 | A | G | [symbol] | CED85094 |
| X₅₁₂₉ | M5 | 249 | 532943 | A | G | [symbol] | CED85099 |
| X₅₁₃₀ | M5 | 249 | 571922 | C | T | [symbol] | CED85115 |
| X₅₁₃₁ | M5 | 249 | 598579 | C | T | [symbol] | CED85125 |
| X₅₁₃₂ | M5 | 249 | 626627 | G | A | [symbol] | CED85132 |
| X₅₁₃₃ | M5 | 249 | 637944 | G | A | [symbol] | CED85135 |
| X₅₁₃₄ | M5 | 249 | 660408 | G | A | [symbol] | CED85144 |
| X₅₁₃₅ | M5 | 249 | 715551 | G | A | [symbol] | CED85163 |
| X₅₁₃₆ | M5 | 249 | 842136 | C | T | [symbol] | CED85198 |
| X₅₁₃₇ | M5 | 249 | 849958 | C | T | [symbol] | CED85201 |
| X₅₁₃₈ | M5 | 249 | 854220 | G | A | [symbol] | CED85201 |
| X₅₁₃₉ | M5 | 249 | 886063 | G | A | [symbol] | CED85208 |
| X₅₁₄₀ | M5 | 249 | 911274 | C | T | [symbol] | CED85218 |
| X₅₁₄₁ | M5 | 249 | 926107 | C | T | [symbol] | CED85222 |
| X₅₁₄₂ | M5 | 249 | 932606 | C | T | [symbol] | CED85223 |
| X₅₁₄₃ | M5 | 249 | 945434 | C | T | [symbol] | CED85227 |
| X₅₁₄₄ | M5 | 249 | 945727 | C | T | [symbol] | CED85227 |
| X₅₁₄₅ | M5 | 249 | 969333 | G | T | [symbol] | CED85238 |
| X₅₁₄₆ | M5 | 249 | 977170 | C | T | [symbol] | CED85242 |
| X₅₁₄₇ | M5 | 249 | 989520 | C | T | [symbol] | CED85243 |
| X₅₁₄₈ | M5 | 249 | 1014098 | C | T | [symbol] | CED85252 |
| X₅₁₄₉ | M5 | 249 | 1014926 | C | T | [symbol] | CED85252 |
| X₅₁₅₀ | M5 | 249 | 1063615 | C | T | [symbol] | CED85265 |
| X₅₁₅₁ | M5 | 249 | 1089152 | G | A | [symbol] | CED85274 |
| X₅₁₅₂ | M5 | 249 | 1144309 | G | A | [symbol] | CED85291 |
| X₅₁₅₃ | M5 | 249 | 1176977 | G | A | [symbol] | CED85303 |
| X₅₁₅₄ | M5 | 249 | 1195367 | G | A | [symbol] | CED85307 |
| X₅₁₅₅ | M5 | 249 | 1203953 | G | A | [symbol] | CED85311 |
| X₅₁₅₆ | M5 | 249 | 1209489 | C | T | [symbol] | CED85313 |
| X₅₁₅₇ | M5 | 249 | 1230068 | C | T | [symbol] | CED85319 |
| X₅₁₅₈ | M5 | 249 | 1234239 | C | T | [symbol] | CED85319 |
| X₅₁₅₉ | M5 | 249 | 1286733 | G | A | [symbol] | CED85336 |
| X₅₁₆₀ | M5 | 249 | 1299472 | C | T | [symbol] | CED85343 |
| X₅₁₆₁ | M5 | 249 | 1310059 | C | T | [symbol] | CED85346 |
| X₅₁₆₂ | M5 | 249 | 1331428 | G | A | [symbol] | CED85352 |
| X₅₁₆₃ | M5 | 249 | 1391343 | G | A | [symbol] | CED85372 |
| X₅₁₆₄ | M5 | 249 | 1393971 | G | A | [symbol] | CED85373 |
| X₅₁₆₅ | M5 | 249 | 1437896 | G | A | [symbol] | CED85389 |
| X₅₁₆₆ | M5 | 249 | 1437902 | G | A | [symbol] | CED85389 |
| X₅₁₆₇ | M5 | 249 | 1457529 | G | A | [symbol] | CED85398 |
| X₅₁₆₈ | M5 | 249 | 1471661 | C | T | [symbol] | CED85402 |
| X₅₁₆₉ | M5 | 249 | 1475590 | G | A | [symbol] | CED85404 |
| X₅₁₇₀ | M5 | 249 | 1498029 | T | C | [symbol] | CED85415 |
| X₅₁₇₁ | M5 | 249 | 1498823 | T | C | [symbol] | CED85414 |
| X₅₁₇₂ | M5 | 249 | 1498829 | C | T | [symbol] | CED85414 |
| X₅₁₇₃ | M5 | 249 | 1499741 | G | A | [symbol] | CED85415 |
| X₅₁₇₄ | M5 | 249 | 1502631 | G | T | [symbol] | CED85416 |
| X₅₁₇₅ | M5 | 249 | 1502641 | T | A | [symbol] | CED85416 |
| X₅₁₇₆ | M5 | 249 | 1502819 | T | G | [symbol] | CED85416 |
| X₅₁₇₇ | M5 | 249 | 1505634 | T | G | [symbol] | CED85416 |
| X₅₁₇₈ | M5 | 24 | 1518591 | T | A | [symbol] | CED85419 |
| X₅₁₇₉ | M5 | 249 | 1519431 | A | G | [symbol] | CED85419 |
| X₅₁₈₀ | M5 | 249 | 1520420 | G | C | [symbol] | CED85420 |
| X₅₁₈₁ | M5 | 249 | 1531574 | C | T | [symbol] | CED85423 |
| X₅₁₈₂ | M5 | 249 | 1599907 | C | T | [symbol] | CED85444 |
| X₅₁₈₃ | M5 | 249 | 1619036 | G | A | [symbol] | CED85450 |
| X₅₁₈₄ | M5 | 249 | 1636931 | G | A | [symbol] | CED85455 |
| X₅₁₈₅ | M5 | 249 | 1653615 | T | G | [symbol] | CED85457 |
| X₅₁₈₆ | M5 | 249 | 1653962 | C | T | [symbol] | CED85458 |
| X₅₁₈₇ | M5 | 249 | 1655479 | C | T | [symbol] | CED85458 |
| X₅₁₈₈ | M5 | 249 | 1666185 | C | T | [symbol] | CED85460 |
| X₅₁₈₉ | M5 | 249 | 1691139 | G | T | [symbol] | CED85467 |
| X₅₁₉₀ | M5 | 249 | 1726777 | C | T | [symbol] | CED85474 |
| X₅₁₉₁ | M5 | 249 | 1766819 | C | T | [symbol] | CED85490 |
| X₅₁₉₂ | M5 | 249 | 1780551 | A | G | [symbol] | CED85493 |
| X₅₁₉₃ | M5 | 249 | 1780569 | A | G | [symbol] | CED85493 |
| X₅₁₉₄ | M5 | 249 | 1801965 | G | A | [symbol] | CED85501 |
| X₅₁₉₅ | M5 | 249 | 1803575 | C | T | [symbol] | CED85502 |
| X₅₁₉₆ | M5 | 249 | 1823713 | A | G | [symbol] | CED85506 |
| X₅₁₉₇ | M5 | 249 | 1862072 | C | T | [symbol] | CED85520 |
| X₅₁₉₈ | M5 | 249 | 1880762 | G | A | [symbol] | CED85525 |
| X₅₁₉₉ | M5 | 249 | 1944026 | G | A | [symbol] | CED85545 |
| X₅₂₀₀ | M5 | 249 | 1951259 | G | A | [symbol] | CED85547 |
| X₅₂₀₁ | M5 | 249 | 1988505 | C | T | [symbol] | CED85560 |
| X₅₂₀₂ | M5 | 249 | 2015272 | G | A | [symbol] | CED85567 |
| X₅₂₀₃ | M5 | 249 | 2021262 | G | A | [symbol] | CED85569 |
| X₅₂₀₄ | M5 | 249 | 2027477 | G | A | [symbol] | CED85573 |
| X₅₂₀₅ | M5 | 249 | 2054064 | C | T | [symbol] | CED85583 |
| X₅₂₀₆ | M5 | 249 | 2110956 | C | T | [symbol] | CED85603 |
| X₅₂₀₇ | M5 | 249 | 2124517 | C | T | [symbol] | CED85607 |
| X₅₂₀₈ | M5 | 249 | 2167664 | G | A | [symbol] | CED85620 |
| X₅₂₀₉ | M5 | 249 | 2178506 | G | A | [symbol] | CED85622 |
| X₅₂₁₀ | M5 | 249 | 2183695 | G | A | [symbol] | CED85623 |
| X₅₂₁₁ | M5 | 249 | 2198205 | G | A | [symbol] | CED85628 |
| X₅₂₁₂ | M5 | 249 | 2223626 | G | A | [symbol] | CED85633 |
| X₅₂₁₃ | M5 | 249 | 2254072 | G | A | [symbol] | CED85640 |
| X₅₂₁₄ | M5 | 249 | 2255547 | G | C | [symbol] | CED85640 |
| X₅₂₁₅ | M5 | 252 | 512 | C | T | [symbol] | |
| X₅₂₁₆ | M5 | 252 | 524 | C | T | [symbol] | |
| X₅₂₁₇ | M5 | 258 | 576 | A | G | [symbol] | |
| X₅₂₁₈ | M5 | 258 | 676 | T | C | [symbol] | |
| X₅₂₁₉ | M5 | 258 | 1139 | A | T | [symbol] | |
| X₅₂₂₀ | M5 | 258 | 1394 | G | A | [symbol] | |
| X₅₂₂₁ | M5 | 260 | 156 | G | A | [symbol] | |
| X₅₂₂₂ | M5 | 262 | 4049 | G | A | [symbol] | CDZ98330 |
| X₅₂₂₃ | M5 | 262 | 30347 | G | A | [symbol] | CDZ98338 |
| X₅₂₂₄ | M5 | 262 | 30359 | G | A | [symbol] | CDZ98338 |
| X₅₂₂₅ | M5 | 262 | 63941 | G | A | [symbol] | CDZ98349 |
| X₅₂₂₆ | M5 | 262 | 134217 | G | A | [symbol] | CDZ98371 |
| X₅₂₂₇ | M5 | 262 | 139442 | C | T | [symbol] | CDZ98375 |
| X₅₂₂₈ | M5 | 262 | 144566 | G | A | [symbol] | CDZ98375 |
| X₅₂₂₉ | M5 | 262 | 148151 | C | T | [symbol] | CDZ98375 |
| X₅₂₃₀ | M5 | 262 | 148199 | G | A | [symbol] | CDZ98376 |
| X₅₂₃₁ | M5 | 262 | 164438 | G | A | [symbol] | CDZ98383 |
| X₅₂₃₂ | M5 | 262 | 201531 | G | A | [symbol] | CDZ98396 |
| X₅₂₃₃ | M5 | 262 | 252708 | G | A | [symbol] | CDZ98414 |
| X₅₂₃₄ | M5 | 262 | 286191 | C | T | [symbol] | CDZ98425 |
| X₅₂₃₅ | M5 | 262 | 319302 | G | A | [symbol] | CDZ98436 |
| X₅₂₃₆ | M5 | 262 | 350852 | C | T | [symbol] | CDZ98449 |
| X₅₂₃₇ | M5 | 262 | 351354 | G | A | [symbol] | CDZ98450 |
| X₅₂₃₈ | M5 | 262 | 366171 | G | A | [symbol] | CDZ98452 |
| X₅₂₃₉ | M5 | 262 | 380519 | C | T | [symbol] | CDZ98457 |
| X₅₂₄₀ | M5 | 262 | 397539 | G | A | [symbol] | CDZ98463 |
| X₅₂₄₁ | M5 | 262 | 414403 | C | T | [symbol] | CDZ98467 |
| X₅₂₄₂ | M5 | 262 | 415802 | C | T | [symbol] | CDZ98467 |
| X₅₂₄₃ | M5 | 262 | 420102 | G | A | [symbol] | CDZ98468 |
| X₅₂₄₄ | M5 | 262 | 446956 | C | T | [symbol] | CDZ98477 |
| X₅₂₄₅ | M5 | 262 | 457461 | T | A | [symbol] | CDZ98483 |
| X₅₂₄₆ | M5 | 262 | 510643 | G | A | [symbol] | CDZ98502 |
| X₅₂₄₇ | M5 | 262 | 539428 | G | A | [symbol] | CDZ98514 |
| X₅₂₄₈ | M5 | 262 | 539452 | A | G | [symbol] | CDZ98514 |
| X₅₂₄₉ | M5 | 262 | 539470 | A | G | [symbol] | CDZ98514 |
| X₅₂₅₀ | M5 | 262 | 552414 | C | T | [symbol] | CDZ98518 |
| X₅₂₅₁ | M5 | 262 | 557280 | G | A | [symbol] | CDZ98518 |
| X₅₂₅₂ | M5 | 262 | 560713 | G | A | [symbol] | CDZ98519 |
| X₅₂₅₃ | M5 | 262 | 562795 | C | T | [symbol] | CDZ98521 |
| X₅₂₅₄ | M5 | 262 | 567591 | G | A | [symbol] | CDZ98524 |
| X₅₂₅₅ | M5 | 262 | 567801 | G | A | [symbol] | CDZ98524 |
| X₅₂₅₆ | M5 | 262 | 607661 | G | A | [symbol] | CDZ98533 |
| X₅₂₅₇ | M5 | 262 | 618198 | G | A | [symbol] | CDZ98538 |
| X₅₂₅₈ | M5 | 262 | 638804 | G | C | [symbol] | CDZ98544 |
| X₅₂₅₉ | M5 | 262 | 639869 | G | C | [symbol] | CDZ98544 |
| X₅₂₆₀ | M5 | 262 | 639962 | A | G | [symbol] | CDZ98544 |
| X₅₂₆₁ | M5 | 262 | 653920 | A | G | [symbol] | CDZ98545 |
| X₅₂₆₂ | M5 | 262 | 655754 | A | T | [symbol] | CDZ98545 |
| X₅₂₆₃ | M5 | 262 | 655757 | T | C | [symbol] | CDZ98545 |
| X₅₂₆₄ | M5 | 262 | 656323 | C | G | [symbol] | CDZ98545 |
| X₅₂₆₅ | M5 | 262 | 668764 | C | T | [symbol] | CDZ98545 |
| X₅₂₆₆ | M5 | 262 | 673556 | G | A | [symbol] | CDZ98548 |
| X₅₂₆₇ | M5 | 262 | 691577 | C | T | [symbol] | CDZ98551 |
| X₅₂₆₈ | M5 | 262 | 733603 | C | T | [symbol] | CDZ98566 |
| X₅₂₆₉ | M5 | 262 | 751209 | C | T | [symbol] | CDZ98572 |
| X₅₂₇₀ | M5 | 262 | 801565 | G | A | [symbol] | CDZ98589 |
| X₅₂₇₁ | M5 | 262 | 822734 | G | A | [symbol] | CDZ98597 |
| X₅₂₇₂ | M5 | 262 | 825723 | A | G | [symbol] | CDZ98598 |
| X₅₂₇₃ | M5 | 262 | 831789 | C | T | [symbol] | CDZ98601 |
| X₅₂₇₄ | M5 | 262 | 835874 | C | T | [symbol] | CDZ98601 |
| X₅₂₇₅ | M5 | 262 | 865999 | G | A | [symbol] | CDZ98613 |
| X₅₂₇₆ | M5 | 262 | 923390 | C | T | [symbol] | CDZ98633 |
| X₅₂₇₇ | M5 | 262 | 971713 | G | A | [symbol] | CDZ98649 |
| X₅₂₇₈ | M5 | 262 | 976074 | C | T | [symbol] | CDZ98650 |
| X₅₂₇₉ | M5 | 262 | 978252 | T | C | [symbol] | CDZ98651 |
| X₅₂₈₀ | M5 | 262 | 1044256 | G | A | [symbol] | CDZ98669 |
| X₅₂₈₁ | M5 | 262 | 1209662 | G | A | [symbol] | CDZ98723 |
| X₅₂₈₂ | M5 | 262 | 1226072 | C | T | [symbol] | CDZ98730 |
| X₅₂₈₃ | M5 | 262 | 1277604 | G | A | [symbol] | CDZ98747 |
| X₅₂₈₄ | M5 | 262 | 1305361 | G | A | [symbol] | CDZ98753 |
| X₅₂₈₅ | M5 | 262 | 1329643 | C | T | [symbol] | CDZ98760 |
| X₅₂₈₆ | M5 | 262 | 1351116 | A | G | [symbol] | CDZ98766 |
| X₅₂₈₇ | M5 | 262 | 1415479 | C | T | [symbol] | CDZ98789 |
| X₅₂₈₈ | M5 | 262 | 1424293 | G | A | [symbol] | CDZ98791 |
| X₅₂₈₉ | M5 | 262 | 1455677 | G | A | [symbol] | CDZ98804 |
| X₅₂₉₀ | M5 | 262 | 1458863 | C | T | [symbol] | CDZ98807 |
| X₅₂₉₁ | M5 | 262 | 1549845 | C | T | [symbol] | CDZ98837 |
| X₅₂₉₂ | M5 | 262 | 1550311 | C | T | [symbol] | CDZ98836 |
| X₅₂₉₃ | M5 | 262 | 1550456 | C | T | [symbol] | CDZ98837 |
| X₅₂₉₄ | M5 | 262 | 1558074 | G | A | [symbol] | CDZ98840 |
| X₅₂₉₅ | M5 | 262 | 1592640 | C | T | [symbol] | CDZ98849 |
| X₅₂₉₆ | M5 | 262 | 1615762 | G | A | [symbol] | CDZ98855 |
| X₅₂₉₇ | M5 | 262 | 1677620 | G | A | [symbol] | CDZ98873 |
| X₅₂₉₈ | M5 | 262 | 1694625 | C | T | [symbol] | CDZ98878 |
| X₅₂₉₉ | M5 | 262 | 1695377 | C | T | [symbol] | CDZ98878 |
| X₅₃₀₀ | M5 | 262 | 1706076 | G | A | [symbol] | CDZ98885 |
| X₅₃₀₁ | M5 | 262 | 1709988 | G | A | [symbol] | CDZ98884 |
| X₅₃₀₂ | M5 | 262 | 1712334 | G | A | [symbol] | CDZ98886 |
| X₅₃₀₃ | M5 | 262 | 1716385 | G | A | [symbol] | CDZ98887 |
| X₅₃₀₄ | M5 | 266 | 252 | C | T | [symbol] | |
| X₅₃₀₅ | M5 | 267 | 93 | G | A | [symbol] | |
| X₅₃₀₆ | M5 | 267 | 94 | A | G | [symbol] | |
| X₅₃₀₇ | M5 | 267 | 133 | T | C | [symbol] | |
| X₅₃₀₈ | M5 | 267 | 134 | C | T | [symbol] | |
| X₅₃₀₉ | M6 | 22 | 1643 | C | T | [symbol] | CED80056 |
| X₅₃₁₀ | M6 | 22 | 2524 | G | A | [symbol] | CED80056 |
| X₅₃₁₁ | M6 | 28 | 236 | G | A | [symbol] | CDZ96150 |
| X₅₃₁₂ | M6 | 28 | 377 | G | A | [symbol] | CDZ96150 |
| X₅₃₁₃ | M6 | 28 | 1506 | C | T | [symbol] | CDZ96150 |
| X₅₃₁₄ | M6 | 28 | 1677 | C | T | [symbol] | CDZ96150 |
| X₅₃₁₅ | M6 | 43 | 464 | G | A | [symbol] | CDZ96151 |
| X₅₃₁₆ | M6 | 43 | 753 | C | T | [symbol] | CDZ96151 |
| X₅₃₁₇ | M6 | 4 | 757 | G | A | [symbol] | CDZ96151 |
| X₅₃₁₈ | M6 | 43 | 1527 | C | T | [symbol] | CDZ96151 |
| X₅₃₁₉ | M6 | 43 | 1748 | G | A | [symbol] | CDZ96151 |
| X₅₃₂₀ | M6 | 43 | 1928 | C | T | [symbol] | CDZ96151 |
| X₅₃₂₁ | M6 | 62 | 26 | T | A | [symbol] | CDZ96152 |
| X₅₃₂₂ | M6 | 62 | 27 | T | C | [symbol] | CDZ96152 |
| X₅₃₂₃ | M6 | 62 | 55 | T | A | [symbol] | CDZ96152 |
| X₅₃₂₄ | M6 | 62 | 403 | C | T | [symbol] | CDZ96152 |
| X₅₃₂₅ | M6 | 62 | 875 | G | A | [symbol] | CDZ96152 |
| X₅₃₂₆ | M6 | 102 | 339 | C | T | [symbol] | CDZ96153 |
| X₅₃₂₇ | M6 | 102 | 951 | G | A | [symbol] | CDZ96153 |
| X₅₃₂₈ | M6 | 102 | 1042 | G | A | [symbol] | CDZ96153 |
| X₅₃₂₉ | M6 | 102 | 2334 | G | A | [symbol] | CDZ96153 |
| X₅₃₃₀ | M6 | 102 | 2590 | C | T | [symbol] | CDZ96153 |
| X₅₃₃₁ | M6 | 102 | 3427 | C | T | [symbol] | CDZ96153 |
| X₅₃₃₂ | M6 | 176 | 358 | G | A | [symbol] | CED80058 |
| X₅₃₃₃ | M6 | 176 | 1872 | G | A | [symbol] | CED80058 |
| X₅₃₃₄ | M6 | 176 | 1980 | G | A | [symbol] | CED80058 |
| X₅₃₃₅ | M6 | 176 | 2335 | A | G | [symbol] | CED80058 |
| X₅₃₃₆ | M6 | 176 | 2349 | G | A | [symbol] | CED80058 |
| X₅₃₃₇ | M6 | 179 | 9 | A | G | [symbol] | CDZ96154 |
| X₅₃₃₈ | M6 | 179 | 96 | G | A | [symbol] | CDZ96154 |
| X₅₃₃₉ | M6 | 179 | 1525 | G | A | [symbol] | CDZ96154 |
| X₅₃₄₀ | M6 | 179 | 1780 | C | T | [symbol] | CDZ96154 |
| X₅₃₄₁ | M6 | 188 | 815 | C | T | [symbol] | CED80060 |
| X₅₃₄₂ | M6 | 188 | 1174 | C | T | [symbol] | CED80060 |
| X₅₃₄₃ | M6 | 188 | 2163 | G | A | [symbol] | CED80060 |
| X₅₃₄₄ | M6 | 188 | 2170 | G | A | [symbol] | CED80060 |
| X₅₃₄₅ | M6 | 247 | 102 | G | A | [symbol] | CED80061 |
| X₅₃₄₆ | M6 | 247 | 989 | C | T | [symbol] | CED80061 |
| X₅₃₄₇ | M6 | 247 | 1053 | G | a | [symbol] | CED80061 |
| X₅₃₄₈ | M6 | 7 | 160 | T | C | [symbol] | |
| X₅₃₄₉ | M6 | 8 | 1110 | C | T | [symbol] | |
| X₅₃₅₀ | M6 | 11 | 154 | A | C | [symbol] | |
| X₅₃₅₁ | M6 | 11 | 158 | C | T | [symbol] | |
| X₅₃₅₂ | M6 | 15 | 28 | C | G | [symbol] | |
| X₅₃₅₃ | M6 | 24 | 5850 | C | T | [symbol] | CDZ96160 |
| X₅₃₅₄ | M6 | 24 | 68660 | C | T | [symbol] | CDZ96181 |
| X₅₃₅₅ | M6 | 24 | 118860 | C | T | [symbol] | CDZ96200 |
| X₅₃₅₆ | M6 | 24 | 180340 | G | A | [symbol] | CDZ96216 |
| X₅₃₅₇ | M6 | 24 | 266697 | G | A | [symbol] | CDZ96242 |
| X₅₃₅₈ | M6 | 24 | 307114 | G | A | [symbol] | CDZ96255 |
| X₅₃₅₉ | M6 | 24 | 320852 | A | T | [symbol] | CDZ96259 |
| X₅₃₆₀ | M6 | 24 | 335171 | C | T | [symbol] | CDZ96265 |
| X₅₃₆₁ | M6 | 24 | 340663 | T | C | [symbol] | CDZ96265 |
| X₅₃₆₂ | M6 | 24 | 349340 | C | T | [symbol] | CDZ96270 |
| X₅₃₆₃ | M6 | 24 | 363770 | C | T | [symbol] | CDZ96275 |
| X₅₃₆₄ | M6 | 24 | 420108 | G | A | [symbol] | CDZ96291 |
| X₅₃₆₅ | M6 | 24 | 470687 | G | A | [symbol] | CDZ96308 |
| X₅₃₆₆ | M6 | 24 | 474698 | G | A | [symbol] | CDZ96308 |
| X₅₃₆₇ | M6 | 26 | 245 | G | A | [symbol] | |
| X₅₃₆₈ | M6 | 27 | 445 | C | T | [symbol] | |
| X₅₃₆₉ | M6 | 27 | 1012 | A | C | [symbol] | |
| X₅₃₇₀ | M6 | 27 | 1013 | T | A | [symbol] | |
| X₅₃₇₁ | M6 | 32 | 158 | C | T | [symbol] | CDZ96332 |
| X₅₃₇₂ | M6 | 32 | 215 | C | T | [symbol] | CDZ96332 |
| X₅₃₇₃ | M6 | 32 | 2438 | C | T | [symbol] | CDZ96332 |
| X₅₃₇₄ | M6 | 32 | 2734 | C | T | [symbol] | CDZ96332 |
| X₅₃₇₅ | M6 | 32 | 2821 | C | T | [symbol] | CDZ96332 |
| X₅₃₇₆ | M6 | 32 | 3067 | C | T | [symbol] | CDZ96332 |
| X₅₃₇₇ | M6 | 32 | 3506 | C | T | [symbol] | CDZ96332 |
| X₅₃₇₈ | M6 | 32 | 3562 | G | A | [symbol] | CDZ96332 |
| X₅₃₇₉ | M6 | 33 | 399 | T | A | [symbol] | CED82002 |
| X₅₃₈₀ | M6 | 33 | 45488 | C | T | [symbol] | CED82012 |
| X₅₃₈₁ | M6 | 33 | 79913 | G | A | [symbol] | CED82024 |
| X₅₃₈₂ | M6 | 33 | 105276 | G | A | [symbol] | CED82036 |
| X₅₃₈₃ | M6 | 33 | 109397 | G | A | [symbol] | CED82038 |
| X₅₃₈₄ | M6 | 33 | 192563 | C | T | [symbol] | CED82066 |
| X₅₃₈₅ | M6 | 33 | 198050 | C | T | [symbol] | CED82067 |
| X₅₃₈₆ | M6 | 33 | 205554 | C | T | [symbol] | CED82069 |
| X₅₃₈₇ | M6 | 33 | 215436 | C | T | [symbol] | CED82071 |
| X₅₃₈₈ | M6 | 33 | 223703 | G | A | [symbol] | CED82075 |
| X₅₃₈₉ | M6 | 33 | 226363 | G | A | [symbol] | CED82075 |
| X₅₃₉₀ | M6 | 33 | 257786 | C | T | [symbol] | CED82084 |
| X₅₃₉₁ | M6 | 33 | 260027 | G | A | [symbol] | CED82084 |
| X₅₃₉₂ | M6 | 33 | 274627 | G | A | [symbol] | CED82091 |
| X₅₃₉₃ | M6 | 33 | 283808 | C | T | [symbol] | CED82093 |
| X₅₃₉₄ | M6 | 33 | 304408 | C | T | [symbol] | CED82099 |
| X₅₃₉₅ | M6 | 33 | 311532 | G | A | [symbol] | CED82101 |
| X₅₃₉₆ | M6 | 33 | 312032 | G | A | [symbol] | CED82101 |
| X₅₃₉₇ | M6 | 33 | 318242 | G | A | [symbol] | CED82105 |
| X₅₃₉₈ | M6 | 33 | 326016 | T | C | [symbol] | CED82108 |
| X₅₃₉₉ | M6 | 33 | 327840 | C | T | [symbol] | CED82108 |
| X₅₄₀₀ | M6 | 33 | 341890 | G | A | [symbol] | CED82113 |
| X₅₄₀₁ | M6 | 33 | 374131 | A | G | [symbol] | CED82121- |
| | | | | | | | CED82122 |
| X₅₄₀₂ | M6 | 33 | 374134 | A | G | [symbol] | CED82121- |
| | | | | | | | CED82122 |
| X₅₄₀₃ | M6 | 33 | 374137 | A | T | [symbol] | CED82121- |
| | | | | | | | CED82122 |
| X₅₄₀₄ | M6 | 33 | 374150 | A | C | [symbol] | CED82121- |
| | | | | | | | CED82122 |
| X₅₄₀₅ | M6 | 33 | 382577 | C | T | [symbol] | CED82122 |
| X₅₄₀₆ | M6 | 33 | 385155 | T | C | [symbol] | CED82122 |
| X₅₄₀₇ | M6 | 33 | 385319 | A | C | [symbol] | CED82122 |
| X₅₄₀₈ | M6 | 33 | 385527 | C | T | [symbol] | CED82122 |
| X₅₄₀₉ | M6 | 33 | 397625 | C | T | [symbol] | CED82125 |
| X₅₄₁₀ | M6 | 33 | 448815 | G | A | [symbol] | CED82144 |
| X₅₄₁₁ | M6 | 33 | 455451 | C | T | [symbol] | CED82146 |
| X₅₄₁₂ | M6 | 33 | 509127 | C | T | [symbol] | CED82166 |
| X₅₄₁₃ | M6 | 33 | 556726 | C | T | [symbol] | CED82183 |
| X₅₄₁₄ | M6 | 33 | 639242 | G | A | [symbol] | CED82208 |
| X₅₄₁₅ | M6 | 33 | 652012 | G | A | [symbol] | CED82212 |
| X₅₄₁₆ | M6 | 33 | 699423 | C | T | [symbol] | CED82227 |
| X₅₄₁₇ | M6 | 33 | 729705 | C | T | [symbol] | CED82234 |
| X₅₄₁₈ | M6 | 33 | 774105 | G | A | [symbol] | CED82248 |
| X₅₄₁₉ | M6 | 33 | 792965 | G | A | [symbol] | CED82256 |
| X₅₄₂₀ | M6 | 33 | 816048 | C | T | [symbol] | CED82262 |
| X₅₄₂₁ | M6 | 33 | 917771 | A | T | [symbol] | CED82294 |
| X₅₄₂₂ | M6 | 33 | 928554 | A | T | [symbol] | CED82297 |
| X₅₄₂₃ | M6 | 33 | 936350 | T | A | [symbol] | CED82300 |
| X₅₄₂₄ | M6 | 33 | 936356 | G | A | [symbol] | CED82300 |
| X₅₄₂₅ | M6 | 33 | 936571 | A | G | [symbol] | CED82300 |
| X₅₄₂₆ | M6 | 33 | 936600 | G | A | [symbol] | CED82300 |
| X₅₄₂₇ | M6 | 33 | 938992 | C | T | [symbol] | CED82300 |
| X₅₄₂₈ | M6 | 33 | 983105 | G | A | [symbol] | CED82315 |
| X₅₄₂₉ | M6 | 33 | 1043825 | C | T | [symbol] | CED82333 |
| X₅₄₃₀ | M6 | 33 | 1049699 | G | A | [symbol] | CED82334 |
| X₅₄₃₁ | M6 | 33 | 1126411 | A | G | [symbol] | CED82358 |
| X₅₄₃₂ | M6 | 33 | 1127676 | G | A | [symbol] | CED82358 |
| X₅₄₃₃ | M6 | 33 | 1138444 | C | T | [symbol] | CED82363 |
| X₅₄₃₄ | M6 | 33 | 1165914 | G | A | [symbol] | CED82372 |
| X₅₄₃₅ | M6 | 33 | 1169999 | G | A | [symbol] | CED82372 |
| X₅₄₃₆ | M6 | 33 | 1191727 | C | T | [symbol] | CED82379 |
| X₅₄₃₇ | M6 | 33 | 1205966 | G | A | [symbol] | CED82382 |
| X₅₄₃₈ | M6 | 33 | 1246468 | C | T | [symbol] | CED82392 |
| X₅₄₃₉ | M6 | 33 | 1277762 | G | A | [symbol] | CED82402 |
| X₅₄₄₀ | M6 | 33 | 1311181 | G | A | [symbol] | CED82413 |
| X₅₄₄₁ | M6 | 33 | 1324395 | G | A | [symbol] | CED82417 |
| X₅₄₄₂ | M6 | 33 | 1333932 | G | A | [symbol] | CED82421 |
| X₅₄₄₃ | M6 | 33 | 1339376 | C | T | [symbol] | CED82424 |
| X₅₄₄₄ | M6 | 33 | 1396438 | C | T | [symbol] | CED82442 |
| X₅₄₄₅ | M6 | 33 | 1399499 | C | T | [symbol] | CED82444 |
| X₅₄₄₆ | M6 | 33 | 1406738 | G | A | [symbol] | CED82444 |
| X₅₄₄₇ | M6 | 33 | 1431034 | G | A | [symbol] | CED82451 |
| X₅₄₄₈ | M6 | 33 | 1470375 | C | T | [symbol] | CED82465 |
| X₅₄₄₉ | M6 | 33 | 1499347 | G | A | [symbol] | CED82472 |
| X₅₄₅₀ | M6 | 33 | 1502644 | G | A | [symbol] | CED82474 |
| X₅₄₅₁ | M6 | 33 | 1544767 | A | C | [symbol] | CED82485- |
| | | | | | | | CED82486 |
| X₅₄₅₂ | M6 | 33 | 1587443 | C | T | [symbol] | CED82497 |
| X₅₄₅₃ | M6 | 33 | 1596242 | C | T | [symbol] | CED82498 |
| X₅₄₅₄ | M6 | 33 | 1638726 | G | A | [symbol] | CED82513 |
| X₅₄₅₅ | M6 | 33 | 1642659 | G | A | [symbol] | CED82515 |
| X₅₄₅₆ | M6 | 33 | 1666106 | C | T | [symbol] | CED82522 |
| X₅₄₅₇ | M6 | 33 | 1682149 | C | T | [symbol] | CED82526 |
| X₅₄₅₈ | M6 | 33 | 1700000 | G | A | [symbol] | CED82534 |
| X₅₄₅₉ | M6 | 33 | 1739035 | G | A | [symbol] | CED82544 |
| X₅₄₆₀ | M6 | 33 | 1767636 | C | T | [symbol] | CED82552 |
| X₅₄₆₁ | M6 | 33 | 1778220 | C | A | [symbol] | CED82556 |
| X₅₄₆₂ | M6 | 33 | 1780044 | G | A | [symbol] | CED82555 |
| X₅₄₆₃ | M6 | 33 | 1823362 | C | T | [symbol] | CED82571 |
| X₅₄₆₄ | M6 | 33 | 1862200 | G | A | [symbol] | CED82582 |
| X₅₄₆₅ | M6 | 33 | 1887401 | C | T | [symbol] | CED82591 |
| X₅₄₆₆ | M6 | 33 | 1888706 | C | T | [symbol] | CED82592 |
| X₅₄₆₇ | M6 | 33 | 1889585 | G | A | [symbol] | CED82592 |
| X₆₄₆₈ | M6 | 33 | 1964763 | G | A | [symbol] | CED82621 |
| X₅₄₆₉ | M6 | 33 | 1975079 | G | A | [symbol] | CED82625 |
| X₅₄₇₀ | M6 | 33 | 2010230 | C | T | [symbol] | CED82636 |
| X₅₄₇₁ | M6 | 33 | 2054662 | G | A | [symbol] | CED82654 |
| X₅₄₇₂ | M6 | 36 | 320 | G | A | [symbol] | |
| X₅₄₇₃ | M6 | 36 | 1056 | G | A | [symbol] | |
| X₅₄₇₄ | M6 | 36 | 1295 | C | T | [symbol] | |
| X₅₄₇₅ | M6 | 36 | 1461 | A | T | [symbol] | |
| X₅₄₇₆ | M6 | 42 | 804 | C | T | [symbol] | CDZ96333 |
| X₅₄₇₇ | M6 | 42 | 1559 | G | A | [symbol] | CDZ96333 |
| X₅₄₇₈ | M6 | 48 | 563 | C | T | [symbol] | |
| X₅₄₇₉ | M6 | 48 | 565 | T | C | [symbol] | |
| X₅₄₈₀ | M6 | 48 | 576 | G | A | [symbol] | |
| X₅₄₈₁ | M6 | 48 | 580 | T | A | [symbol] | |
| X₅₄₈₂ | M6 | 50 | 145 | G | A | [symbol] | |
| X₅₄₈₃ | M6 | 52 | 17234 | A | T | [symbol] | CED82668 |
| X₅₄₈₄ | M6 | 52 | 128353 | G | A | [symbol] | CED82702 |
| X₅₄₈₅ | M6 | 52 | 144382 | C | T | [symbol] | CED82709 |
| X₅₄₈₆ | M6 | 52 | 145060 | G | A | [symbol] | CED82708 |
| X₅₄₈₇ | M6 | 52 | 150382 | C | T | [symbol] | CED82712 |
| X₅₄₈₈ | M6 | 52 | 151974 | C | T | [symbol] | CED82712 |
| X₅₄₈₉ | M6 | 52 | 183986 | C | T | [symbol] | CED82722 |
| X₅₄₉₀ | M6 | 52 | 203253 | A | G | [symbol] | CED82730 |
| X₅₄₉₁ | M6 | 52 | 207354 | C | T | [symbol] | CED82730 |
| X₅₄₉₂ | M6 | 52 | 244305 | G | A | [symbol] | CED82734 |
| X₅₄₉₃ | M6 | 52 | 284733 | G | A | [symbol] | CED82747 |
| X₅₄₉₄ | M6 | 52 | 316848 | C | T | [symbol] | CED82758 |
| X₅₄₉₅ | M6 | 52 | 321045 | C | T | [symbol] | CED82760 |
| X₅₄₉₆ | M6 | 52 | 346628 | G | A | [symbol] | CED82769 |
| X₅₄₉₇ | M6 | 52 | 390095 | G | A | [symbol] | CED82784 |
| X₅₄₉₈ | M6 | 52 | 390988 | C | T | [symbol] | CED82785 |
| X₅₄₉₉ | M6 | 52 | 395374 | G | A | [symbol] | CED82786 |
| X₅₅₀₀ | M6 | 52 | 398723 | C | T | [symbol] | CED82786 |
| X₅₅₀₁ | M6 | 52 | 398728 | C | T | [symbol] | CED82786 |
| X₅₅₀₂ | M6 | 52 | 516267 | C | T | [symbol] | CED82823 |
| X₅₅₀₃ | M6 | 52 | 548788 | G | A | [symbol] | CED82835 |
| X₅₅₀₄ | M6 | 52 | 552099 | G | A | [symbol] | CED82837 |
| X₅₅₀₅ | M6 | 52 | 552173 | G | A | [symbol] | CED82837 |
| X₅₅₀₆ | M6 | 52 | 595806 | C | T | [symbol] | CED82851 |
| X₅₅₀₇ | M6 | 52 | 631479 | C | T | [symbol] | CED82860 |
| X₅₅₀₈ | M6 | 52 | 692048 | C | T | [symbol] | CED82884 |
| X₅₅₀₉ | M6 | 52 | 737403 | G | A | [symbol] | CED82903 |
| X₅₅₁₀ | M6 | 52 | 737419 | G | A | [symbol] | CED82903 |
| X₅₅₁₁ | M6 | 52 | 817452 | T | A | [symbol] | CED82928 |
| X₅₅₁₂ | M6 | 52 | 819924 | C | T | [symbol] | CED82929 |
| X₅₅₁₃ | M6 | 52 | 840755 | C | T | [symbol] | CED82935 |
| X₅₅₁₄ | M6 | 52 | 849671 | G | A | [symbol] | CED82940 |
| X₅₅₁₅ | M6 | 52 | 861376 | C | T | [symbol] | CED82946 |
| X₅₅₁₆ | M6 | 52 | 938650 | G | A | [symbol] | CED82973 |
| X₅₅₁₇ | M6 | 52 | 967316 | A | T | [symbol] | CED82984 |
| X₅₅₁₈ | M6 | 52 | 967701 | T | A | [symbol] | CED82983 |
| X₅₅₁₉ | M6 | 52 | 977048 | G | A | [symbol] | CED82990 |
| X₅₅₂₀ | M6 | 52 | 1003899 | G | A | [symbol] | CED83001 |
| X₅₅₂₁ | M6 | 52 | 1010006 | C | T | [symbol] | CED83002 |
| X₅₅₂₂ | M6 | 52 | 1020804 | G | A | [symbol] | CED83005 |
| X₅₅₂₃ | M6 | 52 | 1021202 | C | T | [symbol] | CED83005 |
| X₅₅₂₄ | M6 | 52 | 1029498 | G | A | [symbol] | CED83007 |
| X₅₅₂₅ | M6 | 52 | 1043011 | C | T | [symbol] | CED83012 |
| X₅₅₂₆ | M6 | 52 | 1067895 | C | T | [symbol] | CED83020 |
| X₅₅₂₇ | M6 | 52 | 1158103 | C | T | [symbol] | CED83051 |
| X₅₅₂₈ | M6 | 52 | 1219894 | C | T | [symbol] | CED83071 |
| X₅₅₂₉ | M6 | 52 | 1363357 | G | A | [symbol] | CED83122 |
| X₅₅₃₀ | M6 | 52 | 1363405 | C | T | [symbol] | CED83123 |
| X₅₅₃₁ | M6 | 52 | 1379155 | G | A | [symbol] | CED83128 |
| X₅₅₃₂ | M6 | 52 | 1389320 | G | A | [symbol] | CED83130 |
| X₅₅₃₃ | M6 | 52 | 1392238 | C | T | [symbol] | CED83130 |
| X₅₅₃₄ | M6 | 52 | 1399439 | G | A | [symbol] | CED83134 |
| X₅₅₃₅ | M6 | 52 | 1481345 | G | A | [symbol] | CED83165 |
| X₅₅₃₆ | M6 | 52 | 1526796 | G | A | [symbol] | CED83181 |
| X₅₅₃₇ | M6 | 52 | 1583655 | C | T | [symbol] | CED83206 |
| X₅₅₃₈ | M6 | 52 | 1590982 | C | T | [symbol] | CED83207 |
| X₅₅₃₉ | M6 | 52 | 1665003 | A | G | [symbol] | CED83235 |
| X₅₅₄₀ | M6 | 52 | 1708900 | A | G | [symbol] | CED83249 |
| X₅₅₄₁ | M6 | 52 | 1715136 | C | T | [symbol] | CED83250 |
| X₅₅₄₂ | M6 | 52 | 1716210 | C | T | [symbol] | CED83250 |
| X₅₅₄₃ | M6 | 52 | 1760440 | G | A | [symbol] | CED83266 |
| X₅₅₄₄ | M6 | 52 | 1793370 | G | A | [symbol] | CED83275 |
| X₅₅₄₅ | M6 | 52 | 1796780 | G | A | [symbol] | CED83279 |
| X₅₅₄₆ | M6 | 52 | 1807309 | G | A | [symbol] | CED83283 |
| X₅₅₄₇ | M6 | 52 | 1861665 | C | T | [symbol] | CED83301 |
| X₅₅₄₈ | M6 | 52 | 1861681 | G | A | [symbol] | CED83301 |
| X₅₅₄₉ | M6 | 52 | 1871310 | C | T | [symbol] | CED83304 |
| X₅₅₅₀ | M6 | 52 | 1874150 | G | T | [symbol] | CED83305 |
| X₅₅₅₁ | M6 | 52 | 1893352 | G | A | [symbol] | CED83313 |
| X₅₅₅₂ | M6 | 52 | 1963875 | G | A | [symbol] | CED83335 |
| X₅₅₅₃ | M6 | 52 | 1987096 | G | A | [symbol] | CED83341 |
| X₅₅₅₄ | M6 | 52 | 2041781 | C | T | [symbol] | CED83355 |
| X₅₅₅₅ | M6 | 52 | 2047954 | G | A | [symbol] | CED83358 |
| X₅₅₅₆ | M6 | 52 | 2048018 | G | A | [symbol] | CED83358 |
| X₅₅₅₇ | M6 | 52 | 2050245 | G | A | [symbol] | CED83359 |
| X₅₅₅₈ | M6 | 52 | 2081390 | G | A | [symbol] | CED83367 |
| X₅₅₅₉ | M6 | 52 | 2120665 | C | T | [symbol] | CED83376 |
| X₅₅₆₀ | M6 | 52 | 2136885 | A | G | [symbol] | CED83382 |
| X₅₅₆₁ | M6 | 52 | 2162878 | G | A | [symbol] | CED83392 |
| X₅₅₆₂ | M6 | 52 | 2222126 | C | T | [symbol] | CED83410 |
| X₅₅₆₃ | M6 | 52 | 2264881 | G | A | [symbol] | CED83424 |
| X₅₅₆₄ | M6 | 52 | 2265219 | C | T | [symbol] | CED83425 |
| X₅₅₆₅ | M6 | 52 | 2266378 | C | T | [symbol] | CED83423 |
| X₅₅₆₆ | M6 | 52 | 2296638 | G | A | [symbol] | CED83432 |
| X₅₅₆₇ | M6 | 52 | 2327266 | C | T | [symbol] | CED83445 |
| X₅₅₆₈ | M6 | 52 | 2330881 | G | A | [symbol] | CED83447 |
| X₅₅₆₉ | M6 | 52 | 2355303 | G | A | [symbol] | CED83453 |
| X₅₅₇₀ | M6 | 52 | 2373120 | C | T | [symbol] | CED83456 |
| X₅₅₇₁ | M6 | 52 | 2400778 | C | T | [symbol] | CED83463 |
| X₅₅₇₂ | M6 | 52 | 2415283 | C | T | [symbol] | CED83469 |
| X₅₅₇₃ | M6 | 52 | 2443575 | G | A | [symbol] | CED83476 |
| X₅₅₇₄ | M6 | 52 | 2575090 | A | G | [symbol] | CED83525 |
| X₅₅₇₅ | M6 | 53 | 26291 | G | A | [symbol] | CDZ96348 |
| X₅₅₇₆ | M6 | 53 | 55702 | C | T | [symbol] | CDZ96359 |
| X₅₅₇₇ | M6 | 54 | 4815 | G | A | [symbol] | CDZ96384 |
| X₅₅₇₈ | M6 | 54 | 4816 | A | T | [symbol] | CDZ96384 |
| X₅₅₇₉ | M6 | 54 | 4817 | G | C | [symbol] | CDZ96384 |
| X₅₅₈₀ | M6 | 54 | 4821 | G | A | [symbol] | CDZ96384 |
| X₅₅₈₁ | M6 | 54 | 60769 | G | A | [symbol] | CDZ96403 |
| X₅₅₈₂ | M6 | 54 | 87947 | G | A | [symbol] | CDZ96410 |
| X₅₅₈₃ | M6 | 54 | 106086 | G | T | [symbol] | CDZ96416 |
| X₅₅₈₄ | M6 | 54 | 114442 | G | A | [symbol] | CDZ96419 |
| X₅₅₈₅ | M6 | 54 | 119439 | C | T | [symbol] | CDZ96420 |
| X₅₅₈₆ | M6 | 54 | 194230 | G | A | [symbol] | CDZ96446 |
| X₅₅₈₇ | M6 | 54 | 195804 | G | A | [symbol] | CDZ96447 |
| X₅₅₈₈ | M6 | 54 | 202467 | C | T | [symbol] | CDZ96448 |
| X₅₅₈₉ | M6 | 54 | 206494 | G | A | [symbol] | CDZ96450 |
| X₅₅₉₀ | M6 | 54 | 207267 | G | A | [symbol] | CDZ96450 |
| X₅₅₉₁ | M6 | 54 | 233698 | G | A | [symbol] | CDZ96457 |
| X₅₅₉₂ | M6 | 54 | 240326 | G | A | [symbol] | CDZ96462 |
| X₅₅₉₃ | M6 | 54 | 258379 | G | A | [symbol] | CDZ96465 |
| X₅₅₉₄ | M6 | 54 | 274617 | A | T | [symbol] | CDZ96471 |
| X₅₅₉₅ | M6 | 54 | 316790 | T | G | [symbol] | CDZ96487 |
| X₅₅₉₆ | M6 | 54 | 357149 | G | A | [symbol] | CDZ96496 |
| X₅₅₉₇ | M6 | 54 | 370320 | G | A | [symbol] | CDZ96499 |
| X₅₅₉₈ | M6 | 54 | 391223 | A | G | [symbol] | CDZ96509 |
| X₅₅₉₉ | M6 | 54 | 402099 | G | A | [symbol] | CDZ96511 |
| X₅₆₀₀ | M6 | 54 | 427542 | C | T | [symbol] | CDZ96520 |
| X₅₆₀₁ | M6 | 54 | 478527 | C | T | [symbol] | CDZ96537 |
| X₅₆₀₂ | M6 | 54 | 564688 | C | T | [symbol] | CDZ96566 |
| X₅₆₀₃ | M6 | 54 | 733193 | T | C | [symbol] | CDZ96619 |
| X₅₆₀₄ | M6 | 54 | 743396 | G | A | [symbol] | CDZ96621 |
| X₅₆₀₅ | M6 | 58 | 93 | T | C | [symbol] | |
| X₅₆₀₆ | M6 | 64 | 2756 | A | C | [symbol] | CDZ96626 |
| X₅₆₀₇ | M6 | 64 | 2767 | G | A | [symbol] | CDZ96626 |
| X₅₆₀₈ | M6 | 64 | 2770 | C | T | [symbol] | CDZ96626 |
| X₅₆₀₉ | M6 | 64 | 2783 | C | T | [symbol] | CDZ96626 |
| X₅₆₁₀ | M6 | 64 | 5037 | G | A | [symbol] | CDZ96626 |
| X₅₆₁₁ | M6 | 67 | 111 | G | A | [symbol] | |
| X₅₆₁₂ | M6 | 67 | 176 | C | T | [symbol] | |
| X₅₆₁₃ | M6 | 69 | 29006 | G | A | [symbol] | CED83534 |
| X₅₆₁₄ | M6 | 69 | 70304 | C | T | [symbol] | CED83551 |
| X₅₆₁₅ | M6 | 69 | 84820 | G | A | [symbol] | CED83555 |
| X₅₆₁₆ | M6 | 69 | 89393 | G | A | [symbol] | CED83556 |
| X₅₆₁₇ | M6 | 69 | 97985 | G | A | [symbol] | CED83559 |
| X₅₆₁₈ | M6 | 69 | 107920 | C | T | [symbol] | CED83561 |
| X₅₆₁₉ | M6 | 69 | 123084 | C | T | [symbol] | CED83563 |
| X₅₆₂₀ | M6 | 69 | 201005 | G | A | [symbol] | CED83595 |
| X₅₆₂₁ | M6 | 69 | 205541 | G | A | [symbol] | CED83597 |
| X₅₆₂₂ | M6 | 69 | 258091 | G | A | [symbol] | CED83614 |
| X₅₆₂₃ | M6 | 69 | 293602 | G | A | [symbol] | CED83626 |
| X₅₆₂₄ | M6 | 69 | 384418 | G | A | [symbol] | CED83656 |
| X₅₆₂₅ | M6 | 69 | 415659 | C | T | [symbol] | CED83665 |
| X₅₆₂₆ | M6 | 69 | 431248 | G | A | [symbol] | CED83671 |
| X₅₆₂₇ | M6 | 69 | 461986 | G | A | [symbol] | CED83680 |
| X₅₆₂₈ | M6 | 69 | 473113 | G | A | [symbol] | CED83684 |
| X₅₆₂₉ | M6 | 69 | 482073 | G | T | [symbol] | CED83685 |
| X₅₆₃₀ | M6 | 69 | 483131 | G | A | [symbol] | CED83687 |
| X₅₆₃₁ | M6 | 69 | 555744 | G | A | [symbol] | CED83711 |
| X₅₆₃₂ | M6 | 69 | 556138 | C | T | [symbol] | CED83710 |
| X₅₆₃₃ | M6 | 69 | 585845 | G | A | [symbol] | CED83722 |
| X₅₆₃₄ | M6 | 69 | 614468 | T | C | [symbol] | CED83733 |
| X₅₆₃₅ | M6 | 69 | 631511 | G | A | [symbol] | CED83742 |
| X₅₆₃₆ | M6 | 69 | 637299 | T | C | [symbol] | CED83744 |
| X₅₆₃₇ | M6 | 69 | 675579 | G | A | [symbol] | CED83760 |
| X₅₆₃₈ | M6 | 69 | 676581 | G | A | [symbol] | CED83760 |
| X₅₆₃₉ | M6 | 69 | 676853 | G | A | [symbol] | CED83759 |
| X₅₆₄₀ | M6 | 69 | 678406 | C | T | [symbol] | CED83759 |
| X₅₆₄₁ | M6 | 69 | 681141 | G | A | [symbol] | CED83762 |
| X₅₆₄₂ | M6 | 69 | 682770 | C | T | [symbol] | CED83763 |
| X₅₆₄₃ | M6 | 69 | 743019 | C | T | [symbol] | CED83782 |
| X₅₆₄₄ | M6 | 69 | 786726 | C | T | [symbol] | CED83794 |
| X₅₆₄₅ | M6 | 69 | 840268 | C | T | [symbol] | CED83808 |
| X₅₆₄₆ | M6 | 69 | 865820 | C | T | [symbol] | CED83814 |
| X₅₆₄₇ | M6 | 69 | 869706 | G | A | [symbol] | CED83815 |
| X₅₆₄₈ | M6 | 69 | 872470 | G | A | [symbol] | CED83815 |
| X₅₆₄₉ | M6 | 69 | 892199 | G | A | [symbol] | CED83822 |
| X₅₆₅₀ | M6 | 69 | 894019 | G | A | [symbol] | CED83821 |
| X₅₆₅₁ | M6 | 69 | 894462 | C | T | [symbol] | CED83821 |
| X₅₆₅₂ | M6 | 69 | 949982 | C | T | [symbol] | CED83842 |
| X₅₆₅₃ | M6 | 69 | 971219 | C | T | [symbol] | CED83847 |
| X₅₆₅₄ | M6 | 69 | 988364 | G | A | [symbol] | CED83857 |
| X₅₆₅₅ | M6 | 69 | 1065858 | G | A | [symbol] | CED83881 |
| X₅₆₅₆ | M6 | 69 | 1084824 | G | A | [symbol] | CED83891 |
| X₅₆₅₇ | M6 | 69 | 1084835 | C | T | [symbol] | CED83891 |
| X₅₆₅₈ | M6 | 69 | 1084848 | A | G | [symbol] | CED83891 |
| X₅₆₅₉ | M6 | 69 | 1084866 | A | G | [symbol] | CED83891 |
| X₅₆₆₀ | M6 | 69 | 1084931 | C | T | [symbol] | CED83891 |
| X₅₆₆₁ | M6 | 69 | 1102164 | C | T | [symbol] | CED83897 |
| X₅₆₆₂ | M6 | 69 | 1109785 | C | T | [symbol] | CED83899 |
| X₅₆₆₃ | M6 | 69 | 1109813 | A | G | [symbol] | CED83899 |
| X₃₆₆₄ | M6 | 69 | 1109818 | A | G | [symbol] | CED83899 |
| X₅₆₆₅ | M6 | 69 | 1109819 | T | A | [symbol] | CED83899 |
| X₅₆₆₆ | M6 | 69 | 1109823 | T | C | [symbol] | CED83899 |
| X₅₆₆₇ | M6 | 69 | 1109830 | A | G | [symbol] | CED83899 |
| X₅₆₆₈ | M6 | 69 | 1109831 | C | A | [symbol] | CED83899 |
| X₅₆₆₉ | M6 | 69 | 1109835 | A | G | [symbol] | CED83899 |
| X₅₆₇₀ | M6 | 69 | 1110546 | T | A | [symbol] | CED83899 |
| X₅₆₇₁ | M6 | 69 | 1111789 | C | T | [symbol] | CED83899 |
| X₅₆₇₂ | M6 | 69 | 1152012 | G | A | [symbol] | CED83915 |
| X₅₆₇₃ | M6 | 69 | 1179032 | G | A | [symbol] | CED83923 |
| X₅₆₇₄ | M6 | 69 | 1192333 | G | A | [symbol] | CED83928 |
| X₅₆₇₅ | M6 | 69 | 1205454 | C | T | [symbol] | CED83932 |
| X₅₆₇₆ | M6 | 69 | 1212727 | G | A | [symbol] | CED83933 |
| X₅₆₇₇ | M6 | 69 | 1218409 | G | A | [symbol] | CED83936 |
| X₅₆₇₈ | M6 | 69 | 1260087 | G | A | [symbol] | CED83949 |
| X₅₆₇₉ | M6 | 69 | 1342909 | G | A | [symbol] | CED83975 |
| X₅₆₈₀ | M6 | 69 | 1372486 | C | T | [symbol] | CED83987 |
| X₅₆₈₁ | M6 | 69 | 1377243 | C | T | [symbol] | CED83989 |
| X₅₆₈₂ | M6 | 69 | 1396045 | G | A | [symbol] | CED83994 |
| X₅₆₈₃ | M6 | 69 | 1411237 | C | T | [symbol] | CED84001 |
| X₅₆₈₄ | M6 | 69 | 1411421 | C | T | [symbol] | CED83999 |
| X₅₆₈₅ | M6 | 69 | 1412234 | G | A | [symbol] | CED83999 |
| X₅₆₈₆ | M6 | 69 | 1416914 | G | A | [symbol] | CED84002 |
| X₅₆₈₇ | M6 | 69 | 1421240 | C | T | [symbol] | CED84004 |
| X₅₆₈₈ | M6 | 69 | 1493453 | C | T | [symbol] | CED84026 |
| X₅₆₈₉ | M6 | 69 | 1577606 | C | T | [symbol] | CED84055 |
| X₅₆₉₀ | M6 | 69 | 1590302 | G | A | [symbol] | CED84059 |
| X₅₆₉₁ | M6 | 69 | 1642484 | C | T | [symbol] | CED84076 |
| X₅₆₉₂ | M6 | 69 | 1652288 | C | T | [symbol] | CED84077 |
| X₅₆₉₃ | M6 | 69 | 1674261 | C | T | [symbol] | CED84084 |
| X₅₆₉₄ | M6 | 69 | 1688555 | C | T | [symbol] | CED84088 |
| X₅₆₉₅ | M6 | 69 | 1694047 | C | T | [symbol] | CED84089 |
| X₅₆₉₆ | M6 | 69 | 1706650 | G | A | [symbol] | CED84095 |
| X₅₆₉₇ | M6 | 69 | 1714728 | G | A | [symbol] | CED84097 |
| X₅₆₉₈ | M6 | 69 | 1720246 | C | T | [symbol] | CED84101 |
| X₅₆₉₉ | M6 | 69 | 1790823 | C | T | [symbol] | CED84125 |
| X₅₇₀₀ | M6 | 69 | 1792597 | C | T | [symbol] | CED84126 |
| X₅₇₀₁ | M6 | 69 | 1800584 | G | A | [symbol] | CED84129 |
| X₅₇₀₂ | M6 | 69 | 1803813 | G | A | [symbol] | CED84128 |
| X₅₇₀₃ | M6 | 69 | 1854739 | G | A | [symbol] | CED84145 |
| X₅₇₀₄ | M6 | 69 | 1924621 | C | T | [symbol] | CED84172 |
| X₅₇₀₅ | M6 | 69 | 1960423 | G | A | [symbol] | CED84188 |
| X₅₇₀₆ | M6 | 69 | 1967529 | C | T | [symbol] | CED84189 |
| X₅₇₀₇ | M6 | 69 | 1968848 | A | G | [symbol] | CED84189 |
| X₅₇₀₈ | M6 | 69 | 1978129 | C | G | [symbol] | CED84193 |
| X₅₇₀₉ | M6 | 69 | 1978321 | A | G | [symbol] | CED84193 |
| X₅₇₁₀ | M6 | 69 | 2001469 | C | T | [symbol] | CED84197 |
| X₅₇₁₁ | M6 | 69 | 2089848 | A | G | [symbol] | CED84232 |
| X₅₇₁₂ | M6 | 69 | 2089870 | C | T | [symbol] | CED84232 |
| X₅₇₁₃ | M6 | 69 | 2089876 | C | A | [symbol] | CED84232 |
| X₅₇₁₄ | M6 | 69 | 2099165 | C | T | [symbol] | CED84233 |
| X₅₇₁₅ | M6 | 69 | 2099418 | C | T | [symbol] | CED84233 |
| X₅₇₁₆ | M6 | 69 | 2099421 | A | T | [symbol] | CED84233 |
| X₅₇₁₇ | M6 | 69 | 2099423 | G | T | [symbol] | CED84233 |
| X₅₇₁₈ | M6 | 69 | 2099452 | C | G | [symbol] | CED84233 |
| X₅₇₁₉ | M6 | 69 | 2101188 | T | C | [symbol] | CED84234 |
| X₅₇₂₀ | M6 | 69 | 2160207 | C | T | [symbol] | CED84255 |
| X₅₇₂₁ | M6 | 69 | 2180564 | C | T | [symbol] | CED84264 |
| X₅₇₂₂ | M6 | 69 | 2226113 | C | T | [symbol] | CED84272 |
| X₅₇₂₃ | M6 | 69 | 2231926 | G | A | [symbol] | CED84274 |
| X₅₇₂₄ | M6 | 69 | 2260222 | C | T | [symbol] | CED84282 |
| X₅₇₂₅ | M6 | 69 | 2438727 | C | T | [symbol] | CED84343 |
| X₅₇₂₆ | M6 | 69 | 2483433 | G | A | [symbol] | CED84352 |
| X₅₇₂₇ | M6 | 70 | 22 | T | C | [symbol] | |
| X₅₇₂₈ | M6 | 72 | 93 | T | C | [symbol] | |
| X₅₇₂₉ | M6 | 72 | 584 | G | A | [symbol] | |
| X₅₇₃₀ | M6 | 72 | 856 | C | T | [symbol] | |
| X₅₇₃₁ | M6 | 72 | 1163 | C | T | [symbol] | |
| X₅₇₃₂ | M6 | 77 | 34978 | G | T | [symbol] | CDZ96642 |
| X₅₇₃₃ | M6 | 77 | 39842 | G | A | [symbol] | CDZ96646 |
| X₅₇₃₄ | M6 | 77 | 84022 | G | A | [symbol] | CDZ96659 |
| X₅₇₃₅ | M6 | 78 | 1865 | C | T | [symbol] | CED84359 |
| X₅₇₃₆ | M6 | 78 | 6333 | G | A | [symbol] | CED84360 |
| X₅₇₃₇ | M6 | 78 | 89958 | C | T | [symbol] | CED84387 |
| X₅₇₃₈ | M6 | 78 | 100169 | G | A | [symbol] | CED84388 |
| X₅₇₃₉ | M6 | 78 | 109325 | G | A | [symbol] | CED84390 |
| X₅₇₄₀ | M6 | 78 | 127873 | G | A | [symbol] | CED84395 |
| X₅₇₄₁ | M6 | 78 | 139788 | C | A | [symbol] | CED84399 |
| X₅₇₄₂ | M6 | 78 | 238854 | C | T | [symbol] | CED84430 |
| X₅₇₄₃ | M6 | 78 | 263828 | T | C | [symbol] | CED84438 |
| X₅₇₄₄ | M6 | 78 | 276353 | T | C | [symbol] | CED84440 |
| X₅₇₄₅ | M6 | 78 | 276361 | T | C | [symbol] | CED84440 |
| X₅₇₄₆ | M6 | 78 | 276362 | C | T | [symbol] | CED84440 |
| X₅₇₄₇ | M6 | 78 | 281454 | C | A | [symbol] | CED84441 |
| X₅₇₄₈ | M6 | 78 | 292068 | C | T | [symbol] | CED84442 |
| X₅₇₄₉ | M6 | 78 | 292139 | A | T | [symbol] | CED84442 |
| X₅₇₅₀ | M6 | 78 | 298141 | C | G | [symbol] | CED84443 |
| X₅₇₅₁ | M6 | 78 | 299166 | G | A | [symbol] | CED84443 |
| X₅₇₅₂ | M6 | 78 | 299644 | G | A | [symbol] | CED84443 |
| X₅₇₅₃ | M6 | 78 | 302257 | G | A | [symbol] | CED84443 |
| X₅₇₅₄ | M6 | 78 | 311586 | C | T | [symbol] | CED84447 |
| X₅₇₅₅ | M6 | 78 | 404944 | G | A | [symbol] | CED84475 |
| X₅₇₅₆ | M6 | 78 | 404988 | G | A | [symbol] | CED84475 |
| X₅₇₅₇ | M6 | 78 | 487303 | C | T | [symbol] | CED84505 |
| X₅₇₅₈ | M6 | 78 | 517862 | G | A | [symbol] | CED84513 |
| X₅₇₅₉ | M6 | 78 | 611362 | C | T | [symbol] | CED84546 |
| X₅₇₆₀ | M6 | 78 | 646777 | C | T | [symbol] | CED84556 |
| X₅₇₆₁ | M6 | 78 | 653177 | C | T | [symbol] | CED84559 |
| X₅₇₆₂ | M6 | 78 | 658932 | G | A | [symbol] | CED84561 |
| X₅₇₆₃ | M6 | 78 | 708376 | C | T | [symbol] | CED84580 |
| X₅₇₆₄ | M6 | 78 | 763771 | G | A | [symbol] | CED84600 |
| X₅₇₆₅ | M6 | 78 | 774252 | G | A | [symbol] | CED84602 |
| X₅₇₆₆ | M6 | 78 | 853752 | G | A | [symbol] | CED84625 |
| X₅₇₆₇ | M6 | 78 | 952815 | G | A | [symbol] | CED84662 |
| X₅₇₆₈ | M6 | 78 | 952860 | G | A | [symbol] | CED84662 |
| X₅₇₆₉ | M6 | 78 | 976799 | C | T | [symbol] | CED84672 |
| X₅₇₇₀ | M6 | 78 | 988551 | G | A | [symbol] | CED84675 |
| X₅₇₇₁ | M6 | 78 | 1023381 | G | A | [symbol] | CED84688 |
| X₅₇₇₂ | M6 | 78 | 1086537 | C | T | [symbol] | CED84713 |
| X₅₇₇₃ | M6 | 78 | 1098373 | G | A | [symbol] | CED84716 |
| X₅₇₇₄ | M6 | 78 | 1112587 | C | T | [symbol] | CED84722 |
| X₅₇₇₅ | M6 | 78 | 1115511 | G | A | [symbol] | CED84723 |
| X₅₇₇₆ | M6 | 78 | 1155093 | C | T | [symbol] | CED84732 |
| X₅₇₇₇ | M6 | 78 | 1216573 | C | T | [symbol] | CED84752 |
| X₅₇₇₈ | M6 | 78 | 1266077 | G | A | [symbol] | CED84770 |
| X₅₇₇₉ | M6 | 78 | 1302286 | C | T | [symbol] | CED84782 |
| X₅₇₈₀ | M6 | 78 | 1317124 | G | A | [symbol] | CED84787 |
| X₅₇₈₁ | M6 | 78 | 1322274 | G | A | [symbol] | CED84790 |
| X₅₇₈₂ | M6 | 78 | 1344640 | C | T | [symbol] | CED84795 |
| X₅₇₈₃ | M6 | 78 | 1345792 | G | A | [symbol] | CED84797 |
| X₅₇₈₄ | M6 | 78 | 1406981 | C | T | [symbol] | CED84821 |
| X₅₇₈₅ | M6 | 78 | 1426722 | C | T | [symbol] | CED84829 |
| X₅₇₈₆ | M6 | 78 | 1463555 | G | A | [symbol] | CED84840 |
| X₅₇₈₇ | M6 | 78 | 1498179 | G | A | [symbol] | CED84852 |
| X₅₇₈₈ | M6 | 78 | 1520586 | C | T | [symbol] | CED84855 |
| X₅₇₈₉ | M6 | 78 | 1532973 | G | A | [symbol] | CED84857 |
| X₅₇₉₀ | M6 | 78 | 1549787 | C | T | [symbol] | CED84861 |
| X₅₇₉₁ | M6 | 78 | 1563246 | C | T | [symbol] | CED84865 |
| X₅₇₉₂ | M6 | 78 | 1568326 | C | T | [symbol] | CED84868 |
| X₅₇₉₃ | M6 | 78 | 1609850 | C | T | [symbol] | CED84880 |
| X₅₇₉₄ | M6 | 78 | 1642170 | G | A | [symbol] | CED84889 |
| X₅₇₉₅ | M6 | 78 | 1658512 | G | A | [symbol] | CED84896 |
| X₅₇₉₆ | M6 | 78 | 1660408 | G | A | [symbol] | CED84897 |
| X₅₇₉₇ | M6 | 78 | 1673601 | C | T | [symbol] | CED84903 |
| X₅₇₉₈ | M6 | 78 | 1705462 | G | A | [symbol] | CED84915 |
| X₅₇₉₉ | M6 | 78 | 1742796 | G | A | [symbol] | CED84926 |
| X₅₈₀₀ | M6 | 78 | 1745145 | A | G | [symbol] | CED84927 |
| X₅₈₀₁ | M6 | 78 | 1745162 | C | T | [symbol] | CED84927 |
| X₅₈₀₂ | M6 | 79 | 65 | G | A | [symbol] | CDZ96674 |
| X₅₈₀₃ | M6 | 79 | 6477 | T | C | [symbol] | CDZ96674- |
| | | | | | | | CDZ96675 |
| X₅₈₀₄ | M6 | 79 | 57804 | G | A | [symbol] | CDZ96687 |
| X₅₈₀₅ | M6 | 79 | 64133 | C | T | [symbol] | CDZ96688 |
| X₅₈₀₆ | M6 | 79 | 80215 | C | T | [symbol] | CDZ96695 |
| X₅₈₀₇ | M6 | 79 | 132683 | C | T | [symbol] | CDZ96713 |
| X₅₈₀₈ | M6 | 79 | 147578 | G | A | [symbol] | CDZ96719 |
| X₅₈₀₉ | M6 | 79 | 171814 | C | T | [symbol] | CDZ96727 |
| X₅₈₁₀ | M6 | 79 | 307021 | C | T | [symbol] | CDZ96777 |
| X₅₈₁₁ | M6 | 79 | 316481 | C | T | [symbol] | CDZ96779 |
| X₅₈₁₂ | M6 | 79 | 318883 | G | A | [symbol] | CDZ96779 |
| X₅₈₁₃ | M6 | 79 | 332458 | G | A | [symbol] | CDZ96785 |
| X₅₈₁₄ | M6 | 79 | 346823 | G | A | [symbol] | CDZ96789 |
| X₅₈₁₅ | M6 | 79 | 378247 | C | T | [symbol] | CDZ96800 |
| X₅₈₁₆ | M6 | 79 | 483118 | T | A | [symbol] | CDZ96836 |
| X₅₈₁₇ | M6 | 79 | 492523 | C | T | [symbol] | CDZ96842 |
| X₅₈₁₈ | M6 | 79 | 509666 | C | T | [symbol] | CDZ96848 |
| X₅₈₁₉ | M6 | 79 | 526910 | C | T | [symbol] | CDZ96854 |
| X₅₈₂₀ | M6 | 79 | 575411 | C | T | [symbol] | CDZ96868 |
| X₅₈₂₁ | M6 | 79 | 579674 | G | A | [symbol] | CDZ96871 |
| X₅₈₂₂ | M6 | 79 | 617057 | C | T | [symbol] | CDZ96882 |
| X₅₈₂₃ | M6 | 79 | 679140 | C | T | [symbol] | CDZ96904 |
| X₅₈₂₄ | M6 | 79 | 687842 | T | C | [symbol] | CDZ96908 |
| X₅₈₂₅ | M6 | 79 | 696174 | G | A | [symbol] | CDZ96911 |
| X₅₈₂₆ | M6 | 79 | 735053 | T | C | [symbol] | CDZ96928 |
| X₅₈₂₇ | M6 | 79 | 748083 | G | T | [symbol] | CDZ96929 |
| X₅₈₂₈ | M6 | 79 | 749308 | A | G | [symbol] | CDZ96930 |
| X₅₈₂₉ | M6 | 79 | 759195 | T | A | [symbol] | CDZ96931 |
| X₅₈₃₀ | M6 | 79 | 759403 | C | T | [symbol] | CDZ96931 |
| X₅₈₃₁ | M6 | 79 | 759589 | G | A | [symbol] | CDZ96932 |
| X₅₈₃₂ | M6 | 79 | 759659 | G | A | [symbol] | CDZ96931 |
| X₅₈₃₃ | M6 | 79 | 760430 | T | C | [symbol] | CDZ96932 |
| X₅₈₃₄ | M6 | 79 | 760891 | A | G | [symbol] | CDZ96932 |
| X₅₈₃₅ | M6 | 79 | 760988 | G | T | [symbol] | CDZ96932 |
| X₅₈₃₆ | M6 | 79 | 761056 | T | C | [symbol] | CDZ96932 |
| X₅₈₃₇ | M6 | 79 | 768537 | A | G | [symbol] | CDZ96933 |
| X₅₈₃₈ | M6 | 79 | 776301 | C | A | [symbol] | CDZ96934 |
| X₅₈₃₉ | M6 | 79 | 776304 | G | T | [symbol] | CDZ96934 |
| X₅₈₄₀ | M6 | 79 | 786064 | A | G | [symbol] | CDZ96934 |
| X₅₈₄₁ | M6 | 79 | 798799 | C | T | [symbol] | CDZ96939 |
| X₅₈₄₂ | M6 | 79 | 844705 | T | C | [symbol] | CDZ96954 |
| X₅₈₄₃ | M6 | 79 | 907000 | C | T | [symbol] | CDZ96976 |
| X₅₈₄₄ | M6 | 79 | 933234 | G | A | [symbol] | CDZ96987 |
| X₅₈₄₅ | M6 | 79 | 973493 | C | T | [symbol] | CDZ97000 |
| X₅₈₄₆ | M6 | 79 | 1000786 | A | G | [symbol] | CDZ97007 |
| X₅₈₄₇ | M6 | 79 | 1021855 | G | A | [symbol] | CDZ97016 |
| X₅₈₄₈ | M6 | 79 | 1044652 | G | A | [symbol] | CDZ97023 |
| X₅₈₄₉ | M6 | 79 | 1075960 | G | A | [symbol] | CDZ97034 |
| X₅₈₅₀ | M6 | 79 | 1107695 | C | T | [symbol] | CDZ97046 |
| X₅₈₅₁ | M6 | 79 | 1117040 | C | T | [symbol] | CDZ97047 |
| X₅₈₅₂ | M6 | 79 | 1123288 | C | T | [symbol] | CDZ97049 |
| X₅₈₅₃ | M6 | 79 | 1140763 | G | A | [symbol] | CDZ97053 |
| X₅₈₅₄ | M6 | 79 | 1167374 | C | T | [symbol] | CDZ97065 |
| X₅₈₅₅ | M6 | 79 | 1191202 | G | A | [symbol] | CDZ97070 |
| X₅₈₅₆ | M6 | 79 | 1211985 | G | A | [symbol] | CDZ97077 |
| X₅₈₅₇ | M6 | 79 | 1229129 | G | A | [symbol] | CDZ97086 |
| X₅₈₅₈ | M6 | 79 | 1231740 | C | T | [symbol] | CDZ97087 |
| X₅₈₅₉ | M6 | 79 | 1234552 | G | A | [symbol] | CDZ97087 |
| X₅₈₆₀ | M6 | 79 | 1318034 | C | T | [symbol] | CDZ97117 |
| X₅₈₆₁ | M6 | 79 | 1336766 | C | T | [symbol] | CDZ97121 |
| X₅₈₆₂ | M6 | 79 | 1344338 | G | A | [symbol] | CDZ97124 |
| X₅₈₆₃ | M6 | 79 | 1387800 | G | A | [symbol] | CDZ97135 |
| X₅₈₆₄ | M6 | 79 | 1394931 | A | T | [symbol] | CDZ97136 |
| X₅₈₆₅ | M6 | 79 | 1430954 | G | A | [symbol] | CDZ97152 |
| X₅₈₆₆ | M6 | 79 | 1472351 | C | T | [symbol] | CDZ97165 |
| X₅₈₆₇ | M6 | 79 | 1533781 | C | T | [symbol] | CDZ97185 |
| X₅₈₆₈ | M6 | 79 | 1540205 | C | T | [symbol] | CDZ97186 |
| X₅₈₆₉ | M6 | 79 | 1624415 | G | A | [symbol] | CDZ97217 |
| X₅₈₇₀ | M6 | 79 | 1658469 | C | T | [symbol] | CDZ97227 |
| X₅₈₇₁ | M6 | 79 | 1674448 | G | A | [symbol] | CDZ97228 |
| X₅₈₇₂ | M6 | 79 | 1704321 | G | A | [symbol] | CDZ97235 |
| X₅₈₇₃ | M6 | 79 | 1772244 | G | A | [symbol] | CDZ97258 |
| X₅₈₇₄ | M6 | 79 | 1797660 | C | T | [symbol] | CDZ97265 |
| X₅₈₇₅ | M6 | 79 | 1797676 | G | A | [symbol] | CDZ97265 |
| X₅₈₇₆ | M6 | 79 | 1842448 | G | A | [symbol] | CDZ97282 |
| X₅₈₇₇ | M6 | 79 | 1855037 | A | G | [symbol] | CDZ97285 |
| X₅₈₇₈ | M6 | 79 | 1859220 | A | G | [symbol] | CDZ97291 |
| X₅₈₇₉ | M6 | 79 | 1877329 | G | A | [symbol] | CDZ97295 |
| X₅₈₈₀ | M6 | 79 | 1912360 | G | A | [symbol] | CDZ97307 |
| X₅₈₈₁ | M6 | 79 | 1930688 | G | A | [symbol] | CDZ97315 |
| X₅₈₈₂ | M6 | 79 | 1938626 | A | C | [symbol] | CDZ97318 |
| X₅₈₈₃ | M6 | 79 | 2013361 | C | T | [symbol] | CDZ97344 |
| X₅₈₈₄ | M6 | 79 | 2052320 | C | T | [symbol] | CDZ97361 |
| X₅₈₈₅ | M6 | 79 | 2055184 | G | A | [symbol] | CDZ97361 |
| X₅₈₈₆ | M6 | 79 | 2113064 | G | A | [symbol] | CDZ97381 |
| X₅₈₈₇ | M6 | 79 | 2116476 | C | T | [symbol] | CDZ97380 |
| X₅₈₈₈ | M6 | 79 | 2121041 | G | A | [symbol] | CDZ97380 |
| X₅₈₈₉ | M6 | 79 | 2152573 | C | T | [symbol] | CDZ97392 |
| X₅₈₉₀ | M6 | 79 | 2188410 | G | A | [symbol] | CDZ97405 |
| X₅₈₉₁ | M6 | 79 | 2268540 | C | T | [symbol] | CDZ97435 |
| X₅₈₉₂ | M6 | 79 | 2304361 | G | A | [symbol] | CDZ97450 |
| X₅₈₉₃ | M6 | 79 | 2315869 | A | C | [symbol] | CDZ97452 |
| X₅₈₉₄ | M6 | 79 | 2323713 | C | T | [symbol] | CDZ97455 |
| X₅₈₉₅ | M6 | 79 | 2339881 | C | G | [symbol] | CDZ97460 |
| X₅₈₉₆ | M6 | 79 | 2340326 | G | A | [symbol] | CDZ97462 |
| X₅₈₉₇ | M6 | 81 | 210 | G | T | [symbol] | |
| X₅₈₉₈ | M6 | 85 | 512 | A | G | [symbol] | |
| X₅₈₉₉ | M6 | 85 | 516 | G | A | [symbol] | |
| X₅₉₀₀ | M6 | 85 | 521 | C | T | [symbol] | |
| X₅₉₀₁ | M6 | 85 | 522 | A | G | [symbol] | |
| X₅₉₀₂ | M6 | 88 | 119 | C | T | [symbol] | CDZ97464 |
| X₅₉₀₃ | M6 | 88 | 196 | G | A | [symbol] | CDZ97464 |
| X₅₉₀₄ | M6 | 88 | 898 | C | T | [symbol] | CDZ97464 |
| X₅₉₀₅ | M6 | 99 | 245 | G | A | [symbol] | |
| X₅₉₀₆ | M6 | 105 | 130 | T | A | [symbol] | CDZ97474 |
| X₅₉₀₇ | M6 | 107 | 278 | A | G | [symbol] | |
| X₅₉₀₈ | M6 | 109 | 396 | T | C | [symbol] | |
| X₅₉₀₉ | M6 | 113 | 264 | T | C | [symbol] | |
| X₅₉₁₀ | M6 | 118 | 396 | C | T | [symbol] | CDZ97478 |
| X₅₉₁₁ | M6 | 118 | 870 | G | A | [symbol] | CDZ97478 |
| X₅₉₁₂ | M6 | 118 | 1491 | G | A | [symbol] | CDZ97478 |
| X₅₉₁₃ | M6 | 121 | 318 | A | T | [symbol] | |
| X₅₉₁₄ | M6 | 121 | 1269 | A | T | [symbol] | |
| X₅₉₁₅ | M6 | 124 | 35211 | G | A | [symbol] | CDZ97488 |
| X₅₉₁₆ | M6 | 124 | 69730 | G | A | [symbol] | CDZ97501 |
| X₅₉₁₇ | M6 | 124 | 72117 | G | A | [symbol] | CDZ97501 |
| X₅₉₁₈ | M6 | 124 | 72760 | G | A | [symbol] | CDZ97501 |
| X₅₉₁₉ | M6 | 124 | 80266 | C | T | [symbol] | CDZ97504 |
| X₅₉₂₀ | M6 | 124 | 94611 | G | A | [symbol] | CDZ97507 |
| X₅₉₂₁ | M6 | 124 | 96777 | C | T | [symbol] | CDZ97508 |
| X₅₉₂₂ | M6 | 124 | 156052 | G | A | [symbol] | CDZ97524 |
| X₅₉₂₃ | M6 | 124 | 179336 | C | T | [symbol] | CDZ97533 |
| X₅₉₂₄ | M6 | 124 | 206541 | G | A | [symbol] | CDZ97541 |
| X₅₉₂₅ | M6 | 124 | 222249 | C | T | [symbol] | CDZ97547 |
| X₅₉₂₆ | M6 | 125 | 16379 | G | A | [symbol] | CDZ97565 |
| X₅₉₂₇ | M6 | 125 | 20772 | G | A | [symbol] | CDZ97566 |
| X₅₉₂₈ | M6 | 125 | 35864 | T | C | [symbol] | CDZ97573 |
| X₅₉₂₉ | M6 | 129 | 299 | G | A | [symbol] | CDZ97577 |
| X₅₉₃₀ | M6 | 129 | 433 | G | A | [symbol] | CDZ97577 |
| X₅₉₃₁ | M6 | 129 | 856 | G | A | [symbol] | CDZ97577 |
| X₅₉₃₂ | M6 | 129 | 1013 | C | T | [symbol] | CDZ97577 |
| X₅₉₃₃ | M6 | 130 | 674 | C | T | [symbol] | CDZ97578 |
| X₅₉₃₄ | M6 | 138 | 123 | G | T | [symbol] | |
| X₅₉₃₅ | M6 | 141 | 5649 | C | T | [symbol] | CDZ97582 |
| X₅₉₃₆ | M6 | 141 | 14167 | G | A | [symbol] | CDZ97586 |
| X₅₉₃₇ | M6 | 141 | 15764 | C | T | [symbol] | CDZ97587 |
| X₅₉₃₈ | M6 | 141 | 29260 | G | A | [symbol] | CDZ97594 |
| X₅₉₃₉ | M6 | 145 | 296 | A | G | [symbol] | |
| X₅₀₄₀ | M6 | 149 | 1663 | A | G | [symbol] | CDZ97598 |
| X₅₉₄₁ | M6 | 149 | 2076 | T | G | [symbol] | CDZ97598 |
| X₅₉₄₂ | M6 | 149 | 2453 | C | T | [symbol] | CDZ97598 |
| X₅₉₄₃ | M6 | 159 | 106 | A | C | [symbol] | |
| X₅₉₄₄ | M6 | 162 | 47699 | G | A | [symbol] | CDZ97619 |
| X₅₉₄₅ | M6 | 162 | 70405 | A | G | [symbol] | CDZ97625 |
| X₅₉₄₆ | M6 | 162 | 209584 | C | T | [symbol] | CDZ97670 |
| X₅₉₄₇ | M6 | 162 | 214099 | G | A | [symbol] | CDZ97671 |
| X₅₉₄₈ | M6 | 162 | 218351 | G | A | [symbol] | CDZ97671 |
| X₅₉₄₉ | M6 | 162 | 223407 | C | T | [symbol] | CDZ97674 |
| X₅₉₅₀ | M6 | 162 | 308369 | T | C | [symbol] | CDZ97702 |
| X₅₉₅₁ | M6 | 162 | 320785 | G | C | [symbol] | CDZ97703 |
| X₅₉₅₂ | M6 | 162 | 320786 | T | G | [symbol] | CDZ97703 |
| X₅₉₅₃ | M6 | 162 | 321070 | C | T | [symbol] | CDZ97703 |
| X₅₉₅₄ | M6 | 162 | 321073 | A | G | [symbol] | CDZ97703 |
| X₅₉₅₅ | M6 | 162 | 321460 | C | G | [symbol] | CDZ97703 |
| X₅₉₅₆ | M6 | 162 | 321463 | A | C | [symbol] | CDZ97703 |
| X₅₉₅₇ | M6 | 162 | 323651 | T | C | [symbol] | CDZ97703 |
| X₅₉₅₈ | M6 | 162 | 323735 | A | G | [symbol] | CDZ97703 |
| X₅₉₅₉ | M6 | 162 | 324114 | T | C | [symbol] | CDZ97703 |
| X₅₉₆₀ | M6 | 162 | 324139 | C | T | [symbol] | CDZ97703 |
| X₅₉₆₁ | M6 | 162 | 324568 | A | G | [symbol] | CDZ97703 |
| X₅₉₆₂ | M6 | 162 | 360320 | G | A | [symbol] | CDZ97714 |
| X₅₉₆₃ | M6 | 162 | 387700 | C | T | [symbol] | CDZ97725 |
| X₅₉₆₄ | M6 | 162 | 408274 | C | T | [symbol] | CDZ97733 |
| X₅₉₆₅ | M6 | 162 | 423180 | C | T | [symbol] | CDZ97740 |
| X₅₉₆₆ | M6 | 162 | 424391 | C | T | [symbol] | CDZ97740 |
| X₅₉₆₇ | M6 | 162 | 444123 | T | C | [symbol] | CDZ97748 |
| X₅₉₆₈ | M6 | 162 | 467207 | C | T | [symbol] | CDZ97755 |
| X₅₉₆₉ | M6 | 162 | 476267 | C | T | [symbol] | CDZ97760 |
| X₅₉₇₀ | M6 | 162 | 481093 | G | A | [symbol] | CDZ97761 |
| X₅₉₇₁ | M6 | 162 | 491906 | G | A | [symbol] | CDZ97764 |
| X₅₉₇₂ | M6 | 162 | 492101 | G | A | [symbol] | CDZ97764 |
| X₅₉₇₃ | M6 | 162 | 501886 | C | T | [symbol] | CDZ97769 |
| X₅₉₇₄ | M6 | 162 | 507949 | G | A | [symbol] | CDZ97771 |
| X₅₉₇₅ | M6 | 162 | 521996 | G | C | [symbol] | CDZ97777 |
| X₅₉₇₆ | M6 | 162 | 618658 | C | T | [symbol] | CDZ97808 |
| X₅₉₇₇ | M6 | 162 | 632311 | G | A | [symbol] | CDZ97814 |
| X₅₉₇₈ | M6 | 162 | 633321 | G | A | [symbol] | CDZ97814 |
| X₅₉₇₉ | M6 | 162 | 633633 | G | A | [symbol] | CDZ97814 |
| X₅₉₈₀ | M6 | 162 | 638083 | C | T | [symbol] | CDZ97814 |
| X₅₉₈₁ | M6 | 162 | 640005 | C | T | [symbol] | CDZ97815 |
| X₅₉₈₂ | M6 | 162 | 680645 | G | A | [symbol] | CDZ97826 |
| X₅₉₈₃ | M6 | 162 | 716116 | C | T | [symbol] | CDZ97836 |
| X₅₉₈₄ | M6 | 162 | 738479 | G | A | [symbol] | CDZ97842 |
| X₅₉₈₅ | M6 | 162 | 738675 | G | A | [symbol] | CDZ97842 |
| X₅₉₈₆ | M6 | 162 | 738686 | C | T | [symbol] | CDZ97842 |
| X₅₉₈₇ | M6 | 162 | 808830 | G | A | [symbol] | CDZ97869 |
| X₅₉₈₈ | M6 | 162 | 825209 | G | A | [symbol] | CDZ97877 |
| X₅₉₈₉ | M6 | 162 | 871911 | C | T | [symbol] | CDZ97890 |
| X₅₉₉₀ | M6 | 162 | 914850 | C | T | [symbol] | CDZ97904 |
| X₅₉₉₁ | M6 | 162 | 972973 | G | A | [symbol] | CDZ97925 |
| X₅₉₉₂ | M6 | 163 | 225 | G | A | [symbol] | |
| X₅₉₉₃ | M6 | 163 | 727 | A | G | [symbol] | |
| X₅₉₉₄ | M6 | 175 | 120 | G | C | [symbol] | |
| X₅₉₉₅ | M6 | 185 | 21 | C | T | [symbol] | CDZ97957 |
| X₅₉₉₆ | M6 | 189 | 1306 | C | T | [symbol] | CDZ97961 |
| X₅₉₉₇ | M6 | 189 | 64473 | G | A | [symbol] | CDZ97979 |
| X₅₉₉₈ | M6 | 189 | 126573 | G | A | [symbol] | CDZ97996 |
| X₅₉₉₉ | M6 | 189 | 194647 | A | G | [symbol] | CDZ98020 |
| X₆₀₀₀ | M6 | 189 | 194665 | A | G | [symbol] | CDZ98020 |
| X₆₀₀₁ | M6 | 189 | 211865 | C | T | [symbol] | CDZ98028 |
| X₆₀₀₂ | M6 | 189 | 212649 | C | T | [symbol] | CDZ98028 |
| X₆₀₀₃ | M6 | 189 | 323680 | C | T | [symbol] | CDZ98063 |
| X₆₀₀₄ | M6 | 189 | 344057 | C | T | [symbol] | CDZ98068 |
| X₆₀₀₅ | M6 | 189 | 371247 | G | A | [symbol] | CDZ98078 |
| X₆₀₀₆ | M6 | 189 | 394551 | C | T | [symbol] | CDZ98085 |
| X₆₀₀₇ | M6 | 191 | 342 | A | G | [symbol] | CDZ98107 |
| X₆₀₀₈ | M6 | 191 | 347 | C | T | [symbol] | CDZ98107 |
| X₆₀₀₉ | M6 | 191 | 427 | C | T | [symbol] | CDZ98107 |
| X₆₀₁₀ | M6 | 191 | 451 | C | T | [symbol] | CDZ98107 |
| X₆₀₁₁ | M6 | 191 | 487 | A | G | [symbol] | CDZ98107 |
| X₆₀₁₂ | M6 | 197 | 624 | C | T | [symbol] | CDZ98111 |
| X₆₀₁₃ | M6 | 198 | 202 | C | A | [symbol] | |
| X₆₀₁₄ | M6 | 198 | 203 | G | A | [symbol] | |
| X₆₀₁₅ | M6 | 198 | 238 | C | T | [symbol] | |
| X₆₀₁₆ | M6 | 198 | 265 | C | T | [symbol] | |
| X₆₀₁₇ | M6 | 199 | 688 | C | T | [symbol] | |
| X₆₀₁₈ | M6 | 199 | 911 | C | T | [symbol] | |
| X₆₀₁₉ | M6 | 199 | 971 | C | T | [symbol] | |
| X₆₀₂₀ | M6 | 199 | 1218 | C | T | [symbol] | |
| X₆₀₂₁ | M6 | 202 | 171 | C | T | [symbol] | |
| X₆₀₂₂ | M6 | 205 | 360 | C | T | [symbol] | CDZ98112 |
| X₆₀₂₃ | M6 | 205 | 981 | C | T | [symbol] | CDZ98112 |
| X₆₀₂₄ | M6 | 206 | 406 | G | A | [symbol] | |
| X₆₀₂₅ | M6 | 208 | 117 | G | A | [symbol] | |
| X₆₀₂₆ | M6 | 208 | 476 | G | A | [symbol] | |
| X₆₀₂₇ | M6 | 208 | 616 | G | A | [symbol] | |
| X₆₀₂₈ | M6 | 208 | 935 | G | A | [symbol] | |
| X₆₀₂₉ | M6 | 209 | 312 | C | T | [symbol] | CDZ98113 |
| X₆₀₃₀ | M6 | 223 | 93 | G | A | [symbol] | CDZ98118 |
| X₆₀₃₁ | M6 | 223 | 102 | A | G | [symbol] | CDZ98118 |
| X₆₀₃₂ | M6 | 223 | 133 | A | G | [symbol] | CDZ98118 |
| X₆₀₃₃ | M6 | 223 | 150 | T | C | [symbol] | CDZ98118 |
| X₆₀₃₄ | M6 | 223 | 155 | A | C | [symbol] | CDZ98118 |
| X₆₀₃₅ | M6 | 223 | 158 | T | C | [symbol] | CDZ98118 |
| X₆₀₃₆ | M6 | 223 | 160 | C | T | [symbol] | CDZ98118 |
| X₆₀₃₇ | M6 | 223 | 175 | G | A | [symbol] | CDZ98118 |
| X₆₀₃₈ | M6 | 223 | 177 | A | G | [symbol] | CDZ98118 |
| X₆₀₃₉ | M6 | 223 | 188 | A | G | [symbol] | CDZ98118 |
| X₆₀₄₀ | M6 | 223 | 192 | C | A | [symbol] | CDZ98118 |
| X₆₀₄₁ | M6 | 223 | 194 | T | C | [symbol] | CDZ98118 |
| X₆₀₄₂ | M6 | 223 | 195 | T | G | [symbol] | CDZ98118 |
| X₆₀₄₃ | M6 | 223 | 197 | T | C | [symbol] | CDZ98118 |
| X₆₀₄₄ | M6 | 223 | 202 | G | C | [symbol] | CDZ98118 |
| X₆₀₄₅ | M6 | 225 | 317 | C | T | [symbol] | |
| X₆₀₄₆ | M6 | 227 | 202 | G | A | [symbol] | |
| X₆₀₄₇ | M6 | 232 | 340 | G | A | [symbol] | CDZ98119 |
| X₆₀₄₈ | M6 | 232 | 1379 | C | T | [symbol] | CDZ98119 |
| X₆₀₄₉ | M6 | 232 | 1521 | C | T | [symbol] | CDZ98119 |
| X₆₀₅₀ | M6 | 232 | 1662 | G | A | [symbol] | CDZ98119 |
| X₆₀₅₁ | M6 | 232 | 1761 | C | T | [symbol] | CDZ98119 |
| X₆₀₅₂ | M6 | 232 | 2027 | C | T | [symbol] | CDZ98119 |
| X₆₀₅₃ | M6 | 232 | 3060 | C | T | [symbol] | CDZ98120 |
| X₆₀₅₄ | M6 | 232 | 3284 | C | T | [symbol] | CDZ98119 |
| X₆₀₅₅ | M6 | 232 | 4437 | G | A | [symbol] | CDZ98121 |
| X₆₀₅₆ | M6 | 232 | 4561 | C | T | [symbol] | CDZ98120 |
| X₆₀₅₇ | M6 | 242 | 7334 | C | T | [symbol] | CDZ98125 |
| X₆₀₅₈ | M6 | 242 | 41710 | G | A | [symbol] | CDZ98131 |
| X₆₀₅₉ | M6 | 242 | 50262 | G | A | [symbol] | CDZ98135 |
| X₆₀₆₀ | M6 | 242 | 84132 | G | A | [symbol] | CDZ98146 |
| X₆₀₆₁ | M6 | 242 | 88037 | G | A | [symbol] | CDZ98147 |
| X₆₀₆₂ | M6 | 242 | 107587 | G | A | [symbol] | CDZ98153 |
| X₆₀₆₃ | M6 | 242 | 112244 | G | A | [symbol] | CDZ98154 |
| X₆₀₆₄ | M6 | 242 | 149113 | C | T | [symbol] | CDZ98165 |
| X₆₀₆₅ | M6 | 242 | 213986 | G | A | [symbol] | CDZ98185 |
| X₆₀₆₆ | M6 | 242 | 227271 | C | T | [symbol] | CDZ98191 |
| X₆₀₆₇ | M6 | 242 | 233088 | G | A | [symbol] | CDZ98193 |
| X₆₀₆₈ | M6 | 242 | 233141 | G | A | [symbol] | CDZ98193 |
| X₆₀₆₉ | M6 | 242 | 310353 | G | A | [symbol] | CDZ98216 |
| X₆₀₇₀ | M6 | 242 | 342570 | C | T | [symbol] | CDZ98229 |
| X₆₀₇₁ | M6 | 242 | 357209 | G | A | [symbol] | CDZ98233 |
| X₆₀₇₂ | M6 | 242 | 374897 | G | A | [symbol] | CDZ98238 |
| X₆₀₇₃ | M6 | 242 | 376713 | G | A | [symbol] | CDZ98238 |
| X₆₀₇₄ | M6 | 242 | 379812 | C | T | [symbol] | CDZ98238 |
| X₆₀₇₅ | M6 | 242 | 404132 | G | A | [symbol] | CDZ98248 |
| X₆₀₇₆ | M6 | 242 | 405825 | G | A | [symbol] | CDZ98250 |
| X₆₀₇₇ | M6 | 242 | 412676 | G | A | [symbol] | CDZ98249 |
| X₆₀₇₈ | M6 | 242 | 437941 | G | A | [symbol] | CDZ98258 |
| X₆₀₇₉ | M6 | 242 | 454709 | C | T | [symbol] | CDZ98263 |
| X₆₀₈₀ | M6 | 242 | 485936 | G | A | [symbol] | CDZ98270 |
| X₆₀₈₁ | M6 | 242 | 492389 | G | A | [symbol] | CDZ98274 |
| X₆₀₈₂ | M6 | 242 | 514780 | C | T | [symbol] | CDZ98282 |
| X₆₀₈₃ | M6 | 242 | 528340 | G | A | [symbol] | CDZ98288 |
| X₆₀₈₄ | M6 | 242 | 530144 | G | A | [symbol] | CDZ98288 |
| X₆₀₈₅ | M6 | 242 | 542663 | G | A | [symbol] | CDZ98290 |
| X₆₀₈₆ | M6 | 242 | 548679 | C | T | [symbol] | CDZ98292 |
| X₆₀₈₇ | M6 | 242 | 559999 | G | A | [symbol] | CDZ98297 |
| X₆₀₈₈ | M6 | 242 | 602456 | G | A | [symbol] | CDZ98308 |
| X₆₀₈₉ | M6 | 242 | 602531 | G | A | [symbol] | CDZ98308 |
| X₆₀₉₀ | M6 | 242 | 604704 | C | T | [symbol] | CDZ98309 |
| X₆₀₉₁ | M6 | 242 | 628488 | G | A | [symbol] | CDZ98317 |
| X₆₀₉₂ | M6 | 248 | 99 | A | G | [symbol] | |
| X₆₀₉₃ | M6 | 249 | 206 | G | A | [symbol] | CED84929 |
| X₆₀₉₄ | M6 | 249 | 5307 | C | T | [symbol] | CED84929 |
| X₆₀₉₅ | M6 | 249 | 52397 | G | A | [symbol] | CED84947 |
| X₆₀₉₆ | M6 | 249 | 72016 | C | T | [symbol] | CED84950 |
| X₆₀₉₇ | M6 | 249 | 157550 | C | T | [symbol] | CED84983 |
| X₆₀₉₈ | M6 | 249 | 191304 | C | T | [symbol] | CED84988 |
| X₆₀₉₉ | M6 | 249 | 231983 | C | T | [symbol] | CED85003 |
| X₆₁₀₀ | M6 | 249 | 238318 | C | T | [symbol] | CED85003 |
| X₆₁₀₁ | M6 | 249 | 239775 | G | A | [symbol] | CED85004 |
| X₆₁₀₂ | M6 | 249 | 253494 | C | T | [symbol] | CED85008 |
| X₆₁₀₃ | M6 | 249 | 272075 | C | T | [symbol] | CED85013 |
| X₆₁₀₄ | M6 | 249 | 294853 | C | T | [symbol] | CED85019 |
| X₆₁₀₅ | M6 | 249 | 305975 | G | A | [symbol] | CED85023 |
| X₆₁₀₆ | M6 | 249 | 342990 | G | A | [symbol] | CED85036 |
| X₆₁₀₇ | M6 | 249 | 371117 | G | A | [symbol] | CED85047 |
| X₆₁₀₈ | M6 | 249 | 371535 | G | A | [symbol] | CED85048 |
| X₆₁₀₉ | M6 | 249 | 377814 | G | A | [symbol] | CED85051 |
| X₆₁₁₀ | M6 | 249 | 436175 | G | A | [symbol] | CED85073 |
| X₆₁₁₁ | M6 | 249 | 485782 | C | T | [symbol] | CED85089 |
| X₆₁₁₂ | M6 | 249 | 500195 | C | T | [symbol] | CED85093 |
| X₆₁₁₃ | M6 | 249 | 501310 | C | T | [symbol] | CED85093 |
| X₆₁₁₄ | M6 | 249 | 501510 | T | C | [symbol] | CED85093 |
| X₆₁₁₅ | M6 | 249 | 532943 | A | G | [symbol] | CED85099 |
| X₆₁₁₆ | M6 | 249 | 598579 | C | T | [symbol] | CED85125 |
| X₆₁₁₇ | M6 | 249 | 627104 | C | T | [symbol] | CED85133 |
| X₆₁₁₈ | M6 | 249 | 637944 | G | A | [symbol] | CED85135 |
| X₆₁₁₉ | M6 | 249 | 654772 | C | T | [symbol] | CED85141 |
| X₆₁₂₀ | M6 | 249 | 660408 | G | A | [symbol] | CED85144 |
| X₆₁₂₁ | M6 | 249 | 665383 | G | A | [symbol] | CED85144 |
| X₆₁₂₂ | M6 | 249 | 709695 | G | T | [symbol] | CED85164 |
| X₆₁₂₃ | M6 | 249 | 743970 | G | A | [symbol] | CED85171 |
| X₆₁₂₄ | M6 | 249 | 751427 | G | A | [symbol] | CED85174 |
| X₆₁₂₅ | M6 | 249 | 794731 | C | T | [symbol] | CED85186 |
| X₆₁₂₆ | M6 | 249 | 803215 | C | T | [symbol] | CED85186 |
| X₆₁₂₇ | M6 | 249 | 854220 | G | A | [symbol] | CED85201 |
| X₆₁₂₈ | M6 | 249 | 886063 | G | A | [symbol] | CED85208 |
| X₆₁₂₉ | M6 | 249 | 911274 | C | T | [symbol] | CED85218 |
| X₆₁₃₀ | M6 | 249 | 932606 | C | T | [symbol] | CED85223 |
| X₆₁₃₁ | M6 | 249 | 934305 | G | A | [symbol] | CED85225 |
| X₆₁₃₂ | M6 | 249 | 945434 | C | T | [symbol] | CED85227 |
| X₆₁₃₃ | M6 | 249 | 945727 | C | T | [symbol] | CED85227 |
| X₆₁₃₄ | M6 | 249 | 969333 | G | T | [symbol] | CED85238 |
| X₆₁₃₅ | M6 | 249 | 977170 | C | T | [symbol] | CED85242 |
| X₆₁₃₆ | M6 | 249 | 989520 | C | T | [symbol] | CED85243 |
| X₆₁₃₇ | M6 | 249 | 1014098 | C | T | [symbol] | CED85252 |
| X₆₁₃₈ | M6 | 249 | 1014926 | C | T | [symbol] | CED85252 |
| X₆₁₃₉ | M6 | 249 | 1050123 | C | T | [symbol] | CED85262 |
| X₆₁₄₀ | M6 | 249 | 1076166 | C | T | [symbol] | CED85270 |
| X₆₁₄₁ | M6 | 249 | 1076333 | G | T | [symbol] | CED85270 |
| X₆₁₄₂ | M6 | 249 | 1088841 | T | C | [symbol] | CED85274 |
| X₆₁₄₃ | M6 | 249 | 1127638 | C | T | [symbol] | CED85286 |
| X₆₁₄₄ | M6 | 249 | 1144309 | G | A | [symbol] | CED85291 |
| X₆₁₄₅ | M6 | 249 | 1176977 | G | A | [symbol] | CED85303 |
| X₆₁₄₆ | M6 | 249 | 1195367 | G | A | [symbol] | CED85307 |
| X₆₁₄₇ | M6 | 249 | 1230068 | C | T | [symbol] | CED85319 |
| X₆₁₄₈ | M6 | 249 | 1234239 | C | T | [symbol] | CED85319 |
| X₆₁₄₉ | M6 | 249 | 1245242 | G | A | [symbol] | CED85322 |
| X₆₁₅₀ | M6 | 249 | 1263893 | C | T | [symbol] | CED85327 |
| X₆₁₅₁ | M6 | 249 | 1299472 | C | T | [symbol] | CED85343 |
| X₆₁₅₂ | M6 | 249 | 1305184 | G | A | [symbol] | CED85345 |
| X₆₁₅₃ | M6 | 249 | 1331428 | G | A | [symbol] | CED85352 |
| X₆₁₅₄ | M6 | 249 | 1457529 | G | A | [symbol] | CED85398 |
| X₆₁₅₅ | M6 | 249 | 1475590 | G | A | [symbol] | CED85404 |
| X₆₁₅₆ | M6 | 249 | 1498029 | T | C | [symbol] | CED85415 |
| X₆₁₅₇ | M6 | 249 | 1498823 | T | C | [symbol] | CED85414 |
| X₆₁₅₈ | M6 | 249 | 1498829 | C | T | [symbol] | CED85414 |
| X₆₁₅₉ | M6 | 249 | 1502631 | G | T | [symbol] | CED85416 |
| X₆₁₆₀ | M6 | 249 | 1502641 | T | A | [symbol] | CED85416 |
| X₆₁₆₁ | M6 | 249 | 1505138 | G | A | [symbol] | CED85416 |
| X₆₁₆₂ | M6 | 249 | 1505634 | T | G | [symbol] | CED85416 |
| X₆₁₆₃ | M6 | 249 | 1518591 | T | A | [symbol] | CED85419 |
| X₆₁₆₄ | M6 | 249 | 1519431 | A | G | [symbol] | CED85419 |
| X₆₁₆₅ | M6 | 249 | 1520073 | T | C | [symbol] | CED85420 |
| X₆₁₆₆ | M6 | 249 | 1520089 | C | T | [symbol] | CED85420 |
| X₆₁₆₇ | M6 | 249 | 1520169 | C | T | [symbol] | CED85420 |
| X₆₁₆₈ | M6 | 249 | 1520420 | G | C | [symbol] | CED85420 |
| X₆₁₆₉ | M6 | 249 | 1531574 | C | T | [symbol] | CED85423 |
| X₆₁₇₀ | M6 | 249 | 1535511 | G | A | [symbol] | CED85423 |
| X₆₁₇₁ | M6 | 249 | 1567124 | G | A | [symbol] | CED85432 |
| X₆₁₇₂ | M6 | 249 | 1585540 | T | C | [symbol] | CED85439 |
| X₆₁₇₃ | M6 | 249 | 1599907 | C | T | [symbol] | CED85444 |
| X₆₁₇₄ | M6 | 249 | 1619036 | G | A | [symbol] | CED85450 |
| X₆₁₇₅ | M6 | 249 | 1636931 | G | A | [symbol] | CED85455 |
| X₆₁₇₆ | M6 | 249 | 1653615 | T | G | [symbol] | CED85457 |
| X₆₁₇₇ | M6 | 249 | 1653962 | C | T | [symbol] | CED85458 |
| X₆₁₇₈ | M6 | 249 | 1666185 | C | T | [symbol] | CED85460 |
| X₆₁₇₉ | M6 | 249 | 1726777 | C | T | [symbol] | CED85474 |
| X₆₁₈₀ | M6 | 249 | 1729264 | C | T | [symbol] | CED85476 |
| X₆₁₈₁ | M6 | 249 | 1732115 | G | A | [symbol] | CED85476 |
| X₆₁₈₂ | M6 | 249 | 1734722 | G | A | [symbol] | CED85477 |
| X₆₁₈₃ | M6 | 249 | 1768844 | C | T | [symbol] | CED85489 |
| X₆₁₈₄ | M6 | 249 | 1780551 | A | G | [symbol] | CED85493 |
| X₆₁₈₅ | M6 | 249 | 1780569 | A | G | [symbol] | CED85493 |
| X₆₁₈₆ | M6 | 249 | 1782994 | G | A | [symbol] | CED85493 |
| X₆₁₈₇ | M6 | 249 | 1801965 | G | A | [symbol] | CED85501 |
| X₆₁₈₈ | M6 | 249 | 1803575 | C | T | [symbol] | CED85502 |
| X₆₁₈₉ | M6 | 249 | 1804835 | G | A | [symbol] | CED85502 |
| X₆₁₉₀ | M6 | 249 | 1880762 | G | A | [symbol] | CED85525 |
| X₆₁₉₁ | M6 | 249 | 1944026 | G | A | [symbol] | CED85545 |
| X₆₁₉₂ | M6 | 249 | 1988505 | C | T | [symbol] | CED85560 |
| X₆₁₉₃ | M6 | 249 | 2015272 | G | A | [symbol] | CED85567 |
| X₆₁₉₄ | M6 | 249 | 2027477 | G | A | [symbol] | CED85573 |
| X₆₁₉₅ | M6 | 249 | 2047401 | C | T | [symbol] | CED85581 |
| X₆₁₉₆ | M6 | 249 | 2054064 | C | T | [symbol] | CED85583 |
| X₆₁₉₇ | M6 | 249 | 2063221 | G | A | [symbol] | CED85586 |
| X₆₁₉₈ | M6 | 249 | 2110956 | C | T | [symbol] | CED85603 |
| X₆₁₉₉ | M6 | 249 | 2131353 | C | T | [symbol] | CED85609 |
| X₆₂₀₀ | M6 | 249 | 2163304 | G | A | [symbol] | CED85618 |
| X₆₂₀₁ | M6 | 249 | 2198205 | G | A | [symbol] | CED85628 |
| X₆₂₀₂ | M6 | 249 | 2223626 | G | A | [symbol] | CED85633 |
| X₆₂₀₃ | M6 | 249 | 2255547 | G | C | [symbol] | CED85640 |
| X₆₂₀₄ | M6 | 252 | 512 | C | T | [symbol] | |
| X₆₂₀₅ | M6 | 252 | 524 | C | T | [symbol] | |
| X₆₂₀₆ | M6 | 258 | 836 | A | G | [symbol] | |
| X₆₂₀₇ | M6 | 258 | 907 | A | G | [symbol] | |
| X₆₂₀₈ | M6 | 258 | 1139 | A | T | [symbol] | |
| X₆₂₀₉ | M6 | 259 | 91 | G | C | [symbol] | |
| X₆₂₁₀ | M6 | 260 | 156 | G | A | [symbol] | |
| X₆₂₁₁ | M6 | 262 | 4049 | G | A | [symbol] | CDZ98330 |
| X₆₂₁₂ | M6 | 262 | 12289 | C | T | [symbol] | CDZ98333 |
| X₆₂₁₃ | M6 | 262 | 30347 | G | A | [symbol] | CDZ98338 |
| X₆₂₁₄ | M6 | 262 | 30359 | G | A | [symbol] | CDZ98338 |
| X₆₂₁₅ | M6 | 262 | 39621 | C | T | [symbol] | CDZ98342 |
| X₆₂₁₆ | M6 | 262 | 81226 | G | A | [symbol] | CDZ98358 |
| X₆₂₁₇ | M6 | 262 | 109833 | C | T | [symbol] | CDZ98369 |
| X₆₂₁₈ | M6 | 262 | 139442 | C | T | [symbol] | CDZ98375 |
| X₆₂₁₉ | M6 | 262 | 148151 | C | T | [symbol] | CDZ98375 |
| X₆₂₂₀ | M6 | 262 | 164438 | G | A | [symbol] | CDZ98383 |
| X₆₂₂₁ | M6 | 262 | 175142 | G | A | [symbol] | CDZ98388 |
| X₆₂₂₂ | M6 | 262 | 201531 | G | A | [symbol] | CDZ98396 |
| X₆₂₂₃ | M6 | 262 | 242371 | C | T | [symbol] | CDZ98411 |
| X₆₂₂₄ | M6 | 262 | 314812 | T | C | [symbol] | CDZ98435 |
| X₆₂₂₅ | M6 | 262 | 319302 | G | A | [symbol] | CDZ98436 |
| X₆₂₂₆ | M6 | 262 | 345538 | C | T | [symbol] | CDZ98448 |
| X₆₂₂₇ | M6 | 262 | 373766 | C | T | [symbol] | CDZ98456 |
| X₆₂₂₈ | M6 | 262 | 380519 | C | T | [symbol] | CDZ98457 |
| X₆₂₂₉ | M6 | 262 | 397539 | G | A | [symbol] | CDZ98463 |
| X₆₂₃₀ | M6 | 262 | 420102 | G | A | [symbol] | CDZ98468 |
| X₆₂₃₁ | M6 | 262 | 446956 | C | T | [symbol] | CDZ98477 |
| X₆₂₃₂ | M6 | 262 | 471054 | C | T | [symbol] | CDZ98487 |
| X₆₂₃₃ | M6 | 262 | 498239 | C | T | [symbol] | CDZ98496 |
| X₆₂₃₄ | M6 | 262 | 503840 | G | A | [symbol] | CDZ98499 |
| X₆₂₃₅ | M6 | 262 | 510643 | G | A | [symbol] | CDZ98502 |
| X₆₂₃₆ | M6 | 262 | 539428 | G | A | [symbol] | CDZ98514 |
| X₆₂₃₇ | M6 | 262 | 539452 | A | G | [symbol] | CDZ98514 |
| X₆₂₃₈ | M6 | 262 | 539470 | A | G | [symbol] | CDZ98514 |
| X₆₂₃₉ | M6 | 262 | 539588 | A | G | [symbol] | CDZ98514 |
| X₆₂₄₀ | M6 | 262 | 552414 | C | T | [symbol] | CDZ98518 |
| X₆₂₄₁ | M6 | 262 | 557280 | G | A | [symbol] | CDZ98518 |
| X₆₂₄₂ | M6 | 262 | 560713 | G | A | [symbol] | CDZ98519 |
| X₆₂₄₃ | M6 | 262 | 562795 | C | T | [symbol] | CDZ98521 |
| X₆₂₄₄ | M6 | 262 | 567591 | G | A | [symbol] | CDZ98524 |
| X₆₂₄₅ | M6 | 262 | 567801 | G | A | [symbol] | CDZ98524 |
| X₆₂₄₆ | M6 | 262 | 618198 | G | A | [symbol] | CDZ98538 |
| X₆₂₄₇ | M6 | 262 | 639962 | A | G | [symbol] | CDZ98544 |
| X₆₂₄₈ | M6 | 262 | 653920 | A | G | [symbol] | CDZ98545 |
| X₆₂₄₉ | M6 | 262 | 656031 | C | A | [symbol] | CDZ98545 |
| X₆₂₅₀ | M6 | 262 | 668764 | C | T | [symbol] | CDZ98545 |
| X₆₂₅₁ | M6 | 262 | 691577 | C | T | [symbol] | CDZ98551 |
| X₆₂₅₂ | M6 | 262 | 722911 | C | A | [symbol] | CDZ98562 |
| X₆₂₅₃ | M6 | 262 | 751209 | C | T | [symbol] | CDZ98572 |
| X₆₂₅₄ | M6 | 262 | 759042 | A | T | [symbol] | CDZ98575 |
| X₆₂₅₅ | M6 | 262 | 822734 | G | A | [symbol] | CDZ98597 |
| X₆₂₅₆ | M6 | 262 | 835874 | C | T | [symbol] | CDZ98601 |
| X₆₂₅₇ | M6 | 262 | 865999 | G | A | [symbol] | CDZ98613 |
| X₆₂₅₈ | M6 | 262 | 950365 | A | T | [symbol] | CDZ98640 |
| X₆₂₅₉ | M6 | 262 | 971713 | G | A | [symbol] | CDZ98649 |
| X₆₂₆₀ | M6 | 262 | 1016286 | C | T | [symbol] | CDZ98661 |
| X₆₂₆₁ | M6 | 262 | 1021485 | C | T | [symbol] | CDZ98663 |
| X₆₂₆₂ | M6 | 262 | 1076581 | G | A | [symbol] | CDZ98679 |
| X₆₂₆₃ | M6 | 262 | 1080137 | G | A | [symbol] | CDZ98679 |
| X₆₂₆₄ | M6 | 262 | 1209662 | G | A | [symbol] | CDZ98723 |
| X₆₂₆₅ | M6 | 262 | 1226072 | C | T | [symbol] | CDZ98730 |
| X₆₂₆₆ | M6 | 262 | 1237021 | C | T | [symbol] | CDZ98735 |
| X₆₂₆₇ | M6 | 262 | 1277604 | G | A | [symbol] | CDZ98747 |
| X₆₂₆₈ | M6 | 262 | 1305361 | G | A | [symbol] | CDZ98753 |
| X₆₂₆₉ | M6 | 262 | 1329643 | C | T | [symbol] | CDZ98760 |
| X₆₂₇₀ | M6 | 262 | 1349561 | G | A | [symbol] | CDZ98766 |
| X₆₂₇₁ | M6 | 262 | 1351116 | A | G | [symbol] | CDZ98766 |
| X₆₂₇₂ | M6 | 262 | 1408928 | G | A | [symbol] | CDZ98786 |
| X₆₂₇₃ | M6 | 262 | 1424293 | G | A | [symbol] | CDZ98791 |
| X₆₂₇₄ | M6 | 262 | 1455677 | G | A | [symbol] | CDZ98804 |
| X₆₂₇₅ | M6 | 262 | 1505836 | G | A | [symbol] | CDZ98823 |
| X₆₂₇₆ | M6 | 262 | 1546246 | C | T | [symbol] | CDZ98833 |
| X₆₂₇₇ | M6 | 262 | 1549845 | C | T | [symbol] | CDZ98837 |
| X₆₂₇₈ | M6 | 262 | 1550311 | C | T | [symbol] | CDZ98836 |
| X₆₂₇₉ | M6 | 262 | 1550456 | C | T | [symbol] | CDZ98837 |
| X₆₂₈₀ | M6 | 262 | 1558074 | G | A | [symbol] | CDZ98840 |
| X₆₂₈₁ | M6 | 262 | 1577316 | G | A | [symbol] | CDZ98844 |
| X₆₂₈₂ | M6 | 262 | 1615762 | G | A | [symbol] | CDZ98855 |
| X₆₂₈₃ | M6 | 262 | 1694625 | C | T | [symbol] | CDZ98878 |
| X₆₂₈₄ | M6 | 262 | 1706076 | G | A | [symbol] | CDZ98885 |
| X₆₂₈₅ | M6 | 262 | 1709112 | G | A | [symbol] | CDZ98884 |
| X₆₂₈₆ | M6 | 262 | 1711527 | G | A | [symbol] | CDZ98886 |
| X₆₂₈₇ | M6 | 262 | 1716385 | G | A | [symbol] | CDZ98887 |
| X₆₂₈₈ | M6 | 265 | 272 | A | G | [symbol] | CDZ98889 |
| X₆₂₈₉ | M6 | 266 | 252 | C | T | [symbol] | |
| X₆₂₉₀ | M6 | 267 | 133 | T | C | [symbol] | |
| X₆₂₉₁ | M6 | 267 | 134 | C | T | [symbol] | |
| X₆₂₉₂ | M7 | 22 | 1643 | C | T | [symbol] | CED80056 |
| X₆₂₉₃ | M7 | 22 | 2524 | G | A | [symbol] | CED80056 |
| X₆₂₉₄ | M7 | 28 | 236 | G | A | [symbol] | CDZ96150 |
| X₆₂₉₅ | M7 | 28 | 377 | G | A | [symbol] | CDZ96150 |
| X₆₂₉₆ | M7 | 28 | 1506 | C | T | [symbol] | CDZ96150 |
| X₆₂₉₇ | M7 | 28 | 1677 | C | T | [symbol] | CDZ96150 |
| X₆₂₉₈ | M7 | 43 | 464 | G | A | [symbol] | CDZ96151 |
| X₆₂₉₉ | M7 | 43 | 753 | C | T | [symbol] | CDZ96151 |
| X₆₃₀₀ | M7 | 43 | 757 | G | A | [symbol] | CDZ96151 |
| X₆₃₀₁ | M7 | 43 | 1527 | C | T | [symbol] | CDZ96151 |
| X₆₃₀₂ | M7 | 43 | 1748 | G | A | [symbol] | CDZ96151 |
| X₆₃₀₃ | M7 | 43 | 1928 | C | T | [symbol] | CDZ96151 |
| X₆₃₀₄ | M7 | 55 | 1405 | C | T | [symbol] | CED80057 |
| X₆₃₀₅ | M7 | 62 | 26 | T | A | [symbol] | CDZ96152 |
| X₆₃₀₆ | M7 | 62 | 27 | T | C | [symbol] | CDZ96152 |
| X₆₃₀₇ | M7 | 62 | 55 | T | A | [symbol] | CDZ96152 |
| X₆₃₀₈ | M7 | 62 | 403 | C | T | [symbol] | CDZ96152 |
| X₆₃₀₉ | M7 | 62 | 669 | C | T | [symbol] | CDZ96152 |
| X₆₃₁₀ | M7 | 62 | 875 | G | A | [symbol] | CDZ96152 |
| X₆₃₁₁ | M7 | 102 | 339 | C | T | [symbol] | CDZ96153 |
| X₆₃₁₂ | M7 | 102 | 951 | G | A | [symbol] | CDZ96153 |
| X₆₃₁₃ | M7 | 102 | 1042 | G | A | [symbol] | CDZ96153 |
| X₆₃₁₄ | M7 | 102 | 2334 | G | A | [symbol] | CDZ96153 |
| X₆₃₁₅ | M7 | 102 | 2590 | C | T | [symbol] | CDZ96153 |
| X₆₃₁₆ | M7 | 102 | 3427 | C | T | [symbol] | CDZ96153 |
| X₆₃₁₇ | M7 | 176 | 358 | G | A | [symbol] | CED80058 |
| X₆₃₁₈ | M7 | 176 | 1872 | G | A | [symbol] | CED80058 |
| X₆₃₁₉ | M7 | 176 | 1980 | G | A | [symbol] | CED80058 |
| X₆₃₂₀ | M7 | 176 | 2335 | A | G | [symbol] | CED80058 |
| X₆₃₂₁ | M7 | 176 | 2349 | G | A | [symbol] | CED80058 |
| X₆₃₂₂ | M7 | 179 | 93 | A | G | [symbol] | CDZ96154 |
| X₆₃₂₃ | M7 | 179 | 96 | G | A | [symbol] | CDZ96154 |
| X₆₃₂₄ | M7 | 179 | 1177 | G | A | [symbol] | CDZ96154 |
| X₆₃₂₅ | M7 | 179 | 1525 | G | A | [symbol] | CDZ96154 |
| X₆₃₂₆ | M7 | 179 | 1739 | G | A | [symbol] | CDZ96154 |
| X₆₃₂₇ | M7 | 179 | 1780 | C | T | [symbol] | CDZ96154 |
| X₆₃₂₈ | M7 | 179 | 2324 | G | A | [symbol] | CDZ96154 |
| X₆₃₂₉ | M7 | 188 | 815 | C | T | [symbol] | CED80060 |
| X₆₃₃₀ | M7 | 188 | 1174 | C | T | [symbol] | CED80060 |
| X₆₃₃₁ | M7 | 188 | 2163 | G | A | [symbol] | CED80060 |
| X₆₃₃₂ | M7 | 188 | 2170 | G | A | [symbol] | CED80060 |
| X₆₃₃₃ | M7 | 247 | 102 | G | A | [symbol] | CED80061 |
| X₆₃₃₄ | M7 | 247 | 989 | C | T | [symbol] | CED80061 |
| X₆₃₃₅ | M7 | 247 | 1053 | G | A | [symbol] | CED80061 |
| X₆₃₃₆ | M7 | 247 | 1454 | C | T | [symbol] | CED80061 |
| X₆₃₃₇ | M7 | 4 | 781 | G | A | [symbol] | |
| X₆₃₃₈ | M7 | 7 | 160 | T | C | [symbol] | |
| X₆₃₃₉ | M7 | 8 | 1110 | C | T | [symbol] | |
| X₆₃₄₀ | M7 | 11 | 154 | A | C | [symbol] | |
| X₆₃₄₁ | M7 | 11 | 158 | C | T | [symbol] | |
| X₆₃₄₂ | M7 | 15 | 28 | C | G | [symbol] | |
| X₆₃₄₃ | M7 | 15 | 462 | C | T | [symbol] | |
| X₆₃₄₄ | M7 | 15 | 464 | C | A | [symbol] | |
| X₆₃₄₅ | M7 | 15 | 465 | C | T | [symbol] | |
| X₆₃₄₆ | M7 | 24 | 513 | T | C | [symbol] | CDZ96160 |
| X₆₃₄₇ | M7 | 24 | 520 | C | G | [symbol] | CDZ96160 |
| X₆₃₄₈ | M7 | 24 | 5850 | C | T | [symbol] | CDZ96160 |
| X₆₃₄₉ | M7 | 24 | 168850 | C | T | [symbol] | CDZ96214 |
| X₆₃₅₀ | M7 | 24 | 172698 | G | A | [symbol] | CDZ96215 |
| X₆₃₅₁ | M7 | 24 | 180340 | G | A | [symbol] | CDZ96216 |
| X₆₃₅₂ | M7 | 24 | 197593 | C | T | [symbol] | CDZ96224 |
| X₆₃₅₃ | M7 | 24 | 266697 | G | A | [symbol] | CDZ96242 |
| X₆₃₅₄ | M7 | 24 | 307114 | G | A | [symbol] | CDZ96255 |
| X₆₃₅₅ | M7 | 24 | 340663 | T | C | [symbol] | CDZ96265 |
| X₆₃₅₆ | M7 | 24 | 349340 | C | T | [symbol] | CDZ96270 |
| X₆₃₅₇ | M7 | 24 | 349352 | G | A | [symbol] | CDZ96270 |
| X₆₃₅₈ | M7 | 24 | 363770 | C | T | [symbol] | CDZ96275 |
| X₆₃₅₉ | M7 | 24 | 382911 | C | T | [symbol] | CDZ96282 |
| X₆₃₆₀ | M7 | 24 | 400418 | C | T | [symbol] | CDZ96287 |
| X₆₃₆₁ | M7 | 24 | 420108 | G | A | [symbol] | CDZ96291 |
| X₆₃₆₂ | M7 | 24 | 470687 | G | A | [symbol] | CDZ96308 |
| X₆₃₆₃ | M7 | 24 | 474698 | G | A | [symbol] | CDZ96308 |
| X₆₃₆₄ | M7 | 24 | 476097 | C | T | [symbol] | CDZ96309 |
| X₆₃₆₅ | M7 | 24 | 488439 | G | T | [symbol] | CDZ96315 |
| X₆₃₆₆ | M7 | 24 | 513701 | G | C | [symbol] | CDZ96326 |
| X₆₃₆₇ | M7 | 27 | 445 | C | T | [symbol] | |
| X₆₃₆₈ | M7 | 27 | 1012 | A | C | [symbol] | |
| X₆₃₆₉ | M7 | 27 | 1013 | T | A | [symbol] | |
| X₆₃₇₀ | M7 | 32 | 158 | C | T | [symbol] | CDZ96332 |
| X₆₃₇₁ | M7 | 32 | 215 | C | T | [symbol] | CDZ96332 |
| X₆₃₇₂ | M7 | 32 | 2438 | C | T | [symbol] | CDZ96332 |
| X₆₃₇₃ | M7 | 32 | 2734 | C | T | [symbol] | CDZ96332 |
| X₆₃₇₄ | M7 | 32 | 2821 | C | T | [symbol] | CDZ96332 |
| X₆₃₇₅ | M7 | 32 | 3067 | C | T | [symbol] | CDZ96332 |
| X₆₃₇₆ | M7 | 32 | 3500 | C | T | [symbol] | CDZ96332 |
| X₆₃₇₇ | M7 | 32 | 3562 | G | A | [symbol] | CDZ96332 |
| X₆₃₇₈ | M7 | 33 | 399 | T | A | [symbol] | CED82002 |
| X₆₃₇₉ | M7 | 33 | 20227 | G | A | [symbol] | CED82006 |
| X₆₃₈₀ | M7 | 33 | 24784 | C | T | [symbol] | CED82008 |
| X₆₃₈₁ | M7 | 33 | 45488 | C | T | [symbol] | CED82012 |
| X₆₃₈₂ | M7 | 33 | 79913 | G | A | [symbol] | CED82024 |
| X₆₃₈₃ | M7 | 33 | 105276 | G | A | [symbol] | CED82036 |
| X₆₃₈₄ | M7 | 33 | 109397 | G | A | [symbol] | CED82038 |
| X₆₃₈₅ | M7 | 33 | 129884 | G | A | [symbol] | CED82045 |
| X₆₃₈₆ | M7 | 33 | 165059 | C | T | [symbol] | CED82056 |
| X₆₃₈₇ | M7 | 33 | 192563 | C | T | [symbol] | CED82066 |
| X₆₃₈₈ | M7 | 33 | 215436 | C | T | [symbol] | CED82071 |
| X₆₃₈₉ | M7 | 33 | 223703 | G | A | [symbol] | CED82075 |
| X₆₃₉₀ | M7 | 33 | 257786 | C | T | [symbol] | CED82084 |
| X₆₃₉₁ | M7 | 33 | 260027 | G | A | [symbol] | CED82084 |
| X₆₃₉₂ | M7 | 33 | 274627 | G | A | [symbol] | CED82091 |
| X₆₃₉₃ | M7 | 33 | 283808 | C | T | [symbol] | CED82093 |
| X₆₃₉₄ | M7 | 33 | 317713 | G | A | [symbol] | CED82104 |
| X₆₃₉₅ | M7 | 33 | 327840 | C | T | [symbol] | CED82108 |
| X₆₃₉₆ | M7 | 33 | 341890 | G | A | [symbol] | CED82113 |
| X₆₃₉₇ | M7 | 33 | 374131 | A | G | [symbol] | CED82121- |
| | | | | | | | CED82122 |
| X₆₃₉₈ | M7 | 33 | 374134 | A | G | [symbol] | CED82121- |
| | | | | | | | CED82122 |
| X₆₃₉₉ | M7 | 33 | 374137 | A | T | [symbol] | CED82121- |
| | | | | | | | CED82122 |
| X₆₄₀₀ | M7 | 33 | 374141 | C | T | [symbol] | CED82121- |
| | | | | | | | CED82122 |
| X₆₄₀₁ | M7 | 33 | 374150 | A | C | [symbol] | CED82121- |
| | | | | | | | CED82122 |
| X₆₄₀₂ | M7 | 33 | 375339 | A | G | [symbol] | CED82121- |
| | | | | | | | CED82122 |
| X₆₄₀₃ | M7 | 33 | 375366 | T | C | [symbol] | CED82121- |
| | | | | | | | CED82122 |
| X₆₄₀₄ | M7 | 33 | 382577 | C | T | [symbol] | CED82122 |
| X₆₄₀₅ | M7 | 33 | 382832 | G | T | [symbol] | CED82122 |
| X₆₄₀₆ | M7 | 33 | 385319 | A | C | [symbol] | CED82122 |
| X₆₄₀₇ | M7 | 33 | 385527 | C | T | [symbol] | CED82122 |
| X₆₄₀₈ | M7 | 33 | 386225 | G | A | [symbol] | CED82124 |
| X₆₄₀₉ | M7 | 33 | 388969 | G | T | [symbol] | CED82124 |
| X₆₄₁₀ | M7 | 33 | 432188 | G | A | [symbol] | CED82137 |
| X₆₄₁₁ | M7 | 33 | 448815 | G | A | [symbol] | CED82144 |
| X₆₄₁₂ | M7 | 33 | 453975 | C | T | [symbol] | CED82147 |
| X₆₄₁₃ | M7 | 33 | 455451 | C | T | [symbol] | CED82146 |
| X₆₄₁₄ | M7 | 33 | 481361 | G | A | [symbol] | CED82157 |
| X₆₄₁₅ | M7 | 33 | 505339 | C | T | [symbol] | CED82165 |
| X₆₄₁₆ | M7 | 33 | 509127 | C | T | [symbol] | CED82166 |
| X₆₄₁₇ | M7 | 33 | 626521 | C | T | [symbol] | CED82203 |
| X₆₄₁₈ | M7 | 33 | 690180 | C | T | [symbol] | CED82224 |
| X₆₄₁₉ | M7 | 33 | 693516 | C | T | [symbol] | CED82225 |
| X₆₄₂₀ | M7 | 33 | 699423 | C | T | [symbol] | CED82227 |
| X₆₄₂₁ | M7 | 33 | 704096 | T | A | [symbol] | CED82227 |
| X₆₄₂₂ | M7 | 33 | 704097 | T | C | [symbol] | CED82227 |
| X₆₄₂₃ | M7 | 33 | 715901 | C | T | [symbol] | CED82231 |
| X₆₄₂₄ | M7 | 33 | 729705 | C | T | [symbol] | CED82234 |
| X₆₄₂₅ | M7 | 33 | 794549 | C | T | [symbol] | CED82254 |
| X₆₄₂₆ | M7 | 33 | 800536 | G | A | [symbol] | CED82259 |
| X₆₄₂₇ | M7 | 33 | 822184 | G | A | [symbol] | CED82264 |
| X₆₄₂₈ | M7 | 33 | 829825 | C | T | [symbol] | CED82271 |
| X₆₄₂₉ | M7 | 33 | 917545 | A | G | [symbol] | CED82294 |
| X₆₄₃₀ | M7 | 33 | 917558 | G | A | [symbol] | CED82294 |
| X₆₄₃₁ | M7 | 33 | 928726 | C | T | [symbol] | CED82295 |
| X₆₄₃₂ | M7 | 33 | 933316 | C | T | [symbol] | CED82299 |
| X₆₄₃₃ | M7 | 33 | 936350 | T | A | [symbol] | CED82300 |
| X₆₄₃₄ | M7 | 33 | 936356 | G | A | [symbol] | CED82300 |
| X₆₄₃₅ | M7 | 33 | 936571 | A | G | [symbol] | CED82300 |
| X₆₄₃₆ | M7 | 33 | 936600 | G | A | [symbol] | CED82300 |
| X₆₄₃₇ | M7 | 33 | 938992 | C | T | [symbol] | CED82300 |
| X₆₄₃₈ | M7 | 33 | 971503 | C | T | [symbol] | CED82307 |
| X₆₄₃₉ | M7 | 33 | 995886 | G | A | [symbol] | CED82318 |
| X₆₄₄₀ | M7 | 33 | 1038506 | C | T | [symbol] | CED82330 |
| X₆₄₄₁ | M7 | 33 | 1049699 | G | A | [symbol] | CED82334 |
| X₆₄₄₂ | M7 | 33 | 1088320 | C | T | [symbol] | CED82349 |
| X₆₄₄₃ | M7 | 33 | 1122362 | C | T | [symbol] | CED82358 |
| X₆₄₄₄ | M7 | 33 | 1126814 | G | A | [symbol] | CED82358 |
| X₆₄₄₅ | M7 | 33 | 1138444 | C | T | [symbol] | CED82363 |
| X₆₄₄₆ | M7 | 33 | 1165914 | G | A | [symbol] | CED82372 |
| X₆₄₄₇ | M7 | 33 | 1191727 | C | T | [symbol] | CED82379 |
| X₆₄₄₈ | M7 | 33 | 1291620 | C | T | [symbol] | CED82406 |
| X₆₄₄₉ | M7 | 33 | 1324395 | G | A | [symbol] | CED82417 |
| X₆₄₅₀ | M7 | 33 | 1339376 | C | T | [symbol] | CED82424 |
| X₆₄₅₁ | M7 | 33 | 1367015 | C | T | [symbol] | CED82432 |
| X₆₄₅₂ | M7 | 33 | 1396438 | C | T | [symbol] | CED82442 |
| X₆₄₅₃ | M7 | 33 | 1460436 | C | T | [symbol] | CED82462 |
| X₆₄₅₄ | M7 | 33 | 1467702 | C | T | [symbol] | CED82463 |
| X₆₄₅₅ | M7 | 33 | 1470375 | C | T | [symbol] | CED82465 |
| X₆₄₅₆ | M7 | 33 | 1499347 | G | A | [symbol] | CED82472 |
| X₆₄₅₇ | M7 | 33 | 1502644 | G | A | [symbol] | CED82474 |
| X₆₄₅₈ | M7 | 33 | 1515369 | G | A | [symbol] | CED82478 |
| X₆₄₅₉ | M7 | 33 | 1535434 | A | T | [symbol] | CED82483 |
| X₆₄₆₀ | M7 | 33 | 1538001 | G | A | [symbol] | CED82483 |
| X₆₄₆₁ | M7 | 33 | 1544767 | A | C | [symbol] | CED82485- |
| | | | | | | | CED82486 |
| X₆₄₆₂ | M7 | 33 | 1544951 | C | G | [symbol] | CED82485- |
| | | | | | | | CED82486 |
| X₆₄₆₃ | M7 | 33 | 1585699 | C | T | [symbol] | CED82497 |
| X₆₄₆₄ | M7 | 33 | 1587443 | C | T | [symbol] | CED82497 |
| X₆₄₆₅ | M7 | 33 | 1596242 | C | T | [symbol] | CED82498 |
| X₆₄₆₆ | M7 | 33 | 1628197 | G | A | [symbol] | CED82510 |
| X₆₄₆₇ | M7 | 33 | 1638726 | G | A | [symbol] | CED82513 |
| X₆₄₆₈ | M7 | 33 | 1642659 | G | A | [symbol] | CED82515 |
| X₆₄₆₉ | M7 | 33 | 1666106 | C | T | [symbol] | CED82522 |
| X₆₄₇₀ | M7 | 33 | 1675912 | C | T | [symbol] | CED82525 |
| X₆₄₇₁ | M7 | 33 | 1700000 | G | A | [symbol] | CED82534 |
| X₆₄₇₂ | M7 | 33 | 1714997 | G | A | [symbol] | CED82538 |
| X₆₄₇₃ | M7 | 33 | 1752414 | G | A | [symbol] | CED82547 |
| X₆₄₇₄ | M7 | 33 | 1767636 | C | T | [symbol] | CED82552 |
| X₆₄₇₅ | M7 | 33 | 1780044 | G | A | [symbol] | CED82555 |
| X₆₄₇₆ | M7 | 33 | 1826223 | G | A | [symbol] | CED82573 |
| X₆₄₇₇ | M7 | 33 | 1841263 | G | A | [symbol] | CED82576 |
| X₆₄₇₈ | M7 | 33 | 1860991 | G | A | [symbol] | CED82583 |
| X₆₄₇₉ | M7 | 33 | 1862200 | G | A | [symbol] | CED82582 |
| X₆₄₈₀ | M7 | 33 | 1887401 | C | T | [symbol] | CED82591 |
| X₆₄₈₁ | M7 | 33 | 1938614 | G | A | [symbol] | CED82612 |
| X₆₄₈₂ | M7 | 33 | 1950090 | G | A | [symbol] | CED82614 |
| X₆₄₈₃ | M7 | 33 | 1967112 | C | T | [symbol] | CED82622 |
| X₆₄₈₄ | M7 | 33 | 1975079 | G | A | [symbol] | CED82625 |
| X₆₄₈₅ | M7 | 33 | 2010230 | C | T | [symbol] | CED82636 |
| X₆₄₈₆ | M7 | 33 | 2014235 | C | T | [symbol] | CED82637 |
| X₆₄₈₇ | M7 | 33 | 2033881 | C | T | [symbol] | CED82645 |
| X₆₄₈₈ | M7 | 33 | 2054662 | G | A | [symbol] | CED82654 |
| X₆₄₈₉ | M7 | 36 | 320 | G | A | [symbol] | |
| X₆₄₉₀ | M7 | 36 | 1056 | G | A | [symbol] | |
| X₆₄₉₁ | M7 | 36 | 1295 | C | T | [symbol] | |
| X₆₄₉₂ | M7 | 36 | 1461 | A | T | [symbol] | |
| X₆₄₉₃ | M7 | 42 | 804 | C | T | [symbol] | CDZ96333 |
| X₆₄₉₄ | M7 | 42 | 1559 | G | A | [symbol] | CDZ96333 |
| X₆₄₉₅ | M7 | 49 | 400 | C | T | [symbol] | |
| X₆₄₉₆ | M7 | 50 | 145 | G | A | [symbol] | |
| X₆₄₉₇ | M7 | 52 | 3042 | A | G | [symbol] | CED82664 |
| X₆₄₉₈ | M7 | 52 | 63859 | C | T | [symbol] | CED82686 |
| X₆₄₉₉ | M7 | 52 | 144382 | C | T | [symbol] | CED82709 |
| X₆₅₀₀ | M7 | 52 | 145060 | G | A | [symbol] | CED82708 |
| X₆₅₀₁ | M7 | 52 | 151974 | C | T | [symbol] | CED82712 |
| X₆₅₀₂ | M7 | 52 | 183986 | C | T | [symbol] | CED82722 |
| X₆₅₀₃ | M7 | 52 | 187553 | C | T | [symbol] | CED82724 |
| X₆₅₀₄ | M7 | 52 | 203253 | A | G | [symbol] | CED82730 |
| X₆₅₀₅ | M7 | 52 | 207354 | C | T | [symbol] | CED82730 |
| X₆₅₀₆ | M7 | 52 | 239820 | A | T | [symbol] | CED82734 |
| X₆₅₀₇ | M7 | 52 | 239821 | A | G | [symbol] | CED82734 |
| X₆₅₀₈ | M7 | 52 | 239825 | T | C | [symbol] | CED82734 |
| X₆₅₀₉ | M7 | 52 | 239827 | A | G | [symbol] | CED82734 |
| X₆₅₁₀ | M7 | 52 | 240075 | G | C | [symbol] | CED82734 |
| X₆₅₁₁ | M7 | 52 | 240241 | T | C | [symbol] | CED82734 |
| X₆₅₁₂ | M7 | 52 | 240245 | A | C | [symbol] | CED82734 |
| X₆₅₁₃ | M7 | 52 | 244305 | G | A | [symbol] | CED82734 |
| X₆₅₁₄ | M7 | 52 | 268499 | G | A | [symbol] | CED82740 |
| X₆₅₁₅ | M7 | 52 | 284733 | G | A | [symbol] | CED82747 |
| X₆₅₁₆ | M7 | 52 | 346628 | G | A | [symbol] | CED82769 |
| X₆₅₁₇ | M7 | 52 | 390095 | G | A | [symbol] | CED82784 |
| X₆₅₁₈ | M7 | 52 | 390988 | C | T | [symbol] | CED82785 |
| X₆₅₁₉ | M7 | 52 | 395374 | G | A | [symbol] | CED82786 |
| X₆₅₂₀ | M7 | 52 | 398723 | C | T | [symbol] | CED82786 |
| X₆₅₂₁ | M7 | 52 | 398728 | C | T | [symbol] | CED82786 |
| X₆₅₂₂ | M7 | 52 | 487472 | C | T | [symbol] | CED82814 |
| X₆₅₂₃ | M7 | 52 | 516267 | C | T | [symbol] | CED82823 |
| X₆₅₂₄ | M7 | 52 | 532992 | G | A | [symbol] | CED82831 |
| X₆₅₂₅ | M7 | 52 | 548788 | G | A | [symbol] | CED82835 |
| X₆₅₂₆ | M7 | 52 | 552099 | G | A | [symbol] | CED82837 |
| X₆₅₂₇ | M7 | 52 | 552173 | G | A | [symbol] | CED82837 |
| X₆₅₂₈ | M7 | 52 | 595806 | C | T | [symbol] | CED82851 |
| X₆₅₂₉ | M7 | 52 | 631479 | C | T | [symbol] | CED82860 |
| X₆₅₃₀ | M7 | 52 | 638622 | G | A | [symbol] | CED82862 |
| X₆₅₃₁ | M7 | 52 | 679670 | G | A | [symbol] | CED82877 |
| X₆₅₃₂ | MZ | 52 | 737419 | G | A | [symbol] | CED82903 |
| X₆₅₃₃ | M7 | 52 | 817452 | T | A | [symbol] | CED82928 |
| X₆₅₃₄ | M7 | 52 | 840755 | C | T | [symbol] | CED82935 |
| X₆₅₃₅ | M7 | 52 | 849671 | G | A | [symbol] | CED82940 |
| X₆₅₃₆ | M7 | 52 | 868578 | C | T | [symbol] | CED82948 |
| X₆₅₃₇ | M7 | 52 | 870083 | G | A | [symbol] | CED82949 |
| X₆₅₃₈ | M7 | 52 | 938650 | G | A | [symbol] | CED82973 |
| X₆₅₃₉ | M7 | 52 | 967316 | A | T | [symbol] | CED82984 |
| X₆₅₄₀ | M7 | 52 | 967701 | T | A | [symbol] | CED82983 |
| X₆₅₄₁ | M7 | 52 | 1003899 | G | A | [symbol] | CED83001 |
| X₆₅₄₂ | M7 | 52 | 1004724 | G | A | [symbol] | CED83001 |
| X₆₅₄₃ | M7 | 52 | 1010006 | C | T | [symbol] | CED83002 |
| X₆₅₄₄ | M7 | 52 | 1029498 | G | A | [symbol] | CED83007 |
| X₆₅₄₅ | M7 | 52 | 1043011 | C | T | [symbol] | CED83012 |
| X₆₅₄₆ | M7 | 52 | 1067895 | C | T | [symbol] | CED83020 |
| X₆₅₄₇ | M7 | 52 | 1151398 | G | A | [symbol] | CED83046 |
| X₆₅₄₈ | M7 | 52 | 1158103 | C | T | [symbol] | CED83051 |
| X₆₅₄₉ | M7 | 52 | 1219894 | C | T | [symbol] | CED83071 |
| X₆₅₅₀ | M7 | 52 | 1227910 | G | A | [symbol] | CED83074 |
| X₆₅₅₁ | M7 | 52 | 1240590 | A | T | [symbol] | CED83078 |
| X₆₅₅₂ | M7 | 52 | 1292343 | G | A | [symbol] | CED83098 |
| X₆₅₅₃ | M7 | 52 | 1328337 | T | A | [symbol] | CED83112 |
| X₆₅₅₄ | M7 | 52 | 1363357 | G | A | [symbol] | CED83122 |
| X₆₅₅₅ | M7 | 52 | 1363405 | C | T | [symbol] | CED83123 |
| X₆₅₅₆ | M7 | 52 | 1373998 | C | T | [symbol] | CED83125 |
| X₆₅₅₇ | M7 | 52 | 1381652 | C | T | [symbol] | CED83129 |
| X₆₅₅₈ | M7 | 52 | 1389320 | G | A | [symbol] | CED83130 |
| X₆₅₅₉ | M7 | 52 | 1392238 | C | T | [symbol] | CED83130 |
| X₆₅₆₀ | M7 | 52 | 1399439 | G | A | [symbol] | CED83134 |
| X₆₅₆₁ | M7 | 52 | 1474315 | G | A | [symbol] | CED83164 |
| X₆₅₆₂ | M7 | 52 | 1475408 | C | T | [symbol] | CED83166 |
| X₆₅₆₃ | M7 | 52 | 1481345 | G | A | [symbol] | CED83165 |
| X₆₅₆₄ | M7 | 52 | 1509004 | G | A | [symbol] | CED83177 |
| X₆₅₆₅ | M7 | 52 | 1520883 | C | T | [symbol] | CED83179 |
| X₆₅₆₆ | M7 | 52 | 1526796 | G | A | [symbol] | CED83181 |
| X₆₅₆₇ | M7 | 52 | 1562633 | C | T | [symbol] | CED83195 |
| X₆₅₆₈ | M7 | 52 | 1583655 | C | T | [symbol] | CED83206 |
| X₆₅₆₉ | M7 | 52 | 1639254 | C | T | [symbol] | CED83227 |
| X₆₅₇₀ | M7 | 52 | 1650115 | C | T | [symbol] | CED83229 |
| X₆₅₇₁ | M7 | 52 | 1662924 | G | A | [symbol] | CED83236 |
| X₆₅₇₂ | M7 | 52 | 1708900 | A | G | [symbol] | CED83249 |
| X₆₅₇₃ | M7 | 52 | 1716210 | C | T | [symbol] | CED83250 |
| X₆₅₇₄ | M7 | 52 | 1793370 | G | A | [symbol] | CED83275 |
| X₆₅₇₅ | M7 | 52 | 1807309 | G | A | [symbol] | CED83283 |
| X₆₅₇₆ | M7 | 52 | 1826635 | G | A | [symbol] | CED83289 |
| X₆₅₇₇ | M7 | 52 | 1864608 | G | A | [symbol] | CED83303 |
| X₆₅₇₈ | M7 | 52 | 1871310 | C | T | [symbol] | CED83304 |
| X₆₅₇₉ | M7 | 52 | 1874150 | G | T | [symbol] | CED83305 |
| X₆₅₈₀ | M7 | 52 | 1874531 | C | T | [symbol] | CED83306 |
| X₆₅₈₁ | M7 | 52 | 1888989 | C | T | [symbol] | CED83312 |
| X₆₅₈₂ | M7 | 52 | 1893352 | G | A | [symbol] | CED83313 |
| X₆₅₈₃ | M7 | 52 | 1915927 | G | A | [symbol] | CED83315 |
| X₆₅₈₄ | M7 | 52 | 1938393 | C | T | [symbol] | CED83322 |
| X₆₅₈₅ | M7 | 52 | 1968215 | A | G | [symbol] | CED83335 |
| X₆₅₈₆ | M7 | 52 | 1969873 | C | T | [symbol] | CED83333 |
| X₆₅₈₇ | M7 | 52 | 1987096 | G | A | [symbol] | CED83341 |
| X₆₅₈₈ | M7 | 52 | 1995167 | G | A | [symbol] | CED83342 |
| X₆₅₈₉ | M7 | 52 | 2041781 | C | T | [symbol] | CED83355 |
| X₆₅₉₀ | M7 | 52 | 2050245 | G | A | [symbol] | CED83359 |
| X₆₅₉₁ | M7 | 52 | 2081390 | G | A | [symbol] | CED83367 |
| X₆₅₉₂ | M7 | 52 | 2093148 | C | T | [symbol] | CED83368 |
| X₆₅₉₃ | M7 | 52 | 2120665 | C | T | [symbol] | CED83376 |
| X₆₅₉₄ | M7 | 52 | 2136885 | A | G | [symbol] | CED83382 |
| X₆₅₉₅ | M7 | 52 | 2162878 | G | A | [symbol] | CED83392 |
| X₆₅₉₆ | M7 | 52 | 2171271 | C | T | [symbol] | CED83395 |
| X₆₅₉₇ | M7 | 52 | 2258192 | C | T | [symbol] | CED83422 |
| X₆₅₉₈ | M7 | 52 | 2265219 | C | T | [symbol] | CED83425 |
| X₆₅₉₉ | M7 | 52 | 2266378 | C | T | [symbol] | CED83423 |
| X₆₆₀₀ | M7 | 52 | 2308421 | T | C | [symbol] | CED83439 |
| X₆₆₀₁ | M7 | 52 | 2327266 | C | T | [symbol] | CED83445 |
| X₆₆₀₂ | M7 | 52 | 2338728 | G | A | [symbol] | CED83451 |
| X₆₆₀₃ | M7 | 52 | 2367582 | G | A | [symbol] | CED83455 |
| X₆₆₀₄ | M7 | 52 | 2373120 | C | T | [symbol] | CED83456 |
| X₆₆₀₅ | M7 | 52 | 2373426 | G | A | [symbol] | CED83456 |
| X₆₆₀₆ | M7 | 52 | 2373448 | C | T | [symbol] | CED83456 |
| X₆₆₀₇ | M7 | 52 | 2400778 | C | T | [symbol] | CED83463 |
| X₆₆₀₈ | M7 | 52 | 2531584 | C | T | [symbol] | 1CED83507 |
| X₆₆₀₉ | M7 | 52 | 2543220 | C | T | [symbol] | CED83509 |
| X₆₆₁₀ | M7 | 52 | 2574904 | G | T | [symbol] | CED83525 |
| X₆₆₁₁ | M7 | 52 | 2575090 | A | G | [symbol] | CED83525 |
| X₆₆₁₂ | M7 | 53 | 26291 | G | A | [symbol] | CDZ96348 |
| X₆₆₁₃ | M7 | 53 | 69664 | C | T | [symbol] | CDZ96363 |
| X₆₆₁₄ | M7 | 53 | 89575 | C | T | [symbol] | CDZ96369 |
| X₆₆₁₅ | M7 | 53 | 104248 | G | A | [symbol] | CDZ96376 |
| X₆₆₁₆ | M7 | 53 | 110192 | C | T | [symbol] | CDZ96376 |
| X₆₆₁₇ | M7 | 54 | 4815 | G | A | [symbol] | CDZ96384 |
| X₆₆₁₈ | M7 | 54 | 4816 | A | T | [symbol] | CDZ96384 |
| X₆₆₁₉ | M7 | 54 | 4817 | G | C | [symbol] | CDZ96384 |
| X₆₆₂₀ | M7 | 54 | 4821 | G | A | [symbol] | CDZ96384 |
| X₆₆₂₁ | M7 | 54 | 16963 | C | T | [symbol] | CDZ96386 |
| X₆₆₂₂ | M7 | 54 | 30229 | T | C | [symbol] | CDZ96390 |
| X₆₆₂₃ | M7 | 54 | 31207 | G | A | [symbol] | CDZ96392 |
| X₆₆₂₄ | M7 | 54 | 87947 | G | A | [symbol] | CDZ96410 |
| X₆₆₂₅ | M7 | 54 | 95921 | C | T | [symbol] | CDZ96413 |
| X₆₆₂₆ | M7 | 54 | 106086 | G | A | [symbol] | CDZ96416 |
| X₆₆₂₇ | M7 | 54 | 119439 | C | T | [symbol] | CDZ96420 |
| X₆₆₂₈ | M7 | 54 | 119791 | C | T | [symbol] | CDZ96419 |
| X₆₆₂₉ | M7 | 54 | 167759 | A | T | [symbol] | CDZ96438 |
| X₆₆₃₀ | M7 | 54 | 194230 | G | A | [symbol] | CDZ96446 |
| X₆₆₃₁ | M7 | 54 | 195804 | G | A | [symbol] | CDZ96447 |
| X₆₆₃₂ | M7 | 54 | 202467 | C | T | [symbol] | CDZ96448 |
| X₆₆₃₃ | M7 | 54 | 206494 | G | A | [symbol] | CDZ96450 |
| X₆₆₃₄ | M7 | 54 | 207267 | G | A | [symbol] | CDZ96450 |
| X₆₆₃₅ | M7 | 54 | 274617 | A | T | [symbol] | CDZ96471 |
| X₆₆₃₆ | M7 | 54 | 278479 | C | T | [symbol] | CDZ96474 |
| X₆₆₃₇ | M7 | 54 | 316790 | T | G | [symbol] | CDZ96487 |
| X₆₆₃₈ | M7 | 54 | 337228 | G | A | [symbol] | CDZ96488 |
| X₆₆₃₉ | M7 | 54 | 357149 | G | A | [symbol] | CDZ96496 |
| X₆₆₄₀ | M7 | 54 | 370320 | G | A | [symbol] | CDZ96499 |
| X₆₆₄₁ | M7 | 54 | 383172 | C | T | [symbol] | CDZ96506 |
| X₆₆₄₂ | M7 | 54 | 391223 | A | G | [symbol] | CDZ96509 |
| X₆₆₄₃ | M7 | 54 | 404968 | C | T | [symbol] | CDZ96513 |
| X₆₆₄₄ | M7 | 54 | 427542 | C | T | [symbol] | CDZ96520 |
| X₆₆₄₅ | M7 | 54 | 431404 | C | T | [symbol] | CDZ96520 |
| X₆₆₄₆ | M7 | 54 | 431851 | C | T | [symbol] | CDZ96520 |
| X₆₆₄₇ | M7 | 54 | 477453 | C | T | [symbol] | CDZ96537 |
| X₆₆₄₈ | M7 | 54 | 478527 | C | T | [symbol] | CDZ96537 |
| X₆₆₄₉ | M7 | 54 | 509857 | G | A | [symbol] | CDZ96544 |
| X₆₆₅₀ | M7 | 54 | 515478 | A | G | [symbol] | CDZ96546 |
| X₆₆₅₁ | M7 | 54 | 555986 | G | A | [symbol] | CDZ96563 |
| X₆₆₅₂ | M7 | 54 | 616268 | A | G | [symbol] | CDZ96581 |
| X₆₆₅₃ | M7 | 54 | 648472 | G | A | [symbol] | CDZ96590 |
| X₆₆₅₄ | M7 | 54 | 686223 | C | T | [symbol] | CDZ96602 |
| X₆₆₅₅ | M7 | 54 | 699570 | G | A | [symbol] | CDZ96609 |
| X₆₆₅₆ | M7 | 54 | 733193 | T | C | [symbol] | CDZ96619 |
| X₆₆₅₇ | M7 | 54 | 743396 | G | A | [symbol] | CDZ96621 |
| X₆₆₅₈ | M7 | 58 | 93 | T | C | [symbol] | |
| X₆₆₅₉ | M7 | 64 | 5037 | G | A | [symbol] | CDZ96626 |
| X₆₆₆₀ | M7 | 67 | 111 | G | A | [symbol] | |
| X₆₆₆₁ | M7 | 69 | 29006 | G | A | [symbol] | CED83534 |
| X₆₆₆₂ | M7 | 69 | 50642 | C | T | [symbol] | CED83543 |
| X₆₆₆₃ | M7 | 69 | 55826 | G | A | [symbol] | CED83545 |
| X₆₆₆₄ | M7 | 69 | 82710 | G | A | [symbol] | CED83554 |
| X₆₆₆₅ | M7 | 69 | 84820 | G | A | [symbol] | CED83555 |
| X₆₆₆₆ | M7 | 69 | 107920 | C | T | [symbol] | CED83561 |
| X₆₆₆₇ | M7 | 69 | 123084 | C | T | [symbol] | CED83563 |
| X₆₆₆₈ | M7 | 69 | 148757 | C | T | [symbol] | CED83575 |
| X₆₆₆₉ | M7 | 69 | 201005 | G | A | [symbol] | CED83595 |
| X₆₆₇₀ | M7 | 69 | 228938 | C | T | [symbol] | CED83603 |
| X₆₆₇₁ | M7 | 69 | 305997 | C | T | [symbol] | CED83631 |
| X₆₆₇₂ | M7 | 69 | 314003 | C | T | [symbol] | CED83634 |
| X₆₆₇₃ | M7 | 69 | 384418 | G | A | [symbol] | CED83656 |
| X₆₆₇₄ | M7 | 69 | 386371 | C | T | [symbol] | CED83657 |
| X₆₆₇₅ | M7 | 69 | 415659 | C | T | [symbol] | CED83665 |
| X₆₆₇₆ | M7 | 69 | 455639 | G | A | [symbol] | CED83677 |
| X₆₆₇₇ | M7 | 69 | 461021 | C | T | [symbol] | CED83680 |
| X₆₆₇₈ | M7 | 69 | 461986 | G | A | [symbol] | CED83680 |
| X₆₆₇₉ | M7 | 69 | 467686 | C | T | [symbol] | CED83681 |
| X₆₆₈₀ | M7 | 69 | 473113 | G | A | [symbol] | CED83684 |
| X₆₆₈₁ | M7 | 69 | 534495 | C | T | [symbol] | CED83704 |
| X₆₆₈₂ | M7 | 69 | 560348 | G | A | [symbol] | CED83713 |
| X₆₆₈₈ | M7 | 69 | 585845 | G | A | [symbol] | CED83722 |
| X₆₆₈₄ | M7 | 69 | 627928 | C | T | [symbol] | CED83740 |
| X₆₆₈₅ | M7 | 69 | 631511 | G | A | [symbol] | CED83742 |
| X₆₆₈₆ | M7 | 69 | 637299 | T | C | [symbol] | CED83744 |
| X₆₆₈₇ | M7 | 69 | 675579 | G | A | [symbol] | CED83760 |
| X₆₆₈₈ | M7 | 69 | 676581 | G | A | [symbol] | CED83760 |
| X₆₆₈₉ | M7 | 69 | 676853 | G | A | [symbol] | CED83759 |
| X₆₆₉₀ | M7 | 69 | 678406 | C | T | [symbol] | CED83759 |
| X₆₆₉₁ | M7 | 69 | 707651 | G | A | [symbol] | CED83771 |
| X₆₆₉₂ | M7 | 69 | 743019 | C | T | [symbol] | CED83782 |
| X₆₆₉₃ | M7 | 69 | 744021 | C | T | [symbol] | CED83780 |
| X₆₆₉₄ | M7 | 69 | 828676 | C | T | [symbol] | CED83805 |
| X₆₆₉₅ | M7 | 69 | 840268 | C | T | [symbol] | CED83808 |
| X₆₆₉₆ | M7 | 69 | 843668 | G | A | [symbol] | CED83809 |
| X₆₆₉₇ | M7 | 69 | 853384 | C | T | [symbol] | CED83809 |
| X₆₆₉₈ | M7 | 69 | 865820 | C | T | [symbol] | CED83814 |
| X₆₆₉₉ | M7 | 69 | 869706 | G | A | [symbol] | CED83815 |
| X₆₇₀₀ | M7 | 69 | 892199 | G | A | [symbol] | CED83822 |
| X₆₇₀₁ | M7 | 69 | 894462 | C | T | [symbol] | CED83821 |
| X₆₇₀₂ | M7 | 69 | 930700 | C | T | [symbol] | CED83835 |
| X₆₇₀₃ | M7 | 69 | 931399 | T | A | [symbol] | CED83835 |
| X₆₇₀₄ | M7 | 69 | 971219 | C | T | [symbol] | CED83847 |
| X₆₇₀₅ | M7 | 69 | 988364 | G | A | [symbol] | CED83857 |
| X₆₇₀₆ | M7 | 69 | 989781 | G | A | [symbol] | CED83858 |
| X₆₇₀₇ | M7 | 69 | 994927 | C | T | [symbol] | CED83859 |
| X₆₇₀₈ | M7 | 69 | 1017805 | G | A | [symbol] | CED83865 |
| X₆₇₀₉ | M7 | 69 | 1021695 | G | A | [symbol] | CED83868 |
| X₆₇₁₀ | M7 | 69 | 1042212 | G | A | [symbol] | CED83875 |
| X₆₇₁₁ | M7 | 69 | 1072756 | G | A | [symbol] | CED83886 |
| X₆₇₁₂ | M7 | 69 | 1080578 | G | A | [symbol] | CED83890 |
| X₆₇₁₃ | M7 | 69 | 1084824 | G | A | [symbol] | CED83891 |
| X₆₇₁₄ | M7 | 69 | 1084835 | C | T | [symbol] | CED83891 |
| X₆₇₁₅ | M7 | 69 | 1084848 | A | G | [symbol] | CED83891 |
| X₆₇₁₆ | M7 | 69 | 1084866 | A | G | [symbol] | CED83891 |
| X₆₇₁₇ | M7 | 69 | 1084931 | C | T | [symbol] | CED83891 |
| X₆₇₁₈ | M7 | 69 | 1102164 | C | T | [symbol] | CED83897 |
| X₆₇₁₉ | M7 | 69 | 1109785 | C | T | [symbol] | CED83899 |
| X₆₇₂₀ | M7 | 69 | 1109813 | A | G | [symbol] | CED83899 |
| X₆₇₂₁ | M7 | 69 | 1109818 | A | G | [symbol] | CED83899 |
| X₆₇₂₂ | M7 | 69 | 1109819 | T | A | [symbol] | CED83899 |
| X₆₇₂₃ | M7 | 69 | 1109823 | T | C | [symbol] | CED83899 |
| X₆₇₂₄ | M7 | 69 | 1109830 | A | G | [symbol] | CED83899 |
| X₆₇₂₅ | M7 | 69 | 1109831 | C | A | [symbol] | CED83899 |
| X₆₇₂₆ | M7 | 69 | 1109835 | A | G | [symbol] | CED83899 |
| X₆₇₂₇ | M7 | 69 | 1110547 | A | G | [symbol] | CED83899 |
| X₆₇₂₈ | M7 | 69 | 1110548 | T | C | [symbol] | CED83899 |
| X₆₇₂₉ | M7 | 69 | 1115486 | C | T | [symbol] | CED83902 |
| X₆₇₃₀ | M7 | 69 | 1152012 | G | A | [symbol] | CED83915 |
| X₆₇₃₁ | M7 | 69 | 1199155 | C | T | [symbol] | CED83929 |
| X₆₇₃₂ | M7 | 69 | 1205454 | C | T | [symbol] | CED83932 |
| X₆₇₃₃ | M7 | 69 | 1212727 | G | A | [symbol] | CED83933 |
| X₆₇₃₄ | M7 | 69 | 1218409 | G | A | [symbol] | CED83936 |
| X₆₇₃₅ | M7 | 69 | 1237631 | T | C | [symbol] | CED83942 |
| X₆₇₃₆ | M7 | 69 | 1260087 | G | A | [symbol] | CED83949 |
| X₆₇₃₇ | M7 | 69 | 1279557 | G | A | [symbol] | CED83959 |
| X₆₇₃₈ | M7 | 69 | 1285126 | A | G | [symbol] | CED83961 |
| X₆₇₃₉ | M7 | 69 | 1342909 | G | A | [symbol] | CED83975 |
| X₆₇₄₀ | M7 | 69 | 1372486 | C | T | [symbol] | CED83987 |
| X₆₇₄₁ | M7 | 69 | 1400546 | G | A | [symbol] | CED83995 |
| X₆₇₄₂ | M7 | 69 | 1411237 | C | T | [symbol] | CED84001 |
| X₆₇₄₃ | M7 | 69 | 1411421 | C | T | [symbol] | CED83999 |
| X₆₇₄₄ | M7 | 69 | 1423154 | G | A | [symbol] | CED84004 |
| X₆₇₄₅ | M7 | 69 | 1519151 | C | T | [symbol] | CED84034 |
| X₆₇₄₆ | M7 | 69 | 1521875 | C | T | [symbol] | CED84035 |
| X₆₇₄₇ | M7 | 69 | 1526612 | T | C | [symbol] | CED84036 |
| X₆₇₄₈ | M7 | 69 | 1530586 | C | T | [symbol] | CED84038 |
| X₆₇₄₉ | M7 | 69 | 1590302 | G | A | [symbol] | CED84059 |
| X₆₇₅₀ | M7 | 69 | 1642484 | C | T | [symbol] | CED84076 |
| X₆₇₅₁ | M7 | 69 | 1652288 | C | T | [symbol] | CED84077 |
| X₆₇₅₂ | M7 | 69 | 1674261 | C | T | [symbol] | CED84084 |
| X₆₇₅₃ | M7 | 69 | 1688555 | C | T | [symbol] | CED84088 |
| X₆₇₅₄ | M7 | 69 | 1714728 | G | A | [symbol] | CED84097 |
| X₆₇₅₅ | M7 | 69 | 1720116 | G | A | [symbol] | CED84102 |
| X₆₇₅₆ | M7 | 69 | 1771849 | C | T | [symbol] | CED84116 |
| X₆₇₅₇ | M7 | 69 | 1788929 | G | A | [symbol] | CED84124 |
| X₆₇₅₈ | M7 | 69 | 1790823 | C | T | [symbol] | CED84125 |
| X₆₇₅₉ | M7 | 69 | 1792597 | C | T | [symbol] | CED84126 |
| X₆₇₆₀ | M7 | 69 | 1800584 | G | A | [symbol] | CED84129 |
| X₆₇₆₁ | M7 | 69 | 1854739 | G | A | [symbol] | CED84145 |
| X₆₇₆₂ | M7 | 69 | 1878663 | C | T | [symbol] | CED84154 |
| X₆₇₆₃ | M7 | 69 | 1924621 | C | T | [symbol] | CED84172 |
| X₆₇₆₄ | M7 | 69 | 1957485 | C | T | [symbol] | CED84187 |
| X₆₇₆₅ | M7 | 69 | 1967529 | C | T | [symbol] | CED84189 |
| X₆₇₆₆ | M7 | 69 | 1968848 | A | G | [symbol] | CED84189 |
| X₆₇₆₇ | M7 | 69 | 1975946 | G | A | [symbol] | CED84193 |
| X₆₇₆₈ | M7 | 69 | 2001469 | C | T | [symbol] | CED84197 |
| X₆₇₆₉ | M7 | 69 | 2048332 | C | T | [symbol] | CED84217 |
| X₆₇₇₀ | M7 | 69 | 2075336 | C | T | [symbol] | CED84226 |
| X₆₇₇₁ | M7 | 69 | 2099418 | C | T | [symbol] | CED84233 |
| X₆₇₇₂ | M7 | 69 | 2113590 | G | A | [symbol] | CED84237 |
| X₆₇₇₃ | M7 | 69 | 2127656 | T | A | [symbol] | CED84242 |
| X₆₇₇₄ | M7 | 69 | 2160207 | C | T | [symbol] | CED84255 |
| X₆₇₇₅ | M7 | 69 | 2180564 | C | T | [symbol] | CED84264 |
| X₆₇₇₆ | M7 | 69 | 2226317 | C | T | [symbol] | CED84272 |
| X₆₇₇₇ | M7 | 69 | 2231926 | G | A | [symbol] | CED84274 |
| X₆₇₇₈ | M7 | 69 | 2240834 | C | T | [symbol] | CED84277 |
| X₆₇₇₉ | M7 | 69 | 2255001 | G | A | [symbol] | CED84282 |
| X₆₇₈₀ | M7 | 69 | 2283903 | G | A | [symbol] | CED84293 |
| X₆₇₈₁ | M7 | 69 | 2325544 | C | T | [symbol] | CED84307 |
| X₆₇₈₂ | M7 | 69 | 2438727 | C | T | [symbol] | CED84343 |
| X₆₇₈₃ | M7 | 69 | 2448630 | C | T | [symbol] | CED84344 |
| X₆₇₈₄ | M7 | 69 | 2481008 | G | A | [symbol] | CED84352 |
| X₆₇₈₅ | M7 | 69 | 2483433 | G | A | [symbol] | CED84352 |
| X₆₇₈₆ | M7 | 72 | 93 | T | C | [symbol] | |
| X₆₇₈₇ | M7 | 72 | 584 | G | A | [symbol] | |
| X₆₇₈₈ | M7 | 72 | 856 | C | T | [symbol] | |
| X₆₇₈₉ | M7 | 72 | 1163 | C | T | [symbol] | |
| X₆₇₉₀ | M7 | 77 | 18912 | A | G | [symbol] | CDZ96635 |
| X₆₇₉₁ | M7 | 77 | 26888 | G | A | [symbol] | CDZ96641 |
| X₆₇₉₂ | M7 | 77 | 34978 | G | T | [symbol] | CDZ96642 |
| X₆₇₉₃ | M7 | 77 | 39842 | G | A | [symbol] | CDZ96646 |
| X₆₇₉₄ | M7 | 77 | 84022 | G | A | [symbol] | CDZ96659 |
| X₆₇₉₅ | M7 | 77 | 105644 | G | A | [symbol] | CDZ96669 |
| X₆₇₉₆ | M7 | 78 | 6333 | G | A | [symbol] | CED84360 |
| X₆₇₉₇ | M7 | 78 | 26915 | C | T | [symbol] | CED84366 |
| X₆₇₉₈ | M7 | 78 | 35200 | G | A | [symbol] | CED84371 |
| X₆₇₉₉ | M7 | 78 | 66886 | G | A | [symbol] | CED84381 |
| X₆₈₀₀ | M7 | 78 | 158534 | G | A | [symbol] | CED84406 |
| X₆₈₀₁ | M7 | 78 | 238854 | C | T | [symbol] | CED84430 |
| X₆₈₀₂ | M7 | 78 | 263896 | T | C | [symbol] | CED84438 |
| X₆₈₀₃ | M7 | 78 | 281454 | C | A | [symbol] | CED84441 |
| X₆₈₀₄ | M7 | 78 | 292068 | C | T | [symbol] | CED84442 |
| X₆₈₀₅ | M7 | 78 | 298141 | C | G | [symbol] | CED84443 |
| X₆₈₀₆ | M7 | 78 | 299166 | G | A | [symbol] | CED84443 |
| X₆₈₀₇ | M7 | 78 | 299644 | G | A | [symbol] | CED84443 |
| X₆₈₀₈ | M7 | 78 | 302700 | A | G | [symbol] | CED84443 |
| X₆₈₀₉ | M7 | 78 | 302816 | T | C | [symbol] | CED84443 |
| X₆₈₁₀ | M7 | 78 | 304799 | A | C | [symbol] | CED84444 |
| X₆₈₁₁ | M7 | 78 | 333312 | A | G | [symbol] | CED84452 |
| X₆₈₁₂ | M7 | 78 | 386356 | C | T | [symbol] | CED84472 |
| X₆₈₁₃ | M7 | 78 | 444292 | C | T | [symbol] | CED84490 |
| X₆₈₁₄ | M7 | 78 | 480244 | C | T | [symbol] | CED84502 |
| X₆₈₁₅ | M7 | 78 | 492399 | C | T | [symbol] | CED84504 |
| X₆₈₁₆ | M7 | 78 | 626958 | C | A | [symbol] | CED84549 |
| X₆₈₁₇ | M7 | 78 | 658932 | G | A | [symbol] | CED84561 |
| X₆₈₁₈ | M7 | 78 | 666005 | C | T | [symbol] | CED84562 |
| X₆₈₁₉ | M7 | 78 | 710966 | G | A | [symbol] | CED84581 |
| X₆₈₂₀ | M7 | 78 | 715700 | G | A | [symbol] | CED84582 |
| X₆₈₂₁ | M7 | 78 | 718885 | C | T | [symbol] | CED84584 |
| X₆₈₂₂ | M7 | 78 | 763771 | G | A | [symbol] | CED84600 |
| X₆₈₂₃ | M7 | 78 | 774252 | G | A | [symbol] | CED84602 |
| X₆₈₂₄ | M7 | 78 | 853752 | G | A | [symbol] | CED84625 |
| X₆₈₂₅ | M7 | 78 | 895505 | C | T | [symbol] | CED84642 |
| X₆₈₂₆ | M7 | 78 | 928773 | C | T | [symbol] | CED84653 |
| X₆₈₂₇ | M7 | 78 | 939705 | G | A | [symbol] | CED84658 |
| X₆₈₂₈ | M7 | 78 | 952815 | G | A | [symbol] | CED84662 |
| X₆₈₂₉ | M7 | 78 | 952860 | G | A | [symbol] | CED84662 |
| X₆₈₃₀ | M7 | 78 | 976680 | C | T | [symbol] | CED84672 |
| X₆₈₃₁ | M7 | 78 | 976799 | C | T | [symbol] | CED84672 |
| X₆₈₃₂ | M7 | 78 | 1023381 | G | A | [symbol] | CED84688 |
| X₆₈₃₃ | M7 | 78 | 1029603 | A | T | [symbol] | CED84689 |
| X₆₈₃₄ | M7 | 78 | 1039555 | C | T | [symbol] | CED84695 |
| X₆₈₃₅ | M7 | 78 | 1077392 | T | C | [symbol] | CED84708 |
| X₆₈₃₆ | M7 | 78 | 1086537 | C | T | [symbol] | CED84713 |
| X₆₈₃₇ | M7 | 78 | 1111002 | G | A | [symbol] | CED84721 |
| X₆₈₃₈ | M7 | 78 | 1115511 | G | A | [symbol] | CED84723 |
| X₆₈₃₉ | M7 | 78 | 1199558 | G | A | [symbol] | CED84746 |
| X₆₈₄₀ | M7 | 78 | 1216573 | C | T | [symbol] | CED84752 |
| X₆₈₄₁ | M7 | 78 | 1289816 | C | T | [symbol] | CED84778 |
| X₆₈₄₂ | M7 | 78 | 1302286 | C | T | [symbol] | CED84782 |
| X₆₈₄₃ | M7 | 78 | 1315648 | C | T | [symbol] | CED84788 |
| X₆₈₄₄ | M7 | 78 | 1317124 | G | A | [symbol] | CED84787 |
| X₆₈₄₅ | M7 | 78 | 1320778 | G | A | [symbol] | CED84790 |
| X₆₈₄₆ | M7 | 78 | 1344640 | C | T | [symbol] | CED84795 |
| X₆₈₄₇ | M7 | 78 | 1426722 | C | T | [symbol] | CED84829 |
| X₆₈₄₈ | M7 | 78 | 1493542 | C | T | [symbol] | CED84851 |
| X₆₈₄₉ | M7 | 78 | 1532973 | G | A | [symbol] | CED84857 |
| X₆₈₅₀ | M7 | 78 | 1549659 | G | A | [symbol] | CED84862 |
| X₆₈₅₁ | M7 | 78 | 1568326 | C | T | [symbol] | CED84868 |
| X₆₈₅₂ | M7 | 78 | 1642170 | G | A | [symbol] | CED84889 |
| X₆₈₅₃ | M7 | 78 | 1658512 | G | A | [symbol] | CED84896 |
| X₆₈₅₄ | M7 | 78 | 1660408 | G | A | [symbol] | CED84897 |
| X₆₈₅₅ | M7 | 78 | 1674126 | G | A | [symbol] | CED84904 |
| X₆₈₅₆ | M7 | 78 | 1694684 | C | T | [symbol] | CED84912 |
| X₆₈₅₇ | M7 | 78 | 1721661 | G | A | [symbol] | CED84921 |
| X₆₀₅₈ | M7 | 78 | 1742796 | G | A | [symbol] | CED84926 |
| X₆₈₅₉ | M7 | 79 | 65 | G | A | [symbol] | CDZ96674 |
| X₆₈₆₀ | M7 | 79 | 133 | A | G | [symbol] | CDZ96674 |
| X₆₈₆₁ | M7 | 79 | 41271 | C | T | [symbol] | CDZ96684 |
| X₆₈₆₂ | M7 | 79 | 57804 | G | A | [symbol] | CDZ96687 |
| X₆₈₆₃ | M7 | 79 | 64658 | C | T | [symbol] | CDZ96688 |
| X₆₈₆₄ | M7 | 79 | 132683 | C | T | [symbol] | CDZ96713 |
| X₆₈₆₅ | M7 | 79 | 168708 | C | T | [symbol] | CDZ96727 |
| X₆₈₆₆ | M7 | 79 | 241350 | C | T | [symbol] | CDZ96753 |
| X₆₈₆₇ | M7 | 79 | 255780 | G | A | [symbol] | CDZ96757 |
| X₆₈₆₈ | M7 | 79 | 273231 | G | A | [symbol] | CDZ96764 |
| X₆₈₆₉ | M7 | 79 | 296092 | G | A | [symbol] | CDZ96772 |
| X₆₈₇₀ | M7 | 79 | 307021 | C | T | [symbol] | CDZ96777 |
| X₆₈₇₁ | M7 | 79 | 324145 | C | T | [symbol] | CDZ96781 |
| X₆₈₇₂ | M7 | 79 | 332458 | G | A | [symbol] | CDZ96785 |
| X₆₈₇₃ | M7 | 79 | 345646 | G | A | [symbol] | CDZ96789 |
| X₆₈₇₄ | M7 | 79 | 346823 | G | A | [symbol] | CDZ96789 |
| X₆₈₇₅ | M7 | 79 | 369258 | G | A | [symbol] | CDZ96793 |
| X₆₈₇₆ | M7 | 79 | 406184 | G | A | [symbol] | CDZ96808 |
| X₆₈₇₇ | M7 | 79 | 451849 | G | A | [symbol] | CDZ96827 |
| X₆₈₇₈ | M7 | 79 | 478890 | C | T | [symbol] | CDZ96834 |
| X₆₈₇₉ | M7 | 79 | 492523 | C | T | [symbol] | CDZ96842 |
| X₆₈₈₀ | M7 | 79 | 570874 | C | T | [symbol] | CDZ96867 |
| X₆₈₈₁ | M7 | 79 | 575411 | C | T | [symbol] | CDZ96868 |
| X₆₈₈₂ | M7 | 79 | 579674 | G | A | [symbol] | CDZ96871 |
| X₆₈₈₃ | M7 | 79 | 617057 | C | T | [symbol] | CDZ96882 |
| X₆₈₈₄ | M7 | 79 | 679140 | C | T | [symbol] | CDZ96904 |
| X₆₈₈₅ | M7 | 79 | 696174 | G | A | [symbol] | CDZ96911 |
| X₆₈₈₆ | M7 | 79 | 735053 | T | C | [symbol] | CDZ96928 |
| X₆₈₈₇ | M7 | 79 | 747717 | A | G | [symbol] | CDZ96929 |
| X₆₈₈₈ | M7 | 79 | 748083 | G | T | [symbol] | CDZ96929 |
| X₆₈₈₉ | M7 | 79 | 749595 | A | C | [symbol] | CDZ96930 |
| X₆₈₉₀ | M7 | 79 | 759195 | T | A | [symbol] | CDZ96931 |
| X₆₈₉₁ | M7 | 79 | 759403 | C | T | [symbol] | CDZ96931 |
| X₆₈₉₂ | M7 | 79 | 759589 | G | A | [symbol] | CDZ96932 |
| X₆₈₉₃ | M7 | 79 | 759659 | G | A | [symbol] | CDZ96931 |
| X₆₈₉₄ | M7 | 79 | 760458 | G | T | [symbol] | CDZ96932 |
| X₆₈₉₅ | M7 | 79 | 760891 | A | G | [symbol] | CDZ96932 |
| X₆₈₉₆ | M7 | 79 | 761056 | T | C | [symbol] | CDZ96932 |
| X₆₈₉₇ | M7 | 79 | 768537 | A | G | [symbol] | CDZ96933 |
| X₆₈₉₈ | M7 | 79 | 776112 | A | G | [symbol] | CDZ96934 |
| X₆₈₉₉ | M7 | 79 | 776150 | G | A | [symbol] | CDZ96934 |
| X₆₉₀₀ | M7 | 79 | 798799 | C | T | [symbol] | CDZ96939 |
| X₆₉₀₁ | M7 | 79 | 827202 | G | A | [symbol] | CDZ96946 |
| X₆₉₀₂ | M7 | 79 | 853944 | T | A | [symbol] | CDZ96957 |
| X₆₉₀₃ | M7 | 79 | 864204 | C | T | [symbol] | CDZ96959 |
| X₆₉₀₄ | M7 | 79 | 874161 | G | A | [symbol] | CDZ96965 |
| X₆₉₀₅ | M7 | 79 | 928047 | G | A | [symbol] | CDZ96986 |
| X₆₉₀₆ | M7 | 79 | 959497 | C | T | [symbol] | CDZ96997 |
| X₆₉₀₇ | M7 | 79 | 984226 | C | T | [symbol] | CDZ97004 |
| X₆₉₀₈ | M7 | 79 | 990910 | C | T | [symbol] | CDZ97004 |
| X₆₉₀₉ | M7 | 79 | 1000786 | A | G | [symbol] | CDZ97007 |
| X₆₉₁₀ | M7 | 79 | 1061879 | G | A | [symbol] | CDZ97030 |
| X₆₉₁₁ | M7 | 79 | 1069426 | C | T | [symbol] | CDZ97032 |
| X₆₉₁₂ | M7 | 79 | 1082233 | G | A | [symbol] | CDZ97037 |
| X₆₉₁₃ | M7 | 79 | 1117040 | C | T | [symbol] | CDZ97047 |
| X₆₉₁₄ | M7 | 79 | 1123288 | C | T | [symbol] | CDZ97049 |
| X₆₉₁₅ | M7 | 79 | 1140763 | G | A | [symbol] | CDZ97053 |
| X₆₉₁₆ | M7 | 79 | 1167374 | C | T | [symbol] | CDZ97065 |
| X₆₉₁₇ | M7 | 79 | 1229129 | G | A | [symbol] | CDZ97086 |
| X₆₉₁₈ | M7 | 79 | 1231740 | C | T | [symbol] | CDZ97087 |
| X₆₉₁₉ | M7 | 79 | 1279548 | G | A | [symbol] | CDZ97105 |
| X₆₉₂₀ | M7 | 79 | 1287496 | C | T | [symbol] | CDZ97107 |
| X₆₉₂₁ | M7 | 79 | 1318034 | C | T | [symbol] | CDZ97117 |
| X₆₉₂₂ | M7 | 79 | 1336766 | C | T | [symbol] | CDZ97121 |
| X₆₉₂₃ | M7 | 79 | 1344403 | C | T | [symbol] | CDZ97124 |
| X₆₉₂₄ | M7 | 79 | 1367232 | C | T | [symbol] | CDZ97129 |
| X₆₉₂₅ | M7 | 79 | 1430954 | G | A | [symbol] | CDZ97152 |
| X₆₉₂₆ | M7 | 79 | 1540205 | C | T | [symbol] | CDZ97186 |
| X₆₉₂₇ | M7 | 79 | 1541574 | G | A | [symbol] | CDZ97186 |
| X₆₉₂₈ | M7 | 79 | 1556423 | C | T | [symbol] | CDZ97191 |
| X₆₉₂₉ | M7 | 79 | 1624415 | G | A | [symbol] | CDZ97217 |
| X₆₉₃₀ | M7 | 79 | 1658469 | C | T | [symbol] | CDZ97227 |
| X₆₉₃₁ | M7 | 79 | 1674448 | G | A | [symbol] | CDZ97228 |
| X₆₉₃₂ | M7 | 79 | 1708225 | C | T | [symbol] | CDZ97238 |
| X₆₉₃₃ | M7 | 79 | 1797660 | C | T | [symbol] | CDZ97265 |
| X₆₉₃₄ | M7 | 79 | 1797676 | G | A | [symbol] | CDZ97265 |
| X₆₉₃₅ | M7 | 79 | 1842448 | G | A | [symbol] | CDZ97282 |
| X₆₉₃₆ | M7 | 79 | 1855037 | A | G | [symbol] | CDZ97285 |
| X₆₉₃₇ | M7 | 79 | 1859220 | A | G | [symbol] | CDZ97291 |
| X₆₉₃₈ | M7 | 79 | 1977783 | G | A | [symbol] | CDZ97330 |
| X₆₉₃₉ | M7 | 79 | 2013361 | C | T | [symbol] | CDZ97344 |
| X₆₉₄₀ | M7 | 79 | 2027861 | C | T | [symbol] | CDZ97350 |
| X₆₉₄₁ | M7 | 79 | 2055184 | G | A | [symbol] | CDZ97361 |
| X₆₉₄₂ | M7 | 79 | 2121041 | G | A | [symbol] | CDZ97380 |
| X₆₉₄₃ | M7 | 79 | 2152573 | C | T | [symbol] | CDZ97392 |
| X₆₉₄₄ | M7 | 79 | 2172085 | C | T | [symbol] | CDZ97397 |
| X₆₉₄₅ | M7 | 79 | 2188410 | G | A | [symbol] | CDZ97405 |
| X₆₉₄₆ | M7 | 79 | 2268540 | C | T | [symbol] | CDZ97435 |
| X₆₉₄₇ | M7 | 79 | 2339881 | C | G | [symbol] | CDZ97460 |
| X₆₉₄₈ | M7 | 79 | 2340326 | G | A | [symbol] | CDZ97462 |
| X₆₉₄₉ | M7 | 79 | 2340636 | T | C | [symbol] | CDZ97462 |
| X₆₉₅₀ | M7 | 85 | 512 | A | G | [symbol] | |
| X₆₉₅₁ | M7 | 85 | 516 | G | A | [symbol] | |
| X₆₉₅₂ | M7 | 85 | 521 | C | T | [symbol] | |
| X₆₉₅₃ | M7 | 85 | 522 | A | G | [symbol] | |
| X₆₉₅₄ | M7 | 88 | 119 | C | T | [symbol] | CDZ97464 |
| X₆₉₅₅ | M7 | 88 | 196 | G | A | [symbol] | CDZ97464 |
| X₆₉₅₆ | M7 | 88 | 898 | C | T | [symbol] | CDZ97464 |
| X₆₉₅₇ | M7 | 99 | 245 | G | A | [symbol] | |
| X₆₉₅₈ | M7 | 109 | 396 | T | C | [symbol] | |
| X₆₉₅₉ | M7 | 118 | 396 | C | T | [symbol] | CDZ97478 |
| X₆₉₆₀ | M7 | 118 | 870 | G | A | [symbol] | CDZ97478 |
| X₆₉₆₁ | M7 | 118 | 1491 | G | A | [symbol] | CDZ97478 |
| X₆₉₆₂ | M7 | 121 | 1402 | C | G | [symbol] | |
| X₆₉₆₃ | M7 | 124 | 72117 | G | A | [symbol] | CDZ97501 |
| X₆₉₆₄ | M7 | 124 | 72760 | G | A | [symbol] | CDZ97501 |
| X₆₉₆₅ | M7 | 124 | 94611 | G | A | [symbol] | CDZ97507 |
| X₆₉₆₆ | M7 | 124 | 138045 | C | T | [symbol] | CDZ97519 |
| X₆₉₆₇ | M7 | 124 | 156052 | G | A | [symbol] | CDZ97524 |
| X₆₉₆₈ | M7 | 124 | 166988 | C | T | [symbol] | CDZ97527 |
| X₆₉₆₉ | M7 | 124 | 179336 | C | T | [symbol] | CDZ97533 |
| X₆₉₇₀ | M7 | 124 | 222249 | C | T | [symbol] | CDZ97547 |
| X₆₉₇₁ | M7 | 125 | 35864 | T | C | [symbol] | CDZ97573 |
| X₆₉₇₂ | M7 | 129 | 299 | G | A | [symbol] | CDZ97577 |
| X₆₉₇₃ | M7 | 129 | 433 | G | A | [symbol] | CDZ97577 |
| X₆₉₇₄ | M7 | 129 | 856 | G | A | [symbol] | CDZ97577 |
| X₆₉₇₅ | M7 | 129 | 1013 | C | T | [symbol] | CDZ97577 |
| X₆₉₇₆ | M7 | 130 | 674 | C | T | [symbol] | CDZ97578 |
| X₆₉₇₇ | M7 | 138 | 123 | G | T | [symbol] | |
| X₆₉₇₈ | M7 | 141 | 10162 | G | A | [symbol] | CDZ97582 |
| X₆₉₇₉ | M7 | 141 | 14167 | G | A | [symbol] | CDZ97586 |
| X₆₉₈₀ | M7 | 141 | 15764 | C | T | [symbol] | CDZ97587 |
| X₆₉₈₁ | M7 | 141 | 17894 | G | A | [symbol] | CDZ97587 |
| X₆₉₈₂ | M7 | 145 | 296 | A | G | [symbol] | |
| X₆₉₈₃ | M7 | 147 | 335 | C | T | [symbol] | |
| X₆₉₈₄ | M7 | 149 | 2074 | T | G | [symbol] | CDZ97598 |
| X₆₉₈₅ | M7 | 149 | 2453 | C | T | [symbol] | CDZ97598 |
| X₆₉₈₆ | M7 | 159 | 106 | A | C | [symbol] | |
| X₆₉₈₇ | M7 | 162 | 70025 | C | T | [symbol] | CDZ97625 |
| X₆₉₈₈ | M7 | 162 | 70405 | A | G | [symbol] | CDZ97625 |
| X₆₉₈₉ | M7 | 162 | 91190 | C | T | [symbol] | CDZ97631 |
| X₆₉₉₀ | M7 | 162 | 117736 | G | A | [symbol] | CDZ97639 |
| X₆₉₉₁ | M7 | 162 | 118358 | T | C | [symbol] | CDZ97641 |
| X₆₉₉₂ | M7 | 162 | 207179 | C | T | [symbol] | CDZ97668 |
| X₆₉₉₃ | M7 | 162 | 207236 | G | A | [symbol] | CDZ97666 |
| X₆₉₉₄ | M7 | 162 | 223407 | C | T | [symbol] | CDZ97674 |
| X₆₉₉₅ | M7 | 162 | 230526 | C | T | [symbol] | CDZ97676 |
| X₆₉₉₆ | M7 | 162 | 231146 | C | T | [symbol] | CDZ97676 |
| X₆₉₉₇ | M7 | 162 | 233092 | C | T | [symbol] | CDZ97676 |
| X₆₉₉₈ | M7 | 162 | 243753 | G | A | [symbol] | CDZ97680 |
| X₆₉₉₉ | M7 | 162 | 268123 | G | A | [symbol] | CDZ97688 |
| X₇₀₀₀ | M7 | 162 | 291566 | G | A | [symbol] | CDZ97695 |
| X₇₀₀₁ | M7 | 162 | 308369 | T | C | [symbol] | CDZ97702 |
| X₇₀₀₂ | M7 | 162 | 309562 | A | G | [symbol] | CDZ97702 |
| X₇₀₀₃ | M7 | 162 | 321070 | C | T | [symbol] | CDZ97703 |
| X₇₀₀₄ | M7 | 162 | 321073 | A | G | [symbol] | CDZ97703 |
| X₇₀₀₅ | M7 | 162 | 321460 | C | G | [symbol] | CDZ97703 |
| X₂₀₀₆ | M7 | 162 | 321463 | A | C | [symbol] | CDZ97703 |
| X₇₀₀₇ | M7 | 162 | 321975 | T | G | [symbol] | CDZ97703 |
| X₇₀₀₈ | M7 | 162 | 322591 | G | A | [symbol] | CDZ97703 |
| X₇₀₀₉ | M7 | 162 | 323480 | T | C | [symbol] | CDZ97703 |
| X₇₀₁₀ | M7 | 162 | 324114 | T | C | [symbol] | CDZ97703 |
| X₇₀₁₁ | M7 | 162 | 324139 | C | T | [symbol] | CDZ97703 |
| X₇₀₁₂ | M7 | 162 | 324568 | A | G | [symbol] | CDZ97703 |
| X₇₀₁₃ | M7 | 162 | 360320 | G | A | [symbol] | CDZ97714 |
| X₇₀₁₄ | M7 | 162 | 408274 | C | T | [symbol] | CDZ97733 |
| X₇₀₁₅ | M7 | 162 | 424391 | C | T | [symbol] | CDZ97740 |
| X₇₀₁₆ | M7 | 162 | 444123 | T | C | [symbol] | CDZ97748 |
| X₇₀₁₇ | M7 | 162 | 467207 | C | T | [symbol] | CDZ97755 |
| X₇₀₁₈ | M7 | 162 | 476928 | C | T | [symbol] | CDZ97760 |
| X₇₀₁₉ | M7 | 162 | 491906 | G | A | [symbol] | CDZ97764 |
| X₇₀₂₀ | M7 | 162 | 492101 | G | A | [symbol] | CDZ97764 |
| X₇₀₂₁ | M7 | 162 | 501886 | C | T | [symbol] | CDZ97769 |
| X₇₀₂₂ | M7 | 162 | 581141 | C | A | [symbol] | CDZ97795 |
| X₇₀₂₃ | M7 | 162 | 632311 | G | A | [symbol] | CDZ97814 |
| X₇₀₂₄ | M7 | 162 | 633321 | G | A | [symbol] | CDZ97814 |
| X₇₀₂₅ | M7 | 162 | 633633 | G | A | [symbol] | CDZ97814 |
| X₇₀₂₆ | M7 | 162 | 640005 | C | T | [symbol] | CDZ97815 |
| X₇₀₂₇ | M7 | 162 | 680645 | G | A | [symbol] | CDZ97826 |
| X₇₀₂₈ | M7 | 162 | 721840 | G | A | [symbol] | CDZ97838 |
| X₇₀₂₉ | M7 | 162 | 738675 | G | A | [symbol] | CDZ97842 |
| X₇₀₃₀ | M7 | 162 | 738686 | C | T | [symbol] | CDZ97842 |
| X₇₀₃₁ | M7 | 162 | 801198 | C | T | [symbol] | CDZ97864 |
| X₇₀₃₂ | M7 | 162 | 808830 | G | A | [symbol] | CDZ97869 |
| X₇₀₃₃ | M7 | 162 | 871911 | C | T | [symbol] | CDZ97890 |
| X₇₀₃₄ | M7 | 162 | 946623 | C | T | [symbol] | CDZ97916 |
| X₇₀₃₅ | M7 | 162 | 971882 | G | A | [symbol] | CDZ97924 |
| X₇₀₃₆ | M7 | 163 | 225 | G | A | [symbol] | |
| X₇₀₃₇ | M7 | 169 | 1056 | C | T | [symbol] | |
| X₇₀₃₈ | M7 | 189 | 126573 | G | A | [symbol] | CDZ97996 |
| X₇₀₃₉ | M7 | 189 | 127356 | G | A | [symbol] | CDZ97996 |
| X₇₀₄₀ | M7 | 189 | 174918 | G | A | [symbol] | CDZ98015 |
| X₇₀₄₁ | M7 | 189 | 194647 | A | G | [symbol] | CDZ98020 |
| X₇₀₄₂ | M7 | 189 | 194665 | A | G | [symbol] | CDZ98020 |
| X₇₀₄₃ | M7 | 189 | 211865 | C | T | [symbol] | CDZ98028 |
| X₇₀₄₄ | M7 | 189 | 212408 | G | A | [symbol] | CDZ98028 |
| X₇₀₄₅ | M7 | 189 | 212649 | C | T | [symbol] | CDZ98028 |
| X₇₀₄₆ | M7 | 189 | 273599 | C | A | [symbol] | CDZ98048 |
| X₇₀₄₇ | M7 | 189 | 323680 | C | T | [symbol] | CDZ98063 |
| X₇₀₄₈ | M7 | 189 | 332957 | G | A | [symbol] | CDZ98065 |
| X₇₀₄₉ | M7 | 189 | 371247 | G | A | [symbol] | CDZ98078 |
| X₇₀₅₀ | M7 | 191 | 342 | A | G | [symbol] | CDZ98107 |
| X₇₀₅₁ | M7 | 191 | 347 | C | T | [symbol] | CDZ98107 |
| X₇₀₅₂ | M7 | 191 | 427 | C | T | [symbol] | CDZ98107 |
| X₇₀₅₃ | M7 | 191 | 451 | C | T | [symbol] | CDZ98107 |
| X₇₀₅₄ | M7 | 191 | 487 | A | G | [symbol] | CDZ98107 |
| X₇₀₅₅ | M7 | 197 | 624 | C | T | [symbol] | CDZ98111 |
| X₇₀₅₆ | M7 | 198 | 202 | C | A | [symbol] | |
| X₇₀₅₇ | M7 | 198 | 203 | G | A | [symbol] | |
| X₇₀₅₈ | M7 | 198 | 238 | C | T | [symbol] | |
| X₇₀₅₉ | M7 | 198 | 265 | C | T | [symbol] | |
| X₇₀₆₀ | M7 | 199 | 688 | C | T | [symbol] | |
| X₇₀₆₁ | M7 | 199 | 911 | C | T | [symbol] | |
| X₇₀₆₂ | M7 | 199 | 971 | C | T | [symbol] | |
| X₇₀₆₃ | M7 | 199 | 1218 | C | T | [symbol] | |
| X₇₀₆₄ | M7 | 202 | 171 | C | T | [symbol] | |
| X₇₀₆₅ | M7 | 202 | 221 | C | T | [symbol] | |
| X₇₀₆₆ | M7 | 205 | 360 | C | T | [symbol] | CDZ98112 |
| X₇₀₆₇ | M7 | 205 | 981 | C | T | [symbol] | CDZ98112 |
| X₇₀₆₈ | M7 | 206 | 400 | G | A | [symbol] | |
| X₇₀₆₉ | M7 | 208 | 117 | G | A | [symbol] | |
| X₇₀₇₀ | M7 | 208 | 476 | G | A | [symbol] | |
| X₇₀₇₁ | M7 | 208 | 616 | G | A | [symbol] | |
| X₇₀₇₂ | M7 | 208 | 935 | G | A | [symbol] | |
| X₇₀₇₃ | M7 | 209 | 312 | C | T | [symbol] | CDZ98113 |
| X₇₀₇₄ | M7 | 223 | 93 | G | A | [symbol] | CDZ98118 |
| X₇₀₇₅ | M7 | 223 | 102 | A | G | [symbol] | CDZ98118 |
| X₇₀₇₆ | M7 | 223 | 133 | A | G | [symbol] | CDZ98118 |
| X₇₀₇₇ | M7 | 223 | 150 | T | C | [symbol] | CDZ98118 |
| X₇₀₇₈ | M7 | 223 | 155 | A | C | [symbol] | CDZ98118 |
| X₇₀₇₉ | M7 | 223 | 158 | T | C | [symbol] | CDZ98118 |
| X₇₀₈₀ | M7 | 223 | 160 | C | T | [symbol] | CDZ98118 |
| X₇₀₈₁ | M7 | 223 | 175 | G | A | [symbol] | CDZ98118 |
| X₇₀₈₂ | M7 | 223 | 177 | A | G | [symbol] | CDZ98118 |
| X₇₀₈₃ | M7 | 223 | 188 | A | G | [symbol] | CDZ98118 |
| X₇₀₈₄ | M7 | 223 | 192 | C | A | [symbol] | CDZ98118 |
| X₇₀₈₅ | M7 | 223 | 194 | T | C | [symbol] | CDZ98118 |
| X₇₀₈₆ | M7 | 223 | 195 | T | G | [symbol] | CDZ98118 |
| X₇₀₈₇ | M7 | 223 | 197 | T | C | [symbol] | CDZ98118 |
| X₇₀₈₈ | M7 | 223 | 202 | G | C | [symbol] | CDZ98118 |
| X₇₀₈₉ | M7 | 223 | 205 | C | T | [symbol] | CDZ98118 |
| X₇₀₉₀ | M7 | 225 | 317 | C | T | [symbol] | |
| X₇₀₉₁ | M7 | 227 | 202 | G | A | [symbol] | |
| X₇₀₉₂ | M7 | 232 | 340 | G | A | [symbol] | CDZ98119 |
| X₇₀₉₃ | M7 | 232 | 415 | G | A | [symbol] | CDZ98119 |
| X₇₀₉₄ | M7 | 232 | 1379 | C | T | [symbol] | CDZ98119 |
| X₇₀₉₅ | M7 | 232 | 1521 | C | T | [symbol] | CDZ98119 |
| X₇₀₉₆ | M7 | 232 | 1662 | G | A | [symbol] | CDZ98119 |
| X₇₀₉₇ | M7 | 232 | 1761 | C | T | [symbol] | CDZ98119 |
| X₇₀₉₈ | M7 | 232 | 2027 | C | T | [symbol] | CDZ98119 |
| X₇₀₉₉ | M7 | 232 | 2028 | C | T | [symbol] | CDZ98119 |
| X₇₁₀₀ | M7 | 232 | 3060 | C | T | [symbol] | CDZ98120 |
| X₇₁₀₁ | M7 | 232 | 3284 | C | T | [symbol] | CDZ98119 |
| X₇₁₀₂ | M7 | 232 | 4437 | G | A | [symbol] | CDZ98121 |
| X₇₁₀₃ | M7 | 232 | 4561 | C | T | [symbol] | CDZ98120 |
| X₇₁₀₄ | M7 | 242 | 7334 | C | T | [symbol] | CDZ98125 |
| X₇₁₀₅ | M7 | 242 | 41710 | G | A | [symbol] | CDZ98131 |
| X₇₁₀₆ | M7 | 242 | 50262 | G | A | [symbol] | CDZ98135 |
| X₇₁₀₇ | M7 | 242 | 84132 | G | A | [symbol] | CDZ98146 |
| X₇₁₀₈ | M7 | 242 | 88037 | G | A | [symbol] | CDZ98147 |
| X₇₁₀₉ | M7 | 242 | 106805 | G | A | [symbol] | CDZ98152 |
| X₇₁₁₀ | M7 | 242 | 107587 | G | A | [symbol] | CDZ98153 |
| X₇₁₁₁ | M7 | 242 | 125424 | C | T | [symbol] | CDZ98159 |
| X₇₁₁₂ | M7 | 242 | 168689 | G | A | [symbol] | CDZ98172 |
| X₇₁₁₃ | M7 | 242 | 213986 | G | A | [symbol] | CDZ98185 |
| X₇₁₁₄ | M7 | 242 | 227271 | C | T | [symbol] | CDZ98191 |
| X₇₁₁₅ | M7 | 242 | 233088 | G | A | [symbol] | CDZ98193 |
| X₇₁₁₆ | M7 | 242 | 310353 | G | A | [symbol] | CDZ98216 |
| X₇₁₁₇ | M7 | 242 | 374897 | G | A | [symbol] | CDZ98238 |
| X₇₁₁₈ | M7 | 242 | 404132 | G | A | [symbol] | CDZ98248 |
| X₇₁₁₉ | M7 | 242 | 412676 | G | A | [symbol] | CDZ98249 |
| X₇₁₂₀ | M7 | 242 | 454709 | C | T | [symbol] | CDZ98263 |
| X₇₁₂₁ | M7 | 242 | 472562 | C | T | [symbol] | CDZ98266 |
| X₇₁₂₂ | M7 | 242 | 485936 | G | A | [symbol] | CDZ98270 |
| X₇₁₂₃ | M7 | 242 | 492389 | G | A | [symbol] | CDZ98274 |
| X₇₁₂₄ | M7 | 242 | 514780 | C | T | [symbol] | CDZ98282 |
| X₇₁₂₅ | M7 | 242 | 528340 | G | A | [symbol] | CDZ98288 |
| X₇₁₂₆ | M7 | 242 | 542663 | G | A | [symbol] | CDZ98290 |
| X₇₁₂₇ | M7 | 242 | 559999 | G | A | [symbol] | CDZ98297 |
| X₇₁₂₈ | M7 | 242 | 602456 | G | A | [symbol] | CDZ98308 |
| X₇₁₂₉ | M7 | 242 | 602531 | G | A | [symbol] | CDZ98308 |
| X₇₁₃₀ | M7 | 242 | 603042 | G | A | [symbol] | CDZ98308 |
| X₇₁₃₁ | M7 | 242 | 604704 | C | T | [symbol] | CDZ98309 |
| X₇₁₃₂ | M7 | 242 | 628488 | G | A | [symbol] | CDZ98317 |
| X₇₁₃₃ | M7 | 242 | 641669 | G | A | [symbol] | CDZ98323 |
| X₇₁₃₄ | M7 | 249 | 206 | G | A | [symbol] | CED84929 |
| X₇₁₃₅ | M7 | 249 | 42295 | C | T | [symbol] | CED84942 |
| X₇₁₃₆ | M7 | 249 | 52397 | G | A | [symbol] | CED84947 |
| X₇₁₃₇ | M7 | 249 | 72016 | C | T | [symbol] | CED84950 |
| X₇₁₃₈ | M7 | 249 | 141163 | A | G | [symbol] | CED84977 |
| X₇₁₃₉ | M7 | 249 | 157550 | C | T | [symbol] | CED84983 |
| X₇₁₄₀ | M7 | 249 | 191304 | C | T | [symbol] | CED84988 |
| X₇₁₄₁ | M7 | 249 | 269707 | G | A | [symbol] | CED85013 |
| X₇₁₄₂ | M7 | 249 | 272075 | C | T | [symbol] | CED85013 |
| X₇₁₄₃ | M7 | 249 | 285231 | C | T | [symbol] | CED85015 |
| X₇₁₄₄ | M7 | 249 | 289154 | C | T | [symbol] | CED85018 |
| X₇₁₄₅ | M7 | 249 | 305975 | G | A | [symbol] | CED85023 |
| X₇₁₄₆ | M7 | 249 | 342990 | G | A | [symbol] | CED85036 |
| X₇₁₄₇ | M7 | 249 | 377814 | G | A | [symbol] | CED85051 |
| X₇₁₄₈ | M7 | 249 | 390024 | G | A | [symbol] | CED85059 |
| X₇₁₄₉ | M7 | 249 | 434431 | G | A | [symbol] | CED85072 |
| X₇₁₅₀ | M7 | 249 | 485782 | C | T | [symbol] | CED85089 |
| X₇₁₅₁ | M7 | 249 | 488584 | G | A | [symbol] | CED85091 |
| X₇₁₅₂ | M7 | 249 | 501310 | C | T | [symbol] | CED85093 |
| X₇₁₅₃ | M7 | 249 | 506067 | A | G | [symbol] | CED85094 |
| X₇₁₅₄ | M7 | 249 | 509901 | C | T | [symbol] | CED85096 |
| X₇₁₅₅ | M7 | 249 | 532943 | A | G | [symbol] | CED85099 |
| X₇₁₅₆ | M7 | 249 | 574798 | C | T | [symbol] | CED85117 |
| X₇₁₅₇ | M7 | 249 | 598579 | C | T | [symbol] | CED85125 |
| X₇₁₅₈ | M7 | 249 | 626627 | G | A | [symbol] | CED85132 |
| X₇₁₅₉ | M7 | 249 | 637944 | G | A | [symbol] | CED85135 |
| X₇₁₆₀ | M7 | 249 | 660408 | G | A | [symbol] | CED85144 |
| X₇₁₆₁ | M7 | 249 | 665383 | G | A | [symbol] | CED85144 |
| X₇₁₆₂ | M7 | 249 | 683254 | T | C | [symbol] | CED85153 |
| X₇₁₆₃ | M7 | 249 | 728713 | T | C | [symbol] | CED85167 |
| X₇₁₆₄ | M7 | 249 | 746655 | C | T | [symbol] | CED85172 |
| X₇₁₆₅ | M7 | 249 | 751427 | G | A | [symbol] | CED85174 |
| X₇₁₆₆ | M7 | 249 | 803215 | C | T | [symbol] | CED85186 |
| X₇₁₆₇ | M7 | 249 | 823733 | C | T | [symbol] | CED85193 |
| X₇₁₆₈ | M7 | 249 | 854220 | G | A | [symbol] | CED85201 |
| X₇₁₆₉ | M7 | 249 | 911274 | C | T | [symbol] | CED85218 |
| X₇₁₇₀ | M7 | 249 | 932606 | C | T | [symbol] | CED85223 |
| X₇₁₇₁ | M7 | 249 | 945434 | C | T | [symbol] | CED85227 |
| X₇₁₇₂ | M7 | 249 | 945727 | C | T | [symbol] | CED85227 |
| X₇₁₇₃ | M7 | 249 | 953534 | A | T | [symbol] | CED85229 |
| X₇₁₇₄ | M7 | 249 | 969333 | G | T | [symbol] | CED85238 |
| X₇₁₇₅ | M7 | 249 | 977170 | C | T | [symbol] | CED85242 |
| X₇₁₇₆ | M7 | 249 | 989520 | C | T | [symbol] | CED85243 |
| X₇₁₇₇ | M7 | 249 | 1014098 | C | T | [symbol] | CED85252 |
| X₇₁₇₈ | M7 | 249 | 1058697 | C | T | [symbol] | CED85263 |
| X₇₁₇₉ | M7 | 249 | 1075522 | G | A | [symbol] | CED85270 |
| X₇₁₈₀ | M7 | 249 | 1114790 | G | A | [symbol] | CED85283 |
| X₇₁₈₁ | M7 | 249 | 1144309 | G | A | [symbol] | CED85291 |
| X₇₁₈₂ | M7 | 249 | 1176977 | G | A | [symbol] | CED85303 |
| X₇₁₈₃ | M7 | 249 | 1195367 | G | A | [symbol] | CED85307 |
| X₇₁₈₄ | M7 | 249 | 1209489 | C | T | [symbol] | CED85313 |
| X₇₁₈₅ | M7 | 249 | 1230068 | C | T | [symbol] | CED85319 |
| X₇₁₈₆ | M7 | 249 | 1245242 | G | A | [symbol] | CED85322 |
| X₇₁₈₇ | M7 | 249 | 1299472 | C | T | [symbol] | CED85343 |
| X₇₁₈₈ | M7 | 249 | 1305184 | G | A | [symbol] | CED85345 |
| X₇₁₈₉ | M7 | 249 | 1350079 | G | A | [symbol] | CED85357 |
| X₇₁₉₀ | M7 | 249 | 1391343 | G | A | [symbol] | CED85372 |
| X₇₁₉₁ | M7 | 249 | 1452855 | C | T | [symbol] | CED85396 |
| X₇₁₉₂ | M7 | 249 | 1486813 | A | C | [symbol] | CED85411 |
| X₇₁₉₃ | M7 | 249 | 1486828 | G | A | [symbol] | CED85411 |
| X₇₁₉₄ | M7 | 249 | 1486831 | T | C | [symbol] | CED85411 |
| X₇₁₉₅ | M7 | 249 | 1498029 | T | C | [symbol] | CED85415 |
| X₇₁₉₆ | M7 | 249 | 1498823 | T | C | [symbol] | CED85414 |
| X₇₁₉₇ | M7 | 249 | 1498829 | C | T | [symbol] | CED85414 |
| X₇₁₉₈ | M7 | 249 | 1499357 | T | G | [symbol] | CED85415 |
| X₇₁₉₉ | M7 | 249 | 1499741 | G | A | [symbol] | CED85415 |
| X₇₂₀₀ | M7 | 249 | 1502631 | G | T | [symbol] | CED85416 |
| X₇₂₀₁ | M7 | 249 | 1502641 | T | A | [symbol] | CED85416 |
| X₇₂₀₂ | M7 | 249 | 1502819 | T | G | [symbol] | CED85416 |
| X₇₂₀₃ | M7 | 249 | 1505138 | G | A | [symbol] | CED85416 |
| X₇₂₀₄ | M7 | 249 | 1518591 | T | A | [symbol] | CED85419 |
| X₇₂₀₅ | M7 | 249 | 1519431 | A | G | [symbol] | CED85419 |
| X₇₂₀₆ | M7 | 249 | 1553019 | G | A | [symbol] | CED85427 |
| X₇₂₀₇ | M7 | 249 | 1599808 | C | T | [symbol] | CED85444 |
| X₇₂₀₈ | M7 | 249 | 1599907 | C | T | [symbol] | CED85444 |
| X₇₂₀₉ | M7 | 249 | 1619036 | G | A | [symbol] | CED85450 |
| X₇₂₁₀ | M7 | 249 | 1621516 | G | A | [symbol] | CED85451 |
| X₇₂₁₁ | M7 | 249 | 1623151 | G | A | [symbol] | CED85451 |
| X₇₂₁₂ | M7 | 249 | 1636931 | G | A | [symbol] | CED85455 |
| X₇₂₁₃ | M7 | 249 | 1643086 | T | A | [symbol] | CED85456 |
| X₇₂₁₄ | M7 | 249 | 1653615 | T | G | [symbol] | CED85457 |
| X₇₂₁₅ | M7 | 249 | 1662746 | A | T | [symbol] | CED85459 |
| X₇₂₁₆ | M7 | 249 | 1666185 | C | T | [symbol] | CED85460 |
| X₇₂₁₇ | M7 | 249 | 1679615 | G | A | [symbol] | CED85461 |
| X₇₂₁₈ | M7 | 249 | 1726777 | C | T | [symbol] | CED85474 |
| X₇₂₁₉ | M7 | 249 | 1737431 | C | T | [symbol] | CED85478 |
| X₇₂₂₀ | M7 | 249 | 1741408 | C | T | [symbol] | CED85480 |
| X₇₂₂₁ | M7 | 249 | 1760715 | C | T | [symbol] | CED85489 |
| X₇₂₂₂ | M7 | 249 | 1768844 | C | T | [symbol] | CED85489 |
| X₇₂₂₃ | M7 | 249 | 1780551 | A | G | [symbol] | CED85493 |
| X₇₂₂₄ | M7 | 249 | 1780569 | A | G | [symbol] | CED85493 |
| X₇₂₂₅ | M7 | 249 | 1786050 | C | T | [symbol] | CED85496 |
| X₇₂₂₆ | M7 | 249 | 1803575 | C | T | [symbol] | CED85502 |
| X₇₂₂₇ | M7 | 249 | 1862072 | C | T | [symbol] | CED85520 |
| X₇₂₂₈ | M7 | 249 | 1880762 | G | A | [symbol] | CED85525 |
| X₇₂₂₉ | M7 | 249 | 1944026 | G | A | [symbol] | CED85545 |
| X₇₂₃₀ | M7 | 249 | 1969421 | G | A | [symbol] | CED85550 |
| X₇₂₃₁ | M7 | 249 | 1988505 | C | T | [symbol] | CED85560 |
| X₇₂₃₂ | M7 | 249 | 2010712 | G | A | [symbol] | CED85564 |
| X₇₂₃₃ | M7 | 249 | 2015272 | G | A | [symbol] | CED85567 |
| X₇₂₃₄ | M7 | 249 | 2027477 | G | A | [symbol] | CED85573 |
| X₇₂₃₅ | M7 | 249 | 2054064 | C | T | [symbol] | CED85583 |
| X₇₂₃₆ | M7 | 249 | 2063467 | G | A | [symbol] | CED85586 |
| X₇₂₃₇ | M7 | 249 | 2080239 | G | A | [symbol] | CED85590 |
| X₇₂₃₈ | M7 | 249 | 2110956 | C | T | [symbol] | CED85603 |
| X₇₂₃₉ | M7 | 249 | 2124517 | C | T | [symbol] | CED85607 |
| X₇₂₄₀ | M7 | 249 | 2131353 | C | T | [symbol] | CED85609 |
| X₇₂₄₁ | M7 | 249 | 2167664 | G | A | [symbol] | CED85620 |
| X₇₂₄₂ | M7 | 249 | 2178506 | G | A | [symbol] | CED85622 |
| X₇₂₄₃ | M7 | 249 | 2183695 | G | A | [symbol] | CED85623 |
| X₇₂₄₄ | M7 | 249 | 2198205 | G | A | [symbol] | CED85628 |
| X₇₂₄₅ | M7 | 249 | 2223626 | G | A | [symbol] | CED85633 |
| X₇₂₄₆ | M7 | 249 | 2255547 | G | C | [symbol] | CED85640 |
| X₇₂₄₇ | M7 | 252 | 512 | C | T | [symbol] | |
| X₇₂₄₈ | M7 | 252 | 524 | C | T | [symbol] | |
| X₇₂₄₉ | M7 | 258 | 267 | G | A | [symbol] | |
| X₇₂₅₀ | M7 | 258 | 1139 | A | T | [symbol] | |
| X₇₂₅₁ | M7 | 259 | 91 | G | C | [symbol] | |
| X₇₂₅₂ | M7 | 260 | 156 | G | A | [symbol] | |
| X₇₂₅₃ | M7 | 262 | 4049 | G | A | [symbol] | CDZ98330 |
| X₇₂₅₄ | M7 | 262 | 12289 | C | T | [symbol] | CDZ98333 |
| X₇₂₅₅ | M7 | 262 | 16863 | C | T | [symbol] | CDZ98334 |
| X₇₂₅₆ | M7 | 262 | 30347 | G | A | [symbol] | CDZ98338 |
| X₇₂₅₇ | M7 | 262 | 30359 | G | A | [symbol] | CDZ98338 |
| X₇₂₅₈ | M7 | 262 | 39621 | C | T | [symbol] | CDZ98342 |
| X₇₂₅₉ | M7 | 262 | 96076 | C | T | [symbol] | CDZ98364 |
| X₇₂₆₀ | M7 | 262 | 138889 | C | T | [symbol] | CDZ98375 |
| X₇₂₆₁ | M7 | 262 | 143387 | C | T | [symbol] | CDZ98375 |
| X₇₂₆₂ | M7 | 262 | 144566 | G | A | [symbol] | CDZ98375 |
| X₇₂₆₃ | M7 | 262 | 148151 | C | T | [symbol] | CDZ98375 |
| X₇₂₆₄ | M7 | 262 | 164438 | G | A | [symbol] | CDZ98383 |
| X₇₂₆₅ | M7 | 262 | 201531 | G | A | [symbol] | CDZ98396 |
| X₇₂₆₆ | M7 | 262 | 250756 | A | G | [symbol] | CDZ98412 |
| X₇₂₆₇ | M7 | 262 | 252708 | G | A | [symbol] | CDZ98414 |
| X₇₂₆₈ | M7 | 262 | 319302 | G | A | [symbol] | CDZ98436 |
| X₇₂₆₉ | M7 | 262 | 345538 | C | T | [symbol] | CDZ98448 |
| X₇₂₇₀ | M7 | 262 | 380519 | C | T | [symbol] | CDZ98457 |
| X₇₂₇₁ | M7 | 262 | 383215 | C | T | [symbol] | CDZ98459 |
| X₇₂₇₂ | M7 | 262 | 392930 | C | T | [symbol] | CDZ98461 |
| X₇₂₇₃ | M7 | 262 | 397539 | G | A | [symbol] | CDZ98463 |
| X₇₂₇₄ | M7 | 262 | 410688 | C | T | [symbol] | CDZ98466 |
| X₇₂₇₅ | M7 | 262 | 415802 | C | T | [symbol] | CDZ98467 |
| X₇₂₇₆ | M7 | 262 | 420102 | G | A | [symbol] | CDZ98468 |
| X₇₂₇₇ | M7 | 262 | 444331 | G | A | [symbol] | CDZ98477 |
| X₇₂₇₈ | M7 | 262 | 446956 | C | T | [symbol] | CDZ98477 |
| X₇₂₇₉ | M7 | 262 | 460607 | C | A | [symbol] | CDZ98482 |
| X₇₂₈₀ | M7 | 262 | 503840 | G | A | [symbol] | CDZ98499 |
| X₇₂₈₁ | M7 | 262 | 539428 | G | A | [symbol] | CDZ98514 |
| X₇₂₈₂ | M7 | 262 | 539452 | A | G | [symbol] | CDZ98514 |
| X₇₂₈₃ | M7 | 262 | 539470 | A | G | [symbol] | CDZ98514 |
| X₇₂₈₄ | M7 | 262 | 557280 | G | A | [symbol] | CDZ98518 |
| X₇₂₈₅ | M7 | 262 | 560713 | G | A | [symbol] | CDZ98519 |
| X₇₂₈₆ | M7 | 262 | 562795 | C | T | [symbol] | CDZ98521 |
| X₇₂₈₇ | M7 | 262 | 567591 | G | A | [symbol] | CDZ98524 |
| X₇₂₈₈ | M7 | 262 | 567801 | G | A | [symbol] | CDZ98524 |
| X₇₂₈₉ | M7 | 262 | 577776 | C | T | [symbol] | CDZ98526 |
| X₇₂₉₀ | M7 | 262 | 607661 | G | A | [symbol] | CDZ98533 |
| X₇₂₉₁ | M7 | 262 | 618198 | G | A | [symbol] | CDZ98538 |
| X₇₂₉₂ | M7 | 262 | 639869 | G | C | [symbol] | CDZ98544 |
| X₇₂₉₃ | M7 | 262 | 639962 | A | G | [symbol] | CDZ98544 |
| X₇₂₉₄ | M7 | 262 | 640066 | A | G | [symbol] | CDZ98544 |
| X₇₂₉₅ | M7 | 262 | 640111 | A | G | [symbol] | CDZ98544 |
| X₇₂₉₆ | M7 | 262 | 644677 | C | T | [symbol] | CDZ98544- |
| | | | | | | | CDZ98545 |
| X₇₂₉₇ | M7 | 262 | 647379 | A | G | [symbol] | CDZ98544- |
| | | | | | | | CDZ98545 |
| X₇₂₉₈ | M7 | 262 | 647388 | T | C | [symbol] | CDZ98544- |
| | | | | | | | CDZ98545 |
| X₇₂₉₉ | M7 | 262 | 647393 | G | A | [symbol] | CDZ98544- |
| | | | | | | | CDZ98545 |
| X₇₃₀₀ | M7 | 262 | 647394 | A | G | [symbol] | CDZ98544- |
| | | | | | | | CDZ98545 |
| X₇₃₀₁ | M7 | 262 | 647430 | C | T | [symbol] | CDZ98544- |
| | | | | | | | CDZ98545 |
| X₇₃₀₂ | M7 | 262 | 647433 | A | G | [symbol] | CDZ98544- |
| | | | | | | | CDZ98545 |
| X₇₃₀₃ | M7 | 262 | 653920 | A | G | [symbol] | CDZ98545 |
| X₇₃₀₄ | M7 | 262 | 656031 | C | A | [symbol] | CDZ98545 |
| X₇₃₀₅ | M7 | 262 | 656323 | C | G | [symbol] | CDZ98545 |
| X₇₃₀₆ | M7 | 262 | 668764 | C | T | [symbol] | CDZ98545 |
| X₇₃₀₇ | M7 | 262 | 669984 | C | T | [symbol] | CDZ98547 |
| X₇₃₀₈ | M7 | 262 | 691577 | C | T | [symbol] | CDZ98551 |
| X₇₃₀₉ | M7 | 262 | 759057 | C | A | [symbol] | CDZ98575 |
| X₇₃₁₀ | M7 | 262 | 759058 | A | C | [symbol] | CDZ98575 |
| X₇₃₁₁ | M7 | 262 | 801565 | G | A | [symbol] | CDZ98589 |
| X₇₃₁₂ | M7 | 262 | 822734 | G | A | [symbol] | CDZ98597 |
| X₇₃₁₃ | M7 | 262 | 835874 | C | T | [symbol] | CDZ98601 |
| X₇₃₁₄ | M7 | 262 | 856616 | G | A | [symbol] | CDZ98612 |
| X₇₃₁₅ | M7 | 262 | 865999 | G | A | [symbol] | CDZ98613 |
| X₇₃₁₆ | M7 | 262 | 882258 | G | A | [symbol] | CDZ98619 |
| X₇₃₁₇ | M7 | 262 | 971713 | G | A | [symbol] | CDZ98649 |
| X₇₃₁₈ | M7 | 262 | 1008174 | C | T | [symbol] | CDZ98659 |
| X₇₃₁₉ | M7 | 262 | 1021485 | C | T | [symbol] | CDZ98663 |
| X₇₃₂₀ | M7 | 262 | 1080137 | G | A | [symbol] | CDZ98679 |
| X₇₃₂₁ | M7 | 262 | 1120617 | G | A | [symbol] | CDZ98696 |
| X₇₃₂₂ | M7 | 262 | 1204782 | G | A | [symbol] | CDZ98722 |
| X₇₃₂₃ | M7 | 262 | 1209662 | G | A | [symbol] | CDZ98723 |
| X₇₃₂₄ | M7 | 262 | 1226072 | C | T | [symbol] | CDZ98730 |
| X₇₃₂₅ | M7 | 262 | 1229407 | G | A | [symbol] | CDZ98732 |
| X₇₃₂₆ | M7 | 262 | 1277604 | G | A | [symbol] | CDZ98747 |
| X₇₃₂₇ | M7 | 262 | 1305361 | G | A | [symbol] | CDZ98753 |
| X₇₃₂₈ | M7 | 262 | 1329643 | C | T | [symbol] | CDZ98760 |
| X₇₃₂₉ | M7 | 262 | 1332176 | C | T | [symbol] | CDZ98761 |
| X₇₃₃₀ | M7 | 262 | 1349561 | G | A | [symbol] | CDZ98766 |
| X₇₃₃₁ | M7 | 262 | 1351116 | A | G | [symbol] | CDZ98766 |
| X₇₃₃₂ | M7 | 262 | 1367361 | C | T | [symbol] | CDZ98772 |
| X₇₃₃₃ | M7 | 262 | 1408928 | G | A | [symbol] | CDZ98786 |
| X₇₃₃₄ | M7 | 262 | 1416604 | C | T | [symbol] | CDZ98788 |
| X₇₃₃₅ | M7 | 262 | 1424293 | G | A | [symbol] | CDZ98791 |
| X₇₃₃₆ | M7 | 262 | 1455677 | G | A | [symbol] | CDZ98804 |
| X₇₃₃₇ | M7 | 262 | 1458863 | C | T | [symbol] | CDZ98807 |
| X₇₃₃₈ | M7 | 262 | 1550311 | C | T | [symbol] | CDZ98836 |
| X₇₃₃₉ | M7 | 262 | 1550456 | C | T | [symbol] | CDZ98837 |
| X₇₃₄₀ | M7 | 262 | 1615762 | G | A | [symbol] | CDZ98855 |
| X₇₃₄₁ | M7 | 262 | 1677620 | G | A | [symbol] | CDZ98873 |
| X₇₃₄₂ | M7 | 262 | 1694625 | C | T | [symbol] | CDZ98878 |
| X₇₃₄₃ | M7 | 262 | 1704629 | T | C | [symbol] | CDZ98883 |
| X₇₃₄₄ | M7 | 262 | 1706076 | G | A | [symbol] | CDZ98885 |
| X₇₃₄₅ | M7 | 262 | 1709988 | G | A | [symbol] | CDZ98884 |
| X₇₃₄₆ | M7 | 262 | 1711527 | G | A | [symbol] | CDZ98886 |
| X₇₃₄₇ | M7 | 262 | 1716385 | G | A | [symbol] | CDZ98887 |
| X₇₃₄₈ | M7 | 266 | 252 | C | T | [symbol] | |
| X₇₃₄₉ | M7 | 267 | 93 | G | A | [symbol] | |
| X₇₃₅₀ | M7 | 267 | 94 | A | G | [symbol] | |
| X₇₃₅₁ | M7 | 267 | 133 | T | C | [symbol] | |
| X₇₃₅₂ | M7 | 267 | 134 | C | T | [symbol] | |
| X₇₃₅₃ | M7 | 267 | 201 | T | C | [symbol] | |
| X₇₃₅₄ | M7 | 267 | 208 | T | C | [symbol] | |
| X₇₃₅₅ | M7 | 267 | 234 | T | C | [symbol] | |
| X₇₃₅₆ | M7 | 267 | 254 | G | T | [symbol] | |
| X₇₃₅₇ | M7 | 267 | 256 | A | G | [symbol] | |
| X₇₃₅₈ | M7 | 267 | 257 | T | C | [symbol] | |
| X₇₃₅₉ | M8 | 22 | 1643 | C | T | [symbol] | CED80056 |
| X₇₃₆₀ | M8 | 22 | 2524 | G | A | [symbol] | CED80056 |
| X₇₃₆₁ | M8 | 28 | 236 | G | A | [symbol] | CDZ96150 |
| X₇₃₆₂ | M8 | 28 | 377 | G | A | [symbol] | CDZ96150 |
| X₇₃₆₃ | M8 | 28 | 1506995 | C | T | [symbol] | CDZ96150 |
| X₇₃₆₄ | M8 | 28 | 1677 | C | T | [symbol] | CDZ96150 |
| X₇₃₆₅ | M8 | 43 | 464 | G | A | [symbol] | CDZ96151 |
| X₇₃₆₆ | M8 | 43 | 753 | C | T | [symbol] | CDZ96151 |
| X₇₃₆₇ | M8 | 43 | 757 | G | A | [symbol] | CDZ96151 |
| X₇₃₆₈ | M8 | 43 | 1527 | C | T | [symbol] | CDZ96151 |
| X₇₃₆₉ | M8 | 43 | 1748 | G | A | [symbol] | CDZ96151 |
| X₇₃₇₀ | M8 | 43 | 1928 | C | T | [symbol] | CDZ96151 |
| X₇₃₇₁ | M8 | 62 | 26 | T | A | [symbol] | CDZ96152 |
| X₇₃₇₂ | M8 | 62 | 27 | T | C | [symbol] | CDZ96152 |
| X₇₃₇₃ | M8 | 62 | 55 | T | A | [symbol] | CDZ96152 |
| X₇₃₇₄ | M8 | 62 | 403 | C | T | [symbol] | CDZ96152 |
| X₇₃₇₅ | M8 | 62 | 875 | G | A | [symbol] | CDZ96152 |
| X₇₃₇₆ | M8 | 102 | 339 | C | T | [symbol] | CDZ96153 |
| X₇₃₇₇ | M8 | 102 | 951 | G | A | [symbol] | CDZ96153 |
| X₇₃₇₈ | M8 | 102 | 1042 | G | A | [symbol] | CDZ96153 |
| X₇₃₇₉ | M8 | 102 | 2334 | G | A | [symbol] | CDZ96153 |
| X₇₃₈₀ | M8 | 102 | 2590 | C | T | [symbol] | CDZ96153 |
| X₇₃₈₁ | M8 | 102 | 3427 | C | T | [symbol] | CDZ96153 |
| X₇₃₈₂ | M8 | 176 | 358 | G | A | [symbol] | CED80058 |
| X₇₃₈₃ | M8 | 176 | 1872 | G | A | [symbol] | CED80058 |
| X₇₃₈₄ | M8 | 176 | 1980 | G | A | [symbol] | CED80058 |
| X₇₃₈₅ | M8 | 179 | 1525 | G | A | [symbol] | CDZ96154 |
| X₇₃₈₆ | M8 | 179 | 1780 | C | T | [symbol] | CDZ96154 |
| X₇₃₈₇ | M8 | 179 | 2472 | G | A | [symbol] | CDZ96154 |
| X₇₃₈₈ | M8 | 179 | 2476 | C | T | [symbol] | CDZ96154 |
| X₇₃₈₉ | M8 | 188 | 815 | C | T | [symbol] | CED80060 |
| X₇₃₉₀ | M8 | 188 | 1174 | C | T | [symbol] | CED80060 |
| X₇₃₉₁ | M8 | 188 | 2163 | G | A | [symbol] | CED80060 |
| X₇₃₉₂ | M8 | 188 | 2170 | G | A | [symbol] | CED80060 |
| X₇₃₉₃ | M8 | 247 | 102 | G | A | [symbol] | CED80061 |
| X₇₃₉₄ | M8 | 247 | 989 | C | T | [symbol] | CED80061 |
| X₇₃₉₅ | M8 | 247 | 1053 | G | A | [symbol] | CED80061 |
| X₇₃₉₆ | M8 | 3 | 142 | C | T | [symbol] | |
| X₇₃₉₇ | M8 | 7 | 160 | T | C | [symbol] | |
| X₇₃₉₈ | M8 | 8 | 1110 | C | T | [symbol] | |
| X₇₃₉₉ | M8 | 11 | 154 | A | C | [symbol] | |
| X₇₄₀₀ | M8 | 11 | 158 | C | T | [symbol] | |
| X₇₄₀₁ | M8 | 15 | 28 | C | G | [symbol] | |
| X₇₄₀₂ | M8 | 15 | 214 | G | C | [symbol] | |
| X₇₄₀₃ | M8 | 15 | 419 | A | G | [symbol] | |
| X₇₄₀₄ | M8 | 15 | 421 | G | T | [symbol] | |
| X₇₄₀₅ | M8 | 15 | 422 | G | T | [symbol] | |
| X₇₄₀₆ | M8 | 15 | 424 | G | C | [symbol] | |
| X₇₄₀₇ | M8 | 15 | 431 | G | C | [symbol] | |
| X₇₄₀₈ | M8 | 15 | 433 | C | A | [symbol] | |
| X₇₄₀₉ | M8 | 15 | 434 | C | A | [symbol] | |
| X₇₄₁₀ | M8 | 15 | 462 | C | T | [symbol] | |
| X₇₄₁₁ | M8 | 15 | 464 | C | A | [symbol] | |
| X₇₄₁₂ | M8 | 15 | 465 | C | T | [symbol] | |
| X₇₄₁₃ | M8 | 24 | 513 | T | C | [symbol] | CDZ96160 |
| X₇₄₁₄ | M8 | 24 | 520 | C | G | [symbol] | CDZ96160 |
| X₇₄₁₅ | M8 | 24 | 5850 | C | T | [symbol] | CDZ96160 |
| X₇₄₁₆ | M8 | 24 | 118860 | C | T | [symbol] | CDZ96200 |
| X₇₄₁₇ | M8 | 24 | 180340 | G | A | [symbol] | CDZ96216 |
| X₇₄₁₈ | M8 | 24 | 266697 | G | A | [symbol] | CDZ96242 |
| X₇₄₁₉ | M8 | 24 | 307114 | G | A | [symbol] | CDZ96255 |
| X₇₄₂₀ | M8 | 24 | 335171 | C | T | [symbol] | CDZ96265 |
| X₇₄₂₁ | M8 | 24 | 340663 | T | C | [symbol] | CDZ96265 |
| X₇₄₂₂ | M8 | 24 | 349340 | C | T | [symbol] | CDZ96270 |
| X₇₄₂₃ | M8 | 24 | 349352 | G | A | [symbol] | CDZ96270 |
| X₇₄₂₄ | M8 | 24 | 363770 | C | T | [symbol] | CDZ96275 |
| X₇₄₂₅ | M8 | 24 | 420108 | G | A | [symbol] | CDZ96291 |
| X₇₄₂₆ | M8 | 24 | 422035 | G | A | [symbol] | CDZ96291 |
| X₇₄₂₇ | M8 | 24 | 484490 | C | T | [symbol] | CDZ96313 |
| X₇₄₂₈ | M8 | 27 | 445 | C | T | [symbol] | |
| X₇₄₂₉ | M8 | 27 | 1012 | A | C | [symbol] | |
| X₇₄₃₀ | M8 | 27 | 1013 | T | A | [symbol] | |
| X₇₄₃₁ | M8 | 32 | 158 | C | T | [symbol] | CDZ96332 |
| X₇₄₃₂ | M8 | 32 | 215 | C | T | [symbol] | CDZ96332 |
| X₇₄₃₃ | M8 | 32 | 2438 | C | T | [symbol] | CDZ96332 |
| X₇₄₃₄ | M8 | 32 | 2734 | C | T | [symbol] | CDZ96332 |
| X₇₄₃₅ | M8 | 32 | 2821 | C | T | [symbol] | CDZ96332 |
| X₇₄₃₆ | M8 | 32 | 3067 | C | T | [symbol] | CDZ96332 |
| X₇₄₃₇ | M8 | 32 | 3506 | C | T | [symbol] | CDZ96332 |
| X₇₄₃₈ | M8 | 32 | 3562 | G | A | [symbol] | CDZ96332 |
| X₇₄₃₉ | M8 | 33 | 399 | T | A | [symbol] | CED82002 |
| X₇₄₄₀ | M8 | 33 | 24784 | C | T | [symbol] | CED82008 |
| X₇₄₄₁ | M8 | 33 | 45488 | C | T | [symbol] | CED82012 |
| X₇₄₄₂ | M8 | 33 | 64676 | G | A | [symbol] | CED82019 |
| X₇₄₄₃ | M8 | 33 | 79913 | G | A | [symbol] | CED82024 |
| X₇₄₄₄ | M8 | 33 | 109397 | G | A | [symbol] | CED82038 |
| X₇₄₄₅ | M8 | 33 | 182417 | G | A | [symbol] | CED82062 |
| X₇₄₄₆ | M8 | 33 | 198050 | C | T | [symbol] | CED82067 |
| X₇₄₄₇ | M8 | 33 | 257786 | C | T | [symbol] | CED82084 |
| X₇₄₄₈ | M8 | 33 | 260027 | G | A | [symbol] | CED82084 |
| X₇₄₄₉ | M8 | 33 | 274627 | G | A | [symbol] | CED82091 |
| X₇₄₅₀ | M8 | 33 | 276128 | C | T | [symbol] | CED82092 |
| X₇₄₅₁ | M8 | 33 | 283808 | C | T | [symbol] | CED82093 |
| X₇₄₅₂ | M8 | 33 | 318242 | G | A | [symbol] | CED82105 |
| X₇₄₅₃ | M8 | 33 | 326016 | T | C | [symbol] | CED82108 |
| X₇₄₅₄ | M8 | 33 | 327840 | C | T | [symbol] | CED82108 |
| X₇₄₅₅ | M8 | 33 | 341890 | G | A | [symbol] | CED82113 |
| X₇₄₅₆ | M8 | 33 | 374131 | A | G | [symbol] | CED82121- |
| | | | | | | | CED82122 |
| X₇₄₅₇ | M8 | 33 | 374134 | A | G | [symbol] | CED82121- |
| | | | | | | | CED82122 |
| X₇₄₅₈ | M8 | 33 | 374137 | A | T | [symbol] | CED82121- |
| | | | | | | | CED82122 |
| X₇₄₅₉ | M8 | 33 | 374150 | A | C | [symbol] | CED82121- |
| | | | | | | | CED82122 |
| X₇₄₆₀ | M8 | 33 | 375339 | A | G | [symbol] | CED82121- |
| | | | | | | | CED82122 |
| X₇₄₆₁ | M8 | 33 | 375366 | T | C | [symbol] | CED82121- |
| | | | | | | | CED82122 |
| X₇₄₆₂ | M8 | 33 | 385139 | G | C | [symbol] | CED82122 |
| X₇₄₆₃ | M8 | 33 | 385155 | T | C | [symbol] | CED82122 |
| X₇₄₆₄ | M8 | 33 | 385319 | A | C | [symbol] | CED82122 |
| X₇₄₆₅ | M8 | 33 | 385527 | C | T | [symbol] | CED82122 |
| X₇₄₆₆ | M8 | 33 | 386116 | G | C | [symbol] | CED82124 |
| X₇₄₆₇ | M8 | 33 | 428329 | G | A | [symbol] | CED82136 |
| X₇₄₆₈ | M8 | 33 | 448815 | G | A | [symbol] | CED82144 |
| X₇₄₆₉ | M8 | 33 | 453975 | C | T | [symbol] | CED82147 |
| X₇₄₇₀ | M8 | 33 | 455451 | C | T | [symbol] | CED82146 |
| X₇₄₇₁ | M8 | 33 | 476006 | A | G | [symbol] | CED82153 |
| X₇₄₇₂ | M8 | 33 | 481361 | G | A | [symbol] | CED82157 |
| X₇₄₇₃ | M8 | 33 | 509127 | C | T | [symbol] | CED82166 |
| X₇₄₇₄ | M8 | 33 | 628247 | C | T | [symbol] | CED82205 |
| X₇₄₇₅ | M8 | 33 | 639242 | G | A | [symbol] | CED82208 |
| X₇₄₇₆ | M8 | 33 | 652012 | G | A | [symbol] | CED82212 |
| X₇₄₇₇ | M8 | 33 | 699423 | C | T | [symbol] | CED82227 |
| X₇₄₇₈ | M8 | 33 | 715901 | C | T | [symbol] | CED82231 |
| X₇₄₇₉ | M8 | 33 | 729705 | C | T | [symbol] | CED82234 |
| X₇₄₈₀ | M8 | 33 | 750883 | T | C | [symbol] | CED82240 |
| X₇₄₈₁ | M8 | 33 | 816048 | C | T | [symbol] | CED82262 |
| X₇₄₈₂ | M8 | 33 | 822184 | G | A | [symbol] | CED82264 |
| X₇₄₈₃ | M8 | 33 | 829825 | C | T | [symbol] | CED82271 |
| X₇₄₈₄ | M8 | 33 | 917771 | A | T | [symbol] | CED82294 |
| X₇₄₈₅ | M8 | 33 | 936571 | A | G | [symbol] | CED82300 |
| X₇₄₈₆ | M8 | 33 | 936600 | G | A | [symbol] | CED82300 |
| X₇₄₈₇ | M8 | 33 | 936667 | A | G | [symbol] | CED82300 |
| X₇₄₈₈ | M8 | 33 | 938634 | A | G | [symbol] | CED82300 |
| X₇₄₈₉ | M8 | 33 | 947993 | T | A | [symbol] | CED82302 |
| X₇₄₉₀ | M8 | 33 | 972701 | C | T | [symbol] | CED82309 |
| X₇₄₉₁ | M8 | 33 | 1049699 | G | A | [symbol] | CED82334 |
| X₇₄₉₂ | M8 | 33 | 1087834 | G | A | [symbol] | CED82350 |
| X₇₄₉₃ | M8 | 33 | 1088320 | C | T | [symbol] | CED82349 |
| X₇₄₉₄ | M8 | 33 | 1127676 | G | A | [symbol] | CED82358 |
| X₇₄₉₅ | M8 | 33 | 1138444 | C | T | [symbol] | CED82363 |
| X₇₄₉₆ | M8 | 33 | 1165914 | G | A | [symbol] | CED82372 |
| X₇₄₉₇ | M8 | 33 | 1191727 | C | T | [symbol] | CED82379 |
| X₇₄₉₈ | M8 | 33 | 1311181 | G | A | [symbol] | CED82413 |
| X₇₄₉₉ | M8 | 33 | 1316789 | C | T | [symbol] | CED82415 |
| X₇₅₀₀ | M8 | 33 | 1324395 | G | A | [symbol] | CED82417 |
| X₇₅₀₁ | M8 | 33 | 1339376 | C | T | [symbol] | CED82424 |
| X₇₅₀₂ | M8 | 33 | 1349009 | C | T | [symbol] | CED82427 |
| X₇₅₀₃ | M8 | 33 | 1367015 | C | T | [symbol] | CED82432 |
| X₇₅₀₄ | M8 | 33 | 1411059 | C | T | [symbol] | CED82446 |
| X₇₅₀₅ | M8 | 33 | 1460436 | C | T | [symbol] | CED82462 |
| X₇₅₀₆ | M8 | 33 | 1499347 | G | A | [symbol] | CED82472 |
| X₇₅₀₇ | M8 | 33 | 1507482 | A | G | [symbol] | CED82477 |
| X₇₅₀₈ | M8 | 33 | 1514686 | C | T | [symbol] | CED82478 |
| X₇₅₀₉ | M8 | 33 | 1515148 | G | A | [symbol] | CED82478 |
| X₇₅₁₀ | M8 | 33 | 1537835 | G | A | [symbol] | CED82483 |
| X₇₅₁₁ | M8 | 33 | 1544767 | A | C | [symbol] | CED82485- |
| | | | | | | | CED82486 |
| X₇₅₁₂ | M8 | 33 | 1585699 | C | T | [symbol] | CED82497 |
| X₇₅₁₃ | M8 | 33 | 1587443 | C | T | [symbol] | CED82497 |
| X₇₅₁₄ | M8 | 33 | 1596242 | C | T | [symbol] | CED82498 |
| X₇₅₁₅ | M8 | 33 | 1638726 | G | A | [symbol] | CED82513 |
| X₇₅₁₆ | M8 | 33 | 1642659 | G | A | [symbol] | CED82515 |
| X₇₅₁₇ | M8 | 33 | 1651969 | A | T | [symbol] | CED82517 |
| X₇₅₁₈ | M8 | 33 | 1689192 | C | T | [symbol] | CED82529 |
| X₇₅₁₉ | M8 | 33 | 1700000 | G | A | [symbol] | CED82534 |
| X₇₅₂₀ | M8 | 33 | 1716261 | C | T | [symbol] | CED82538 |
| X₇₅₂₁ | M8 | 33 | 1728730 | G | A | [symbol] | CED82541 |
| X₇₅₂₂ | M8 | 33 | 1740595 | C | T | [symbol] | CED82545 |
| X₇₅₂₃ | M8 | 33 | 1745517 | C | T | [symbol] | CED82546 |
| X₇₅₂₄ | M8 | 33 | 1780044 | G | A | [symbol] | CED82555 |
| X₇₅₂₅ | M8 | 33 | 1838447 | G | A | [symbol] | CED82575 |
| X₇₅₂₆ | M8 | 33 | 1841263 | G | A | [symbol] | CED82576 |
| X₇₅₂₇ | M8 | 33 | 1848935 | C | T | [symbol] | CED82579 |
| X₇₅₂₈ | M8 | 33 | 1860991 | G | A | [symbol] | CED82583 |
| X₇₅₂₉ | M8 | 33 | 1887401 | C | T | [symbol] | CED82591 |
| X₇₅₃₀ | M8 | 33 | 1905896 | G | A | [symbol] | CED82599 |
| X₇₅₃₁ | M8 | 33 | 1959142 | G | A | [symbol] | CED82619 |
| X₇₅₃₂ | M8 | 33 | 1967112 | C | T | [symbol] | CED82622 |
| X₇₅₃₃ | M8 | 33 | 2010230 | C | T | [symbol] | CED82636 |
| X₇₅₃₄ | M8 | 33 | 2034962 | G | A | [symbol] | CED82645 |
| X₇₅₃₅ | M8 | 33 | 2046185 | C | T | [symbol] | CED82650 |
| X₇₅₃₆ | M8 | 36 | 320 | G | A | [symbol] | |
| X₇₅₃₇ | M8 | 36 | 1056 | G | A | [symbol] | |
| X₇₅₃₈ | M8 | 36 | 1295 | C | T | [symbol] | |
| X₇₅₃₉ | M8 | 36 | 1461 | A | T | [symbol] | |
| X₇₅₄₀ | M8 | 42 | 804 | C | T | [symbol] | CDZ96333 |
| X₇₅₄₁ | M8 | 42 | 1559 | G | A | [symbol] | CDZ96333 |
| X₇₅₄₂ | M8 | 48 | 563 | C | T | [symbol] | |
| X₇₅₄₃ | M8 | 48 | 565 | T | C | [symbol] | |
| X₇₅₄₄ | M8 | 48 | 576 | G | A | [symbol] | |
| X₇₅₄₅ | M8 | 48 | 580 | T | A | [symbol] | |
| X₇₅₄₆ | M8 | 48 | 720 | A | G | [symbol] | |
| X₇₅₄₇ | M8 | 50 | 145 | G | A | [symbol] | |
| X₇₅₄₈ | M8 | 52 | 123705 | C | T | [symbol] | CED82700 |
| X₇₅₄₉ | M8 | 52 | 144382 | C | T | [symbol] | CED82709 |
| X₇₅₅₀ | M8 | 52 | 145060 | G | A | [symbol] | CED82708 |
| X₇₅₅₁ | M8 | 52 | 151974 | C | T | [symbol] | CED82712 |
| X₇₅₅₂ | M8 | 52 | 183986 | C | T | [symbol] | CED82722 |
| X₇₅₅₃ | M8 | 52 | 207354 | C | T | [symbol] | CED82730 |
| X₇₅₅₄ | M8 | 52 | 240241 | T | C | [symbol] | CED82734 |
| X₇₅₅₅ | M8 | 52 | 243203 | G | A | [symbol] | CED82733 |
| X₇₅₅₆ | M8 | 52 | 244305 | G | A | [symbol] | CED82734 |
| X₇₅₅₇ | M8 | 52 | 284733 | G | A | [symbol] | CED82747 |
| X₇₅₅₈ | M8 | 52 | 344346 | G | A | [symbol] | CED82767 |
| X₇₅₅₉ | M8 | 52 | 358601 | G | A | [symbol] | CED82772 |
| X₇₅₆₀ | M8 | 52 | 360279 | C | T | [symbol] | CED82772 |
| X₇₅₆₁ | M8 | 52 | 390095 | G | A | [symbol] | CED82784 |
| X₇₅₆₂ | M8 | 52 | 390988 | C | T | [symbol] | CED82785 |
| X₇₅₆₃ | M8 | 52 | 395374 | G | A | [symbol] | CED82786 |
| X₇₅₆₄ | M8 | 52 | 398723 | C | T | [symbol] | CED82786 |
| X₇₅₆₅ | M8 | 52 | 398728 | C | T | [symbol] | CED82786 |
| X₇₅₆₆ | M8 | 52 | 473123 | G | A | [symbol] | CED82810 |
| X₇₅₆₇ | M8 | 52 | 487472 | C | T | [symbol] | CED82814 |
| X₇₅₆₈ | M8 | 52 | 516267 | C | T | [symbol] | CED82823 |
| X₇₅₆₉ | M8 | 52 | 542542 | C | T | [symbol] | CED82833 |
| X₇₅₇₀ | M8 | 52 | 552099 | G | A | [symbol] | CED82837 |
| X₇₅₇₁ | M8 | 52 | 552173 | G | A | [symbol] | CED82837 |
| X₇₅₇₂ | M8 | 52 | 553027 | G | A | [symbol] | CED82837 |
| X₇₅₇₃ | M8 | 52 | 557092 | C | T | [symbol] | CED82840 |
| X₇₅₇₄ | M8 | 52 | 631479 | C | T | [symbol] | CED82860 |
| X₇₅₇₅ | M8 | 52 | 697002 | C | T | [symbol] | CED82888 |
| X₇₅₇₆ | M8 | 52 | 700204 | G | A | [symbol] | CED82888 |
| X₇₅₇₇ | M8 | 52 | 710492 | C | T | [symbol] | CED82891 |
| X₇₅₇₈ | M8 | 52 | 725138 | C | T | [symbol] | CED82899 |
| X₇₅₇₉ | M8 | 52 | 741861 | G | A | [symbol] | CED82905 |
| X₇₅₈₀ | M8 | 52 | 746548 | G | A | [symbol] | CED82907 |
| X₇₅₈₁ | M8 | 52 | 783981 | C | T | [symbol] | CED82919 |
| X₇₅₈₂ | M8 | 52 | 817452 | T | A | [symbol] | CED82928 |
| X₇₅₈₃ | M8 | 52 | 819924 | C | T | [symbol] | CED82929 |
| X₇₅₈₄ | M8 | 52 | 840755 | C | T | [symbol] | CED82935 |
| X₇₅₈₅ | M8 | 52 | 849671 | G | A | [symbol] | CED82940 |
| X₇₅₈₆ | M8 | 52 | 928854 | C | T | [symbol] | CED82971 |
| X₇₅₈₇ | M8 | 52 | 938650 | G | A | [symbol] | CED82973 |
| X₇₅₈₈ | M8 | 52 | 967316 | A | T | [symbol] | CED82984 |
| X₇₅₈₉ | M8 | 52 | 967701 | T | A | [symbol] | CED82983 |
| X₇₅₉₀ | M8 | 52 | 1003899 | G | A | [symbol] | CED83001 |
| X₇₅₉₁ | M8 | 52 | 1009554 | C | T | [symbol] | CED83003 |
| X₇₅₉₂ | M8 | 52 | 1010007 | C | T | [symbol] | CED83002 |
| X₇₅₉₃ | M8 | 52 | 1020804 | G | A | [symbol] | CED83005 |
| X₇₅₉₄ | M8 | 52 | 1021202 | C | T | [symbol] | CED83005 |
| X₇₅₉₅ | M8 | 52 | 1029498 | G | A | [symbol] | CED83007 |
| X₇₅₉₆ | M8 | 52 | 1043011 | C | T | [symbol] | CED83012 |
| X₇₅₉₇ | M8 | 52 | 1067895 | C | T | [symbol] | CED83020 |
| X₇₅₉₈ | M8 | 52 | 1158103 | C | T | [symbol] | CED83051 |
| X₇₅₉₉ | M8 | 52 | 1163067 | G | A | [symbol] | CED83051 |
| X₇₆₀₀ | M8 | 52 | 1227910 | G | A | [symbol] | CED83074 |
| X₇₆₀₁ | M8 | 52 | 1297876 | G | A | [symbol] | CED83099 |
| X₇₆₀₂ | M8 | 52 | 1336560 | G | A | [symbol] | CED83113 |
| X₇₆₀₃ | M8 | 52 | 1350463 | C | T | [symbol] | CED83118 |
| X₇₆₀₄ | M8 | 52 | 1356590 | C | T | [symbol] | CED83120 |
| X₇₆₀₅ | M8 | 52 | 1362217 | C | T | [symbol] | CED83122 |
| X₇₆₀₆ | M8 | 52 | 1363357 | G | A | [symbol] | CED83122 |
| X₇₆₀₇ | M8 | 52 | 1363405 | C | T | [symbol] | CED83123 |
| X₇₆₀₈ | M8 | 52 | 1365822 | C | T | [symbol] | CED83124 |
| X₇₆₀₉ | M8 | 52 | 1392238 | C | T | [symbol] | CED83130 |
| X₇₆₁₀ | M8 | 52 | 1399439 | G | A | [symbol] | CED83134 |
| X₇₆₁₁ | M8 | 52 | 1458571 | C | T | [symbol] | CED83158 |
| X₇₆₁₂ | M8 | 52 | 1475408 | C | T | [symbol] | CED83166 |
| X₇₆₁₃ | M8 | 52 | 1525824 | G | T | [symbol] | CED83180 |
| X₇₆₁₄ | M8 | 52 | 1526796 | G | A | [symbol] | CED83181 |
| X₇₆₁₅ | M8 | 52 | 1540879 | C | T | [symbol] | CED83186 |
| X₇₆₁₆ | M8 | 52 | 1583655 | C | T | [symbol] | CED83206 |
| X₇₆₁₇ | M8 | 52 | 1621166 | C | T | [symbol] | CED83219 |
| X₇₆₁₈ | M8 | 52 | 1700952 | G | A | [symbol] | CED83246 |
| X₇₆₁₉ | M8 | 52 | 1708900 | A | G | [symbol] | CED83249 |
| X₇₆₂₀ | M8 | 52 | 1715136 | C | T | [symbol] | CED83250 |
| X₇₆₂₁ | M8 | 52 | 1715899 | C | T | [symbol] | CED83250 |
| X₇₆₂₂ | M8 | 52 | 1716210 | C | T | [symbol] | CED83250 |
| X₇₆₂₃ | M8 | 52 | 1760440 | G | A | [symbol] | CED83266 |
| X₇₆₂₄ | M8 | 52 | 1765533 | G | A | [symbol] | CED83268 |
| X₇₆₂₅ | M8 | 52 | 1787135 | C | T | [symbol] | CED83275 |
| X₇₆₂₆ | M8 | 52 | 1793370 | G | A | [symbol] | CED83275 |
| X₇₆₂₇ | M8 | 52 | 1796780 | G | A | [symbol] | CED83279 |
| X₇₆₂₈ | M8 | 52 | 1807309 | G | A | [symbol] | CED83283 |
| X₇₆₂₉ | M8 | 52 | 1864608 | G | A | [symbol] | CED83303 |
| X₇₆₃₀ | M8 | 52 | 1871310 | C | T | [symbol] | CED83304 |
| X₇₆₃₁ | M8 | 52 | 1874150 | G | T | [symbol] | CED83305 |
| X₇₆₃₂ | M8 | 52 | 1874531 | C | T | [symbol] | CED83306 |
| X₇₆₃₃ | M8 | 52 | 1888989 | C | T | [symbol] | CED83312 |
| X₇₆₃₄ | M8 | 52 | 1892615 | C | T | [symbol] | CED83313 |
| X₇₆₃₅ | M8 | 52 | 1915927 | G | A | [symbol] | CED83315 |
| X₇₆₃₆ | M8 | 52 | 1938393 | C | T | [symbol] | CED83322 |
| X₇₆₃₇ | M8 | 52 | 1956479 | C | T | [symbol] | CED83330 |
| X₇₆₃₈ | M8 | 52 | 1987096 | G | A | [symbol] | CED83341 |
| X₇₆₃₉ | M8 | 52 | 2041781 | C | T | [symbol] | CED83355 |
| X₇₆₄₀ | M8 | 52 | 2047954 | G | A | [symbol] | CED83358 |
| X₇₆₄₁ | M8 | 52 | 2050245 | G | A | [symbol] | CED83359 |
| X₇₆₄₂ | M8 | 52 | 2071127 | C | T | [symbol] | CED83365 |
| X₇₆₄₃ | M8 | 52 | 2081390 | G | A | [symbol] | CED83367 |
| X₇₆₄₄ | M8 | 52 | 2093148 | C | T | [symbol] | CED83368 |
| X₇₆₄₅ | M8 | 52 | 2093251 | C | T | [symbol] | CED83368 |
| X₇₆₄₆ | M8 | 52 | 2120665 | C | T | [symbol] | CED83376 |
| X₇₆₄₇ | M8 | 52 | 2136885 | A | G | [symbol] | CED83382 |
| X₇₆₄₈ | M8 | 52 | 2162878 | G | A | [symbol] | CED83392 |
| X₇₆₄₉ | M8 | 52 | 2171271 | C | T | [symbol] | CED83395 |
| X₇₆₅₀ | M8 | 52 | 2258192 | C | T | [symbol] | CED83422 |
| X₇₆₅₁ | M8 | 52 | 2265219 | C | T | [symbol] | CED83425 |
| X₇₆₅₂ | M8 | 52 | 2266378 | C | T | [symbol] | CED83423 |
| X₇₆₅₃ | M8 | 52 | 2296638 | G | A | [symbol] | CED83432 |
| X₇₆₅₄ | M8 | 52 | 2308421 | T | C | [symbol] | CED83439 |
| X₇₆₅₅ | M8 | 52 | 2327266 | C | T | [symbol] | CED83445 |
| X₇₆₅₆ | M8 | 52 | 2400778 | C | T | [symbol] | CED83463 |
| X₇₆₅₇ | M8 | 52 | 2531584 | C | T | [symbol] | CED83507 |
| X₇₆₅₈ | M8 | 52 | 2543220 | C | T | [symbol] | CED83509 |
| X₇₆₅₉ | M8 | 52 | 2549953 | A | G | [symbol] | CED83516 |
| X₇₆₆₀ | M8 | 52 | 2566106 | C | T | [symbol] | CED83520 |
| X₇₆₆₁ | M8 | 52 | 2575090 | A | G | [symbol] | CED83525 |
| X₇₆₆₂ | M8 | 53 | 26291 | G | A | [symbol] | CDZ96348 |
| X₇₆₆₃ | M8 | 54 | 4815 | G | A | [symbol] | CDZ96384 |
| X₇₆₆₄ | M8 | 54 | 4816 | A | T | [symbol] | CDZ96384 |
| X₇₆₆₅ | M8 | 54 | 4817 | G | C | [symbol] | CDZ96384 |
| X₇₆₆₆ | M8 | 54 | 4821 | G | A | [symbol] | CDZ96384 |
| X₇₆₆₇ | M8 | 54 | 16963 | C | T | [symbol] | CDZ96386 |
| X₇₆₆₈ | M8 | 54 | 72235 | G | A | [symbol] | CDZ96406 |
| X₇₆₆₉ | M8 | 54 | 106086 | G | A | [symbol] | CDZ96416 |
| X₇₆₇₀ | M8 | 54 | 119439 | C | T | [symbol] | CDZ96420 |
| X₇₆₇₁ | M8 | 54 | 129380 | C | T | [symbol] | CDZ96423 |
| X₇₆₇₂ | M8 | 54 | 164317 | A | T | [symbol] | CDZ96437 |
| X₇₆₇₃ | M8 | 54 | 194230 | G | A | [symbol] | CDZ96446 |
| X₇₆₇₄ | M8 | 54 | 195804 | G | A | [symbol] | CDZ96447 |
| X₇₆₇₅ | M8 | 54 | 202467 | C | T | [symbol] | CDZ96448 |
| X₇₆₇₆ | M8 | 54 | 206494 | G | A | [symbol] | CDZ96450 |
| X₇₆₇₇ | M8 | 54 | 207267 | G | A | [symbol] | CDZ96450 |
| X₇₆₇₈ | M8 | 54 | 207737 | C | T | [symbol] | CDZ96450 |
| X₇₆₇₉ | M8 | 54 | 245840 | G | A | [symbol] | CDZ96464 |
| X₇₆₈₀ | M8 | 54 | 274617 | A | T | [symbol] | CDZ96471 |
| X₇₆₈₁ | M8 | 54 | 278479 | C | T | [symbol] | CDZ96474 |
| X₇₆₈₂ | M8 | 54 | 303553 | T | C | [symbol] | CDZ96484 |
| X₇₆₈₃ | M8 | 54 | 357141 | G | A | [symbol] | CDZ96496 |
| X₇₆₈₄ | M8 | 54 | 370320 | G | A | [symbol] | CDZ96499 |
| X₇₆₈₅ | M8 | 54 | 391223 | A | G | [symbol] | CDZ96509 |
| X₇₆₈₆ | M8 | 54 | 395454 | G | A | [symbol] | CDZ96509 |
| X₇₆₈₇ | M8 | 54 | 413765 | G | A | [symbol] | CDZ96516 |
| X₇₆₈₈ | M8 | 54 | 427542 | C | T | [symbol] | CDZ96520 |
| X₇₆₈₉ | M8 | 54 | 431404 | C | T | [symbol] | CDZ96520 |
| X₇₆₉₀ | M8 | 54 | 478527 | C | T | [symbol] | CDZ96537 |
| X₇₆₉₁ | M8 | 54 | 537282 | T | C | [symbol] | CDZ96557 |
| X₇₆₉₂ | M8 | 54 | 583996 | G | A | [symbol] | CDZ96570 |
| X₇₆₉₃ | M8 | 54 | 616268 | A | G | [symbol] | CDZ96581 |
| X₇₆₉₄ | M8 | 54 | 631489 | G | A | [symbol] | CDZ96585 |
| X₇₆₉₅ | M8 | 54 | 733193 | T | C | [symbol] | CDZ96619 |
| X₇₆₉₆ | M8 | 54 | 743396 | G | A | [symbol] | CDZ96621 |
| X₇₆₉₇ | M8 | 58 | 93 | T | C | [symbol] | |
| X₇₆₉₈ | M8 | 64 | 2113 | G | A | [symbol] | CDZ96626 |
| X₇₆₉₉ | M8 | 65 | 124 | C | T | [symbol] | CDZ96627 |
| X₇₇₀₀ | M8 | 67 | 111 | G | A | [symbol] | |
| X₇₇₀₁ | M8 | 67 | 176 | C | T | [symbol] | |
| X₇₇₀₂ | M8 | 69 | 19892 | T | C | [symbol] | CED83533 |
| X₇₇₀₃ | M8 | 69 | 19893 | G | A | [symbol] | CED83533 |
| X₇₇₀₄ | M8 | 69 | 20845 | C | T | [symbol] | CED83532 |
| X₇₇₀₅ | M8 | 69 | 29006 | G | A | [symbol] | CED83534 |
| X₇₇₀₆ | M8 | 69 | 48869 | G | A | [symbol] | CED83542 |
| X₇₇₀₇ | M8 | 69 | 52428 | G | A | [symbol] | CED83541 |
| X₇₇₀₈ | M8 | 69 | 55826 | G | A | [symbol] | CED83545 |
| X₇₇₀₉ | M8 | 69 | 82710 | G | A | [symbol] | CED83554 |
| X₇₇₁₀ | M8 | 69 | 107920 | C | T | [symbol] | CED83561 |
| X₇₇₁₁ | M8 | 69 | 148757 | C | T | [symbol] | CED83575 |
| X₇₇₁₂ | M8 | 69 | 179873 | C | T | [symbol] | CED83585 |
| X₇₇₁₃ | M8 | 69 | 196810 | G | A | [symbol] | CED83594 |
| X₇₇₁₄ | M8 | 69 | 201005 | G | A | [symbol] | CED83595 |
| X₇₇₁₅ | M8 | 69 | 201292 | G | A | [symbol] | CED83595 |
| X₇₇₁₆ | M8 | 69 | 312480 | A | G | [symbol] | CED83633 |
| X₇₇₁₇ | M8 | 69 | 371916 | C | T | [symbol] | CED83653 |
| X₇₇₁₈ | M8 | 69 | 384418 | G | A | [symbol] | CED83656 |
| X₇₇₁₉ | M8 | 69 | 386371 | C | T | [symbol] | CED83657 |
| X₇₇₂₀ | M8 | 69 | 415659 | C | T | [symbol] | CED83665 |
| X₇₇₂₁ | M8 | 69 | 431248 | G | A | [symbol] | CED83671 |
| X₇₇₂₂ | M8 | 69 | 461986 | G | A | [symbol] | CED83680 |
| X₇₇₂₃ | M8 | 69 | 523701 | C | T | [symbol] | CED83701 |
| X₇₇₂₄ | M8 | 69 | 534495 | C | T | [symbol] | CED83704 |
| X₇₇₂₅ | M8 | 69 | 585845 | G | A | [symbol] | CED83722 |
| X₇₇₂₆ | M8 | 69 | 631511 | G | A | [symbol] | CED83742 |
| X₇₇₂₇ | M8 | 69 | 637299 | T | C | [symbol] | CED83744 |
| X₇₇₂₈ | M8 | 69 | 638135 | G | A | [symbol] | CED83744 |
| X₇₇₂₉ | M8 | 69 | 675579 | G | A | [symbol] | CED83760 |
| X₇₇₃₀ | M8 | 69 | 676581 | G | A | [symbol] | CED83760 |
| X₇₇₃₁ | M8 | 69 | 676853 | G | A | [symbol] | CED83759 |
| X₇₇₃₂ | M8 | 69 | 678406 | C | T | [symbol] | CED83759 |
| X₇₇₃₃ | M8 | 69 | 682770 | C | T | [symbol] | CED83763 |
| X₇₇₃₄ | M8 | 69 | 741255 | C | T | [symbol] | CED83781 |
| X₇₇₃₅ | M8 | 69 | 761819 | C | T | [symbol] | CED83789 |
| X₇₇₃₆ | M8 | 69 | 777063 | G | A | [symbol] | CED83792 |
| X₇₇₃₇ | M8 | 69 | 859081 | C | T | [symbol] | CED83813 |
| X₇₇₃₈ | M8 | 69 | 865820 | C | T | [symbol] | CED83814 |
| X₇₇₃₉ | M8 | 69 | 869706 | G | A | [symbol] | CED83815 |
| X₇₇₄₀ | M8 | 69 | 892199 | G | A | [symbol] | CED83822 |
| X₇₇₄₁ | M8 | 69 | 894019 | G | A | [symbol] | CED83821 |
| X₇₇₄₂ | M8 | 69 | 894462 | C | T | [symbol] | CED83821 |
| X₇₇₄₃ | M8 | 69 | 930700 | C | T | [symbol] | CED83835 |
| X₇₇₄₄ | M8 | 69 | 971219 | C | T | [symbol] | CED83847 |
| X₇₇₄₅ | M8 | 69 | 988364 | G | A | [symbol] | CED83857 |
| X₇₇₄₆ | M8 | 69 | 989781 | G | A | [symbol] | CED83858 |
| X₇₇₄₇ | M8 | 69 | 994927 | C | T | [symbol] | CED83859 |
| X₇₇₄₈ | M8 | 69 | 1017805 | G | A | [symbol] | CED83865 |
| X₇₇₄₉ | M8 | 69 | 1038140 | G | A | [symbol] | CED83874 |
| X₇₇₅₀ | M8 | 69 | 1072756 | G | A | [symbol] | CED83886 |
| X₇₇₅₁ | M8 | 69 | 1084824 | G | A | [symbol] | CED83891 |
| X₇₇₅₂ | M8 | 69 | 1084835 | C | T | [symbol] | CED83891 |
| X₇₇₅₃ | M8 | 69 | 1084848 | A | G | [symbol] | CED83891 |
| X₇₇₅₄ | M8 | 69 | 1084866 | A | G | [symbol] | CED83891 |
| X₇₇₅₅ | M8 | 69 | 1084931 | C | T | [symbol] | CED83891 |
| X₇₇₅₆ | M8 | 69 | 1102164 | C | T | [symbol] | CED83897 |
| X₇₇₅₇ | M8 | 69 | 1109785 | C | T | [symbol] | CED83899 |
| X₇₇₅₈ | M8 | 69 | 1109813 | A | G | [symbol] | CED83899 |
| X₇₇₅₉ | M8 | 69 | 1109818 | A | G | [symbol] | CED83899 |
| X₇₇₆₀ | M8 | 69 | 1109819 | T | A | [symbol] | CED83899 |
| X₇₇₆₁ | M8 | 69 | 1109823 | T | C | [symbol] | CED83899 |
| X₇₇₆₂ | M8 | 69 | 1109830 | A | G | [symbol] | CED83899 |
| X₇₇₆₃ | M8 | 69 | 1109831 | C | A | [symbol] | CED83899 |
| X₇₇₆₄ | M8 | 69 | 1109835 | A | G | [symbol] | CED83899 |
| X₇₇₆₅ | M8 | 69 | 1143597 | C | G | [symbol] | CED83911 |
| X₇₇₆₆ | M8 | 69 | 1153118 | G | A | [symbol] | CED83915 |
| X₇₇₆₇ | M8 | 69 | 1199155 | C | T | [symbol] | CED83929 |
| X₇₇₆₈ | M8 | 69 | 1218409 | G | A | [symbol] | CED83936 |
| X₇₇₆₉ | M8 | 69 | 1228996 | G | A | [symbol] | CED83939 |
| X₇₇₇₀ | M8 | 69 | 1229023 | G | A | [symbol] | CED83939 |
| X₇₇₇₁ | M8 | 69 | 1245509 | C | T | [symbol] | CED83943 |
| X₇₇₇₂ | M8 | 69 | 1255967 | C | T | [symbol] | CED83949 |
| X₇₇₇₃ | M8 | 69 | 1260087 | G | A | [symbol] | CED83949 |
| X₇₇₇₄ | M8 | 69 | 1285491 | T | C | [symbol] | CED83961 |
| X₇₇₇₅ | M8 | 69 | 1326247 | G | A | [symbol] | CED83969 |
| X₇₇₇₆ | M8 | 69 | 1342909 | G | A | [symbol] | CED83975 |
| X₇₇₇₇ | M8 | 69 | 1372486 | C | T | [symbol] | CED83987 |
| X₇₇₇₈ | M8 | 69 | 1411237 | C | T | [symbol] | CED84001 |
| X₇₇₇₉ | M8 | 69 | 1411421 | C | T | [symbol] | CED83999 |
| X₇₇₈₀ | M8 | 69 | 1412234 | G | A | [symbol] | CED83999 |
| X₇₇₈₁ | M8 | 69 | 1433913 | C | T | [symbol] | CED84007 |
| X₇₇₈₂ | M8 | 69 | 1485040 | G | A | [symbol] | CED84023 |
| X₇₇₈₃ | M8 | 69 | 1529637 | C | T | [symbol] | CED84038 |
| X₇₇₈₄ | M8 | 69 | 1539964 | C | T | [symbol] | CED84041 |
| X₇₇₈₅ | M8 | 69 | 1590302 | G | A | [symbol] | CED84059 |
| X₇₇₈₆ | M8 | 69 | 1601173 | C | T | [symbol] | CED84062 |
| X₇₇₈₇ | M8 | 69 | 1652288 | C | T | [symbol] | CED84077 |
| X₇₇₈₈ | M8 | 69 | 1674261 | C | T | [symbol] | CED84084 |
| X₇₇₈₉ | M8 | 69 | 1678475 | C | T | [symbol] | CED84085 |
| X₇₇₉₀ | M8 | 69 | 1687066 | A | G | [symbol] | CED84088 |
| X₇₇₉₁ | M8 | 69 | 1687394 | G | A | [symbol] | CED84087 |
| X₇₇₉₂ | M8 | 69 | 1688555 | C | T | [symbol] | CED84088 |
| X₇₇₉₃ | M8 | 69 | 1688570 | C | T | [symbol] | CED84088 |
| X₇₇₉₄ | M8 | 69 | 1714728 | G | A | [symbol] | CED84097 |
| X₇₇₉₅ | M8 | 69 | 1735172 | G | A | [symbol] | CED84108 |
| X₇₇₉₆ | M8 | 69 | 1740723 | T | C | [symbol] | CED84109 |
| X₇₇₉₇ | M8 | 69 | 1771849 | C | T | [symbol] | CED84116 |
| X₇₇₉₈ | M8 | 69 | 1784836 | C | T | [symbol] | CED84123 |
| X₇₇₉₉ | M8 | 69 | 1792597 | C | T | [symbol] | CED84126 |
| X₇₈₀₀ | M8 | 69 | 1800584 | G | A | [symbol] | CED84129 |
| X₇₈₀₁ | M8 | 69 | 1854739 | G | A | [symbol] | CED84145 |
| X₇₈₀₂ | M8 | 69 | 1855951 | C | T | [symbol] | CED84145 |
| X₇₈₀₃ | M8 | 69 | 1871563 | G | A | [symbol] | CED84153 |
| X₇₈₀₄ | M8 | 69 | 1924621 | C | T | [symbol] | CED84172 |
| X₇₈₀₅ | M8 | 69 | 1967529 | C | T | [symbol] | CED84189 |
| X₇₈₀₆ | M8 | 69 | 1968848 | A | G | [symbol] | CED84189 |
| X₇₈₀₇ | M8 | 69 | 2001469 | C | T | [symbol] | CED84197 |
| X₇₈₀₈ | M8 | 69 | 2089848 | A | G | [symbol] | CED84232 |
| X₇₈₀₉ | M8 | 69 | 2089870 | C | T | [symbol] | CED84232 |
| X₇₈₁₀ | M8 | 69 | 2089876 | C | A | [symbol] | CED84232 |
| X₇₈₁₁ | M8 | 69 | 2156050 | C | T | [symbol] | CED84252 |
| X₇₈₁₂ | M8 | 69 | 2160207 | C | T | [symbol] | CED84255 |
| X₇₈₁₃ | M8 | 69 | 2213959 | C | T | [symbol] | CED84269 |
| X₇₈₁₄ | M8 | 69 | 2240834 | C | T | [symbol] | CED84277 |
| X₇₈₁₅ | M8 | 69 | 2245069 | G | A | [symbol] | CED84279 |
| X₇₈₁₆ | M8 | 69 | 2264484 | G | A | [symbol] | CED84284 |
| X₇₈₁₇ | M8 | 69 | 2283903 | G | A | [symbol] | CED84293 |
| X₇₈₁₈ | M8 | 69 | 2366082 | C | T | [symbol] | CED84318 |
| X₇₈₁₉ | M8 | 69 | 2438727 | C | T | [symbol] | CED84343 |
| X₇₈₂₀ | M8 | 69 | 2483433 | G | A | [symbol] | CED84352 |
| X₇₈₂₁ | M8 | 72 | 93 | T | C | [symbol] | |
| X₇₈₂₂ | M8 | 72 | 584 | G | A | [symbol] | |
| X₇₈₂₃ | M8 | 72 | 856 | C | T | [symbol] | |
| X₇₈₂₄ | M8 | 72 | 1163 | C | T | [symbol] | |
| X₇₈₂₅ | M8 | 73 | 730 | C | A | [symbol] | CDZ96628 |
| X₇₈₂₆ | M8 | 77 | 18912 | A | G | [symbol] | CDZ96635 |
| X₇₈₂₇ | M8 | 77 | 34978 | G | T | [symbol] | CDZ96642 |
| X₇₈₂₈ | M8 | 77 | 39842 | G | A | [symbol] | CDZ96646 |
| X₇₈₂₉ | M8 | 77 | 84022 | G | A | [symbol] | CDZ96659 |
| X₇₈₃₀ | M8 | 77 | 116691 | G | A | [symbol] | CDZ96671 |
| X₇₈₃₁ | M8 | 78 | 1865 | C | T | [symbol] | CED84359 |
| X₇₈₃₂ | M8 | 78 | 6333 | G | A | [symbol] | CED84360 |
| X₇₈₃₃ | M8 | 78 | 21716 | C | T | [symbol] | CED84364 |
| X₇₈₃₄ | M8 | 78 | 35200 | G | A | [symbol] | CED84371 |
| X₇₈₃₅ | M8 | 78 | 109325 | G | A | [symbol] | CED84390 |
| X₇₈₃₆ | M8 | 78 | 127873 | G | A | [symbol] | CED84395 |
| X₇₈₃₇ | M8 | 78 | 158434 | G | A | [symbol] | CED84406 |
| X₇₈₃₈ | M8 | 78 | 158534 | G | A | [symbol] | CED84406 |
| X₇₈₃₉ | M8 | 78 | 200234 | C | T | [symbol] | CED84420 |
| X₇₈₄₀ | M8 | 78 | 238854 | C | T | [symbol] | CED84430 |
| X₇₈₄₁ | M8 | 78 | 262614 | A | C | [symbol] | CED84438 |
| X₇₈₄₂ | M8 | 78 | 262683 | G | A | [symbol] | CED84438 |
| X₇₈₄₃ | M8 | 78 | 263826 | C | T | [symbol] | CED84438 |
| X₇₈₄₄ | M8 | 78 | 263828 | T | C | [symbol] | CED84438 |
| X₇₈₄₅ | M8 | 78 | 281454 | C | A | [symbol] | CED84441 |
| X₇₈₄₆ | M8 | 78 | 292068 | C | T | [symbol] | CED84442 |
| X₇₈₄₇ | M8 | 78 | 292139 | A | T | [symbol] | CED84442 |
| X₇₈₄₈ | M8 | 78 | 292243 | G | A | [symbol] | CED84442 |
| X₇₈₄₉ | M8 | 78 | 298141 | C | G | [symbol] | CED84443 |
| X₇₈₅₀ | M8 | 78 | 299644 | G | A | [symbol] | CED84443 |
| X₇₈₅₁ | M8 | 78 | 301815 | T | C | [symbol] | CED84443 |
| X₇₈₅₂ | M8 | 78 | 304799 | A | C | [symbol] | CED84444 |
| X₇₈₅₃ | M8 | 78 | 311586 | C | T | [symbol] | CED84447 |
| X₇₈₅₄ | M8 | 78 | 333312 | A | G | [symbol] | CED84452 |
| X₇₈₅₅ | M8 | 78 | 368785 | G | A | [symbol] | CED84464 |
| X₇₈₅₆ | M8 | 78 | 403167 | G | A | [symbol] | CED84476 |
| X₇₈₅₇ | M8 | 78 | 404944 | G | A | [symbol] | CED84475 |
| X₇₈₅₈ | M8 | 78 | 439640 | C | T | [symbol] | CED84487 |
| X₇₈₅₉ | M8 | 78 | 462728 | G | A | [symbol] | CED84497 |
| X₇₈₆₀ | M8 | 78 | 480848 | C | T | [symbol] | CED84500 |
| X₇₈₆₁ | M8 | 78 | 506703 | G | A | [symbol] | CED84508 |
| X₇₈₆₂ | M8 | 78 | 534530 | C | T | [symbol] | CED84520 |
| X₇₈₆₃ | M8 | 78 | 611362 | C | T | [symbol] | CED84546 |
| X₇₈₆₄ | M8 | 78 | 626958 | C | A | [symbol] | CED84549 |
| X₇₈₆₅ | M8 | 78 | 631891 | C | T | [symbol] | CED84551 |
| X₇₈₆₆ | M8 | 78 | 726983 | G | A | [symbol] | CED84587 |
| X₇₈₆₇ | M8 | 78 | 763771 | G | A | [symbol] | CED84600 |
| X₇₈₆₈ | M8 | 78 | 774252 | G | A | [symbol] | CED84602 |
| X₇₈₆₉ | M8 | 78 | 847242 | G | T | [symbol] | CED84624 |
| X₇₈₇₀ | M8 | 78 | 905457 | A | G | [symbol] | CED84645 |
| X₇₈₇₁ | M8 | 78 | 952815 | G | A | [symbol] | CED84662 |
| X₇₈₇₂ | M8 | 78 | 952860 | G | A | [symbol] | CED84662 |
| X₇₈₇₃ | M8 | 78 | 1023381 | G | A | [symbol] | CED84688 |
| X₇₈₇₄ | M8 | 78 | 1086537 | C | T | [symbol] | CED84713 |
| X₇₈₇₅ | M8 | 78 | 1095322 | C | T | [symbol] | CED84715 |
| X₇₈₇₆ | M8 | 78 | 1112587 | C | T | [symbol] | CED84722 |
| X₇₈₇₇ | M8 | 78 | 1115511 | G | A | [symbol] | CED84723 |
| X₇₈₇₈ | M8 | 78 | 1199323 | C | T | [symbol] | CED84746 |
| X₇₈₇₉ | M8 | 78 | 1216573 | C | T | [symbol] | CED84752 |
| X₇₈₈₀ | M8 | 78 | 1247678 | C | T | [symbol] | CED84761 |
| X₇₈₈₁ | M8 | 78 | 1278982 | C | T | [symbol] | CED84773 |
| X₇₈₈₂ | M8 | 78 | 1302286 | C | T | [symbol] | CED84782 |
| X₇₈₈₃ | M8 | 78 | 1317124 | G | A | [symbol] | CED84787 |
| X₇₈₈₄ | M8 | 78 | 1344640 | C | T | [symbol] | CED84795 |
| X₇₈₈₅ | M8 | 78 | 1356873 | C | T | [symbol] | CED84800 |
| X₇₈₈₆ | M8 | 78 | 1376517 | G | A | [symbol] | CED84810 |
| X₇₈₈₇ | M8 | 78 | 1406981 | C | T | [symbol] | CED84821 |
| X₇₈₈₈ | M8 | 78 | 1426722 | C | T | [symbol] | CED84829 |
| X₇₈₈₉ | M8 | 78 | 1475803 | G | A | [symbol] | CED84845 |
| X₇₈₉₀ | M8 | 78 | 1495995 | C | T | [symbol] | CED84852 |
| X₇₈₉₁ | M8 | 78 | 1498179 | G | A | [symbol] | CED84852 |
| X₇₈₉₂ | M8 | 78 | 1520586 | C | T | [symbol] | CED84855 |
| X₇₈₉₃ | M8 | 78 | 1549659 | G | A | [symbol] | CED84862 |
| X₇₈₉₄ | M8 | 78 | 1568326 | C | T | [symbol] | CED84868 |
| X₇₈₉₅ | M8 | 78 | 1578844 | G | A | [symbol] | CED84871 |
| X₇₈₉₆ | M8 | 78 | 1642170 | G | A | [symbol] | CED84889 |
| X₇₈₉₇ | M8 | 78 | 1660408 | G | A | [symbol] | CED84897 |
| X₇₈₉₈ | M8 | 78 | 1694684 | C | T | [symbol] | CED84912 |
| X₇₈₉₉ | M8 | 78 | 1742796 | G | A | [symbol] | CED84926 |
| X₇₉₀₀ | M8 | 79 | 161 | T | C | [symbol] | CDZ96674 |
| X₇₉₀₁ | M8 | 79 | 6477 | T | C | [symbol] | CDZ96674- |
| | | | | | | | CDZ96675 |
| X₇₉₀₂ | M8 | 79 | 37870 | T | C | [symbol] | CDZ96683 |
| X₇₉₀₃ | M8 | 79 | 47085 | G | A | [symbol] | CDZ96684 |
| X₇₉₀₄ | M8 | 79 | 57804 | G | A | [symbol] | CDZ96687 |
| X₇₉₀₅ | M8 | 79 | 64658 | C | T | [symbol] | CDZ96688 |
| X₇₉₀₆ | M8 | 79 | 132683 | C | T | [symbol] | CDZ96713 |
| X₇₉₀₇ | M8 | 79 | 168570 | C | T | [symbol] | CDZ96727 |
| X₇₉₀₈ | M8 | 79 | 255486 | C | T | [symbol] | CDZ96758 |
| X₇₉₀₉ | M8 | 79 | 255780 | G | A | [symbol] | CDZ96757 |
| X₇₉₁₀ | M8 | 79 | 307021 | C | T | [symbol] | CDZ96777 |
| X₇₉₁₁ | M8 | 79 | 318883 | G | A | [symbol] | CDZ96779 |
| X₇₉₁₂ | M8 | 79 | 346823 | G | A | [symbol] | CDZ96789 |
| X₇₉₁₃ | M8 | 79 | 406184 | G | A | [symbol] | CDZ96808 |
| X₇₉₁₄ | M8 | 79 | 409085 | C | T | [symbol] | CDZ96810 |
| X₇₉₁₅ | M8 | 79 | 484404 | C | T | [symbol] | CDZ96840 |
| X₇₉₁₆ | M8 | 79 | 492523 | C | T | [symbol] | CDZ96842 |
| X₇₉₁₇ | M8 | 79 | 526910 | C | T | [symbol] | CDZ96854 |
| X₇₉₁₈ | M8 | 79 | 552798 | C | T | [symbol] | CDZ96861 |
| X₇₉₁₉ | M8 | 79 | 570874 | C | T | [symbol] | CDZ96867 |
| X₇₉₂₀ | M8 | 79 | 575411 | C | T | [symbol] | CDZ96868 |
| X₇₉₂₁ | M8 | 79 | 579674 | G | A | [symbol] | CDZ96871 |
| X₇₉₂₂ | M8 | 79 | 617057 | C | T | [symbol] | CDZ96882 |
| X₇₉₂₃ | M8 | 79 | 679140 | C | T | [symbol] | CDZ96904 |
| X₇₉₂₄ | M8 | 79 | 683546 | T | C | [symbol] | CDZ96904 |
| X₇₉₂₅ | M8 | 79 | 683550 | A | G | [symbol] | CDZ96904 |
| X₇₉₂₆ | M8 | 79 | 691309 | C | T | [symbol] | CDZ96911 |
| X₇₉₂₇ | M8 | 79 | 696174 | G | A | [symbol] | CDZ96911 |
| X₇₉₂₈ | M8 | 79 | 710422 | G | A | [symbol] | CDZ96916 |
| X₇₉₂₉ | M8 | 79 | 735053 | T | C | [symbol] | CDZ96928 |
| X₇₉₃₀ | M8 | 79 | 758025 | G | A | [symbol] | CDZ96931 |
| X₇₉₃₁ | M8 | 79 | 758078 | T | C | [symbol] | CDZ96931 |
| X₇₉₃₂ | M8 | 79 | 759403 | C | T | [symbol] | CDZ96931 |
| X₇₉₃₃ | M8 | 79 | 759589 | G | A | [symbol] | CDZ96932 |
| X₇₉₃₄ | M8 | 79 | 759659 | G | A | [symbol] | CDZ96931 |
| X₇₉₃₅ | M8 | 79 | 760430 | T | C | [symbol] | CDZ96932 |
| X₇₉₃₆ | M8 | 79 | 760541 | A | G | [symbol] | CDZ96932 |
| X₇₉₃₇ | M8 | 79 | 760891 | A | G | [symbol] | CDZ96932 |
| X₇₉₃₈ | M8 | 79 | 760904 | T | C | [symbol] | CDZ96932 |
| X₇₉₃₉ | M8 | 79 | 760988 | G | T | [symbol] | CDZ96932 |
| X₇₉₄₀ | M8 | 79 | 761056 | T | C | [symbol] | CDZ96932 |
| X₇₉₄₁ | M8 | 79 | 761210 | T | C | [symbol] | CDZ96932 |
| X₇₉₄₂ | M8 | 79 | 768537 | A | G | [symbol] | CDZ96933 |
| X₇₉₄₃ | M8 | 79 | 776112 | A | G | [symbol] | CDZ96934 |
| X₇₉₄₄ | M8 | 79 | 776301 | C | A | [symbol] | CDZ96934 |
| X₇₉₄₅ | M8 | 79 | 776304 | G | T | [symbol] | CDZ96934 |
| X₇₉₄₆ | M8 | 79 | 780012 | T | C | [symbol] | CDZ96934 |
| X₇₉₄₇ | M8 | 79 | 786064 | A | G | [symbol] | CDZ96934 |
| X₇₉₄₈ | M8 | 79 | 798799 | C | T | [symbol] | CDZ96939 |
| X₇₉₄₉ | M8 | 79 | 973493 | C | T | [symbol] | CDZ97000 |
| X₇₉₅₀ | M8 | 79 | 993074 | C | T | [symbol] | CDZ97006 |
| X₇₉₅₁ | M8 | 79 | 1073437 | C | A | [symbol] | CDZ97033 |
| X₇₉₅₂ | M8 | 79 | 1123288 | C | T | [symbol] | CDZ97049 |
| X₇₉₅₃ | M8 | 79 | 1140763 | G | A | [symbol] | CDZ97053 |
| X₇₉₅₄ | M8 | 79 | 1209208 | G | A | [symbol] | CDZ97077 |
| X₇₉₅₅ | M8 | 79 | 1211985 | G | A | [symbol] | CDZ97077 |
| X₇₉₅₆ | M8 | 79 | 1229129 | G | A | [symbol] | CDZ97086 |
| X₇₉₅₇ | M8 | 79 | 1231740 | C | T | [symbol] | CDZ97087 |
| X₇₉₅₈ | M8 | 79 | 1254757 | G | A | [symbol] | CDZ97095 |
| X₇₉₅₉ | M8 | 79 | 1318034 | C | T | [symbol] | CDZ97117 |
| X₇₉₆₀ | M8 | 79 | 1336766 | C | T | [symbol] | CDZ97121 |
| X₇₉₆₁ | M8 | 79 | 1344338 | G | A | [symbol] | CDZ97124 |
| X₇₉₆₂ | M8 | 79 | 1371491 | C | T | [symbol] | CDZ97129 |
| X₇₉₆₃ | M8 | 79 | 1430954 | G | A | [symbol] | CDZ97152 |
| X₇₉₆₄ | M8 | 79 | 1494219 | T | A | [symbol] | CDZ97172 |
| X₇₉₆₅ | M8 | 79 | 1540205 | C | T | [symbol] | CDZ97186 |
| X₇₉₆₆ | M8 | 79 | 1541574 | G | A | [symbol] | CDZ97186 |
| X₇₉₆₇ | M8 | 79 | 1624415 | G | A | [symbol] | CDZ97217 |
| X₇₉₆₈ | M8 | 79 | 1658469 | C | T | [symbol] | CDZ97227 |
| X₇₉₆₉ | M8 | 79 | 1674448 | G | A | [symbol] | CDZ97228 |
| X₇₉₇₀ | M8 | 79 | 1694516 | C | T | [symbol] | CDZ97233 |
| X₇₉₇₁ | M8 | 79 | 1696776 | G | A | [symbol] | CDZ97234 |
| X₇₉₇₂ | M8 | 79 | 1738540 | A | T | [symbol] | CDZ97247 |
| X₇₉₇₃ | M8 | 79 | 1772244 | G | A | [symbol] | CDZ97258 |
| X₇₉₇₄ | M8 | 79 | 1788096 | G | A | [symbol] | CDZ97262 |
| X₇₉₇₅ | M8 | 79 | 1791482 | G | A | [symbol] | CDZ97263 |
| X₇₉₇₆ | M8 | 79 | 1797660 | C | T | [symbol] | CDZ97265 |
| X₇₉₇₇ | M8 | 79 | 1797676 | G | A | [symbol] | CDZ97265 |
| X₇₉₇₈ | M8 | 79 | 1809211 | C | T | [symbol] | CDZ97268 |
| X₇₉₇₉ | M8 | 79 | 1842448 | G | A | [symbol] | CDZ97282 |
| X₇₉₈₀ | M8 | 79 | 1855037 | A | G | [symbol] | CDZ97285 |
| X₇₉₈₁ | M8 | 79 | 1859220 | A | G | [symbol] | CDZ97291 |
| X₇₉₈₂ | M8 | 79 | 1863178 | A | T | [symbol] | CDZ97292 |
| X₇₉₈₃ | M8 | 79 | 1930688 | G | A | [symbol] | CDZ97315 |
| X₇₉₈₄ | M8 | 79 | 2001789 | C | T | [symbol] | CDZ97339 |
| X₇₉₈₅ | M8 | 79 | 2002072 | C | T | [symbol] | CDZ97339 |
| X₇₉₈₆ | M8 | 79 | 2013361 | C | T | [symbol] | CDZ97344 |
| X₇₉₈₇ | M8 | 79 | 2113064 | G | A | [symbol] | CDZ97381 |
| X₇₉₈₈ | M8 | 79 | 2115870 | G | A | [symbol] | CDZ97380 |
| X₇₉₈₉ | M8 | 79 | 2121041 | G | A | [symbol] | CDZ97380 |
| X₇₉₉₀ | M8 | 79 | 2152573 | C | T | [symbol] | CDZ97392 |
| X₇₉₉₁ | M8 | 79 | 2172085 | C | T | [symbol] | CDZ97397 |
| X₇₉₉₂ | M8 | 79 | 2182096 | G | A | [symbol] | CDZ97403 |
| X₇₉₉₃ | M8 | 79 | 2188410 | G | A | [symbol] | CDZ97405 |
| X₇₉₉₄ | M8 | 79 | 2220254 | C | T | [symbol] | CDZ97414 |
| X₇₉₉₅ | M8 | 79 | 2268540 | C | T | [symbol] | CDZ97435 |
| X₇₉₉₆ | M8 | 79 | 2304361 | G | A | [symbol] | CDZ97450 |
| X₇₉₉₇ | M8 | 79 | 2317043 | G | A | [symbol] | CDZ97452 |
| X₇₉₉₈ | M8 | 79 | 2339881 | C | G | [symbol] | CDZ97460 |
| X₇₉₉₉ | M8 | 79 | 2340326 | G | A | [symbol] | CDZ97462 |
| X₈₀₀₀ | M8 | 85 | 462 | G | A | [symbol] | |
| X₈₀₀₁ | M8 | 85 | 463 | A | G | [symbol] | |
| X₈₀₀₂ | M8 | 85 | 467 | A | T | [symbol] | |
| X₈₀₀₃ | M8 | 85 | 512 | A | G | [symbol] | |
| X₈₀₀₄ | M8 | 85 | 516 | G | A | [symbol] | |
| X₈₀₀₅ | M8 | 85 | 521 | C | T | [symbol] | |
| X₈₀₀₆ | M8 | 85 | 522 | A | G | [symbol] | |
| X₈₀₀₇ | M8 | 88 | 119 | C | T | [symbol] | CDZ97464 |
| X₈₀₀₈ | M8 | 88 | 196 | G | A | [symbol] | CDZ97464 |
| X₈₀₀₉ | M8 | 88 | 898 | C | T | [symbol] | CDZ97464 |
| X₈₀₁₀ | M8 | 99 | 245 | G | A | [symbol] | |
| X₈₀₁₁ | M8 | 105 | 429 | C | T | [symbol] | CDZ97474 |
| X₈₀₁₂ | M8 | 109 | 396 | T | C | [symbol] | |
| X₈₀₁₃ | M8 | 113 | 411 | G | A | [symbol] | |
| X₈₀₁₄ | M8 | 118 | 396 | C | T | [symbol] | CDZ97478 |
| X₈₀₁₅ | M8 | 118 | 870 | G | A | [symbol] | CDZ97478 |
| X₈₀₁₆ | M8 | 118 | 1491 | G | A | [symbol] | CDZ97478 |
| X₈₀₁₇ | M8 | 121 | 318 | A | T | [symbol] | |
| X₈₀₁₈ | M8 | 124 | 72117 | G | A | [symbol] | CDZ97501 |
| X₈₀₁₉ | M8 | 124 | 72760 | G | A | [symbol] | CDZ97501 |
| X₈₀₂₀ | M8 | 124 | 94611 | G | A | [symbol] | CDZ97507 |
| X₈₀₂₁ | M8 | 124 | 156052 | G | A | [symbol] | CDZ97524 |
| X₈₀₂₂ | M8 | 124 | 166988 | C | T | [symbol] | CDZ97527 |
| X₈₀₂₃ | M8 | 124 | 207992 | C | T | [symbol] | CDZ97541 |
| X₈₀₂₄ | M8 | 124 | 222249 | C | T | [symbol] | CDZ97547 |
| X₈₀₂₅ | M8 | 125 | 35864 | T | C | [symbol] | CDZ97573 |
| X₈₀₂₆ | M8 | 126 | 104 | C | T | [symbol] | |
| X₈₀₂₇ | M8 | 129 | 299 | G | A | [symbol] | CDZ97577 |
| X₈₀₂₈ | M8 | 129 | 433 | G | A | [symbol] | CDZ97577 |
| X₈₀₂₉ | M8 | 129 | 856 | G | A | [symbol] | CDZ97577 |
| X₈₀₃₀ | M8 | 129 | 1013 | C | T | [symbol] | CDZ97577 |
| X₈₀₃₁ | M8 | 130 | 674 | C | T | [symbol] | CDZ97578 |
| X₈₀₃₂ | M8 | 141 | 5931 | G | A | [symbol] | CDZ97582 |
| X₈₀₃₃ | M8 | 141 | 15764 | C | T | [symbol] | CDZ97587 |
| X₈₀₃₄ | M8 | 141 | 17894 | G | A | [symbol] | CDZ97587 |
| X₈₀₃₅ | M8 | 141 | 25126 | C | T | [symbol] | CDZ97591 |
| X₈₀₃₆ | M8 | 149 | 1663 | A | G | [symbol] | CDZ97598 |
| X₈₀₃₇ | M8 | 149 | 2074 | T | G | [symbol] | CDZ97598 |
| X₈₀₃₈ | M8 | 152 | 141 | G | A | [symbol] | |
| X₈₀₃₉ | M8 | 159 | 106 | A | C | [symbol] | |
| X₈₀₄₀ | M8 | 162 | 70025 | C | T | [symbol] | CDZ97625 |
| X₈₀₄₁ | M8 | 162 | 70405 | A | G | [symbol] | CDZ97625 |
| X₈₀₄₂ | M8 | 162 | 93443 | G | A | [symbol] | CDZ97631 |
| X₈₀₄₃ | M8 | 162 | 199495 | G | A | [symbol] | CDZ97664 |
| X₈₀₄₄ | M8 | 162 | 207179 | C | T | [symbol] | CDZ97668 |
| X₈₀₄₅ | M8 | 162 | 207236 | G | A | [symbol] | CDZ97666 |
| X₈₀₄₆ | M8 | 162 | 223407 | C | T | [symbol] | CDZ97674 |
| X₈₀₄₇ | M8 | 162 | 233092 | C | T | [symbol] | CDZ97676 |
| X₈₀₄₈ | M8 | 162 | 268123 | G | A | [symbol] | CDZ97688 |
| X₈₀₄₉ | M8 | 162 | 291566 | G | A | [symbol] | CDZ97695 |
| X₈₀₅₀ | M8 | 162 | 304976 | A | G | [symbol] | CDZ97701 |
| X₈₀₅₁ | M8 | 162 | 308369 | T | C | [symbol] | CDZ97702 |
| X₈₀₅₂ | M8 | 162 | 321460 | C | G | [symbol] | CDZ97703 |
| X₈₀₅₃ | M8 | 162 | 321463 | A | C | [symbol] | CDZ97703 |
| X₈₀₅₄ | M8 | 162 | 322591 | G | A | [symbol] | CDZ97703 |
| X₈₀₅₅ | M8 | 162 | 324114 | T | C | [symbol] | CDZ97703 |
| X₈₀₅₆ | M8 | 162 | 324139 | C | T | [symbol] | CDZ97703 |
| X₈₀₅₇ | M8 | 16 | 324568 | A | G | [symbol] | CDZ97703 |
| X₈₀₅₈ | M8 | 162 | 324604 | G | A | [symbol] | CDZ97703 |
| X₈₀₅₉ | M8 | 162 | 351016 | C | T | [symbol] | CDZ97711 |
| X₈₀₆₀ | M8 | 162 | 360320 | G | A | [symbol] | CDZ97714 |
| X₈₀₆₁ | M8 | 162 | 424391 | C | T | [symbol] | CDZ97740 |
| X₈₀₆₂ | M8 | 162 | 444123 | T | C | [symbol] | CDZ97748 |
| X₈₀₆₃ | M8 | 162 | 457645 | G | A | [symbol] | CDZ97752 |
| X₈₀₆₄ | M8 | 162 | 467207 | C | T | [symbol] | CDZ97755 |
| X₈₀₆₅ | M8 | 162 | 476267 | C | T | [symbol] | CDZ97760 |
| X₈₀₆₆ | M8 | 162 | 491906 | G | A | [symbol] | CDZ97764 |
| X₈₀₆₇ | M8 | 162 | 492101 | G | A | [symbol] | CDZ97764 |
| X₈₀₆₈ | M8 | 162 | 501886 | C | T | [symbol] | CDZ97769 |
| X₈₀₆₉ | M8 | 162 | 541612 | G | A | [symbol] | CDZ97784 |
| X₈₀₇₀ | M8 | 162 | 632311 | G | A | [symbol] | CDZ97814 |
| X₈₀₇₁ | M8 | 162 | 633321 | G | A | [symbol] | CDZ97814 |
| X₈₀₇₂ | M8 | 162 | 633633 | G | A | [symbol] | CDZ97814 |
| X₈₀₇₃ | M8 | 162 | 638083 | C | T | [symbol] | CDZ97814 |
| X₈₀₇₄ | M8 | 162 | 640005 | C | T | [symbol] | CDZ97815 |
| X₈₀₇₅ | M8 | 162 | 674192 | C | T | [symbol] | CDZ97824 |
| X₈₀₇₆ | M8 | 162 | 680645 | G | A | [symbol] | CDZ97826 |
| X₈₀₇₇ | M8 | 162 | 738675 | G | A | [symbol] | CDZ97842 |
| X₈₀₇₈ | M8 | 162 | 738686 | C | T | [symbol] | CDZ97842 |
| X₈₀₇₉ | M8 | 162 | 808830 | G | A | [symbol] | CDZ97869 |
| X₈₀₈₀ | M8 | 162 | 861370 | G | T | [symbol] | CDZ97889 |
| X₈₀₈₁ | M8 | 162 | 871911 | C | T | [symbol] | CDZ97890 |
| X₈₀₈₂ | M8 | 162 | 914850 | C | T | [symbol] | CDZ97904 |
| X₈₀₈₃ | M8 | 162 | 966019 | C | T | [symbol] | CDZ97923 |
| X₈₀₈₄ | M8 | 162 | 972973 | G | A | [symbol] | CDZ97925 |
| X₈₀₈₅ | M8 | 162 | 997234 | C | T | [symbol] | CDZ97933 |
| X₈₀₈₆ | M8 | 175 | 385 | A | C | [symbol] | |
| X₈₀₈₇ | M8 | 185 | 758 | C | T | [symbol] | CDZ97958 |
| X₈₀₈₈ | M8 | 189 | 1306 | C | T | [symbol] | CDZ97961 |
| X₈₀₈₉ | M8 | 189 | 126573 | G | A | [symbol] | CDZ97996 |
| X₈₀₉₀ | M8 | 189 | 127356 | G | A | [symbol] | CDZ97996 |
| X₈₀₉₁ | M8 | 189 | 149091 | G | A | [symbol] | CDZ98004 |
| X₈₀₉₂ | M8 | 189 | 174918 | G | A | [symbol] | CDZ98015 |
| X₈₀₉₃ | M8 | 189 | 194647 | A | G | [symbol] | CDZ98020 |
| X₈₀₉₄ | M8 | 189 | 194665 | A | G | [symbol] | CDZ98020 |
| X₈₀₉₅ | M8 | 189 | 212649 | C | T | [symbol] | CDZ98028 |
| X₈₀₉₆ | M8 | 189 | 257670 | C | T | [symbol] | CDZ98041 |
| X₈₀₉₇ | M8 | 189 | 300343 | C | T | [symbol] | CDZ98056 |
| X₈₀₉₈ | M8 | 189 | 323680 | C | T | [symbol] | CDZ98063 |
| X₈₀₉₉ | M8 | 189 | 332957 | G | A | [symbol] | CDZ98065 |
| X₈₁₀₀ | M8 | 189 | 371247 | G | A | [symbol] | CDZ98078 |
| X₈₁₀₁ | M8 | 191 | 342 | A | G | [symbol] | CDZ98107 |
| X₈₁₀₂ | M8 | 191 | 347 | C | T | [symbol] | CDZ98107 |
| X₈₁₀₃ | M8 | 191 | 427 | C | T | [symbol] | CDZ98107 |
| X₈₁₀₄ | M8 | 191 | 451 | C | T | [symbol] | CDZ98107 |
| X₈₁₀₅ | M8 | 191 | 487 | A | G | [symbol] | CDZ98107 |
| X₈₁₀₆ | M8 | 197 | 624 | C | T | [symbol] | CDZ98111 |
| X₈₁₀₇ | M8 | 198 | 202 | C | A | [symbol] | |
| X₈₁₀₈ | M8 | 198 | 203 | G | A | [symbol] | |
| X₈₁₀₉ | M8 | 198 | 238 | C | T | [symbol] | |
| X₈₁₁₀ | M8 | 198 | 265 | C | T | [symbol] | |
| X₈₁₁₁ | M8 | 199 | 688 | C | T | [symbol] | |
| X₈₁₁₂ | M8 | 199 | 911 | C | T | [symbol] | |
| X₈₁₁₃ | M8 | 199 | 971 | C | T | [symbol] | |
| X₈₁₁₄ | M8 | 199 | 1218 | C | T | [symbol] | |
| X₈₁₁₅ | M8 | 202 | 171 | C | T | [symbol] | |
| X₈₁₁₆ | M8 | 205 | 360 | C | T | [symbol] | CDZ98112 |
| X₈₁₁₇ | M8 | 205 | 981 | C | T | [symbol] | CDZ98112 |
| X₈₁₁₈ | M8 | 208 | 117 | G | A | [symbol] | |
| X₈₁₁₉ | M8 | 208 | 476 | G | A | [symbol] | |
| X₈₁₂₀ | M8 | 208 | 616 | G | A | [symbol] | |
| X₈₁₂₁ | M8 | 208 | 935 | G | A | [symbol] | |
| X₈₁₂₂ | M8 | 209 | 312 | C | T | [symbol] | CDZ98113 |
| X₈₁₂₃ | M8 | 21 | 197 | C | G | [symbol] | CDZ98116 |
| X₈₁₂₄ | M8 | 223 | 93 | G | A | [symbol] | CDZ98118 |
| X₈₁₂₅ | M8 | 223 | 102 | A | G | [symbol] | CDZ98118 |
| X₈₁₂₆ | M8 | 223 | 133 | A | G | [symbol] | CDZ98118 |
| X₈₁₂₇ | M8 | 223 | 150 | T | C | [symbol] | CDZ98118 |
| X₈₁₂₈ | M8 | 223 | 155 | A | C | [symbol] | CDZ98118 |
| X₈₁₂₉ | M8 | 223 | 158 | T | C | [symbol] | CDZ98118 |
| X₈₁₃₀ | M8 | 223 | 160 | C | T | [symbol] | CDZ98118 |
| X₈₁₃₁ | M8 | 223 | 175 | G | A | [symbol] | CDZ98118 |
| X₈₁₃₂ | M8 | 223 | 177 | A | G | [symbol] | CDZ98118 |
| X₈₁₃₃ | M8 | 22 | 291 | C | A | [symbol] | CDZ98118 |
| X₈₁₃₄ | M8 | 225 | 317 | C | T | [symbol] | |
| X₈₁₃₅ | M8 | 227 | 202 | G | A | [symbol] | |
| X₈₁₃₆ | M8 | 232 | 340 | G | A | [symbol] | CDZ98119 |
| X₈₁₃₇ | M8 | 232 | 1379 | C | T | [symbol] | CDZ98119 |
| X₈₁₃₈ | M8 | 232 | 1521 | C | T | [symbol] | CDZ98119 |
| X₈₁₃₉ | M8 | 232 | 1662 | G | A | [symbol] | CDZ98119 |
| X₈₁₄₀ | M8 | 232 | 1761 | C | T | [symbol] | CDZ98119 |
| X₈₁₄₁ | M8 | 232 | 2027 | C | T | [symbol] | CDZ98119 |
| X₈₁₄₂ | M8 | 232 | 3060 | C | T | [symbol] | CDZ98120 |
| X₈₁₄₃ | M8 | 232 | 3284 | C | T | [symbol] | CDZ98119 |
| X₈₁₄₄ | M8 | 232 | 4437 | G | A | [symbol] | CDZ98121 |
| X₈₁₄₅ | M8 | 232 | 4561 | C | T | [symbol] | CDZ98120 |
| X₈₁₄₆ | M8 | 242 | 7334 | C | T | [symbol] | CDZ98125 |
| X₈₁₄₇ | M8 | 242 | 41710 | G | A | [symbol] | CDZ98131 |
| X₈₁₄₈ | M8 | 242 | 50262 | G | A | [symbol] | CDZ98135 |
| X₈₁₄₉ | M8 | 242 | 57480 | C | T | [symbol] | CDZ98137 |
| X₈₁₅₀ | M8 | 242 | 88037 | G | A | [symbol] | CDZ98147 |
| X₈₁₅₁ | M8 | 242 | 107587 | G | A | [symbol] | CDZ98153 |
| X₈₁₅₂ | M8 | 242 | 112244 | G | A | [symbol] | CDZ98154 |
| X₈₁₅₃ | M8 | 242 | 147104 | G | A | [symbol] | CDZ98164 |
| X₈₁₅₄ | M8 | 242 | 155049 | C | T | [symbol] | CDZ98168 |
| X₈₁₅₅ | M8 | 242 | 168689 | G | A | [symbol] | CDZ98172 |
| X₈₁₅₆ | M8 | 242 | 194983 | C | T | [symbol] | CDZ98179 |
| X₈₁₅₇ | M8 | 242 | 213986 | G | A | [symbol] | CDZ98185 |
| X₈₁₅₈ | M8 | 242 | 219778 | C | T | [symbol] | CDZ98187 |
| X₈₁₅₉ | M8 | 242 | 227271 | C | T | [symbol] | CDZ98191 |
| X₈₁₆₀ | M8 | 242 | 233088 | G | A | [symbol] | CDZ98193 |
| X₈₁₆₁ | M8 | 242 | 263218 | G | T | [symbol] | CDZ98201 |
| X₈₁₆₂ | M8 | 242 | 263678 | G | T | [symbol] | CDZ98202 |
| X₈₁₆₃ | M8 | 242 | 310353 | G | A | [symbol] | CDZ98216 |
| X₈₁₆₄ | M8 | 242 | 376713 | G | A | [symbol] | CDZ98238 |
| X₈₁₆₅ | M8 | 242 | 404132 | G | A | [symbol] | CDZ98248 |
| X₈₁₆₆ | M8 | 242 | 405825 | G | A | [symbol] | CDZ98250 |
| X₈₁₆₇ | M8 | 242 | 412676 | G | A | [symbol] | CDZ98249 |
| X₈₁₆₈ | M8 | 242 | 437941 | G | A | [symbol] | CDZ98258 |
| X₈₁₆₉ | M8 | 242 | 485936 | G | A | [symbol] | CDZ98270 |
| X₈₁₇₀ | M8 | 242 | 492389 | G | A | [symbol] | CDZ98274 |
| X₈₁₇₁ | M8 | 242 | 499956 | A | G | [symbol] | CDZ98276 |
| X₈₁₇₂ | M8 | 242 | 514780 | C | T | [symbol] | CDZ98282 |
| X₈₁₇₃ | M8 | 242 | 542663 | G | A | [symbol] | CDZ98290 |
| X₈₁₇₄ | M8 | 242 | 559999 | G | A | [symbol] | CDZ98297 |
| X₈₁₇₅ | M8 | 242 | 602456 | G | A | [symbol] | CDZ98308 |
| X₈₁₇₆ | M8 | 242 | 602531 | G | A | [symbol] | CDZ98308 |
| X₈₁₇₇ | M8 | 242 | 604704 | C | T | [symbol] | CDZ98309 |
| X₈₁₇₈ | M8 | 242 | 630157 | C | T | [symbol] | CDZ98319 |
| X₈₁₇₉ | M8 | 249 | 5307 | C | T | [symbol] | CED84929 |
| X₈₁₈₀ | M8 | 249 | 17416 | A | G | [symbol] | CED84933 |
| X₈₁₈₁ | M8 | 249 | 72016 | C | T | [symbol] | CED84950 |
| X₈₁₈₂ | M8 | 249 | 137338 | G | A | [symbol] | CED84976 |
| X₈₁₈₃ | M8 | 249 | 157550 | C | T | [symbol] | CED84983 |
| X₈₁₈₄ | M8 | 249 | 171600 | G | A | [symbol] | CED84986 |
| X₈₁₈₅ | M8 | 249 | 191304 | C | T | [symbol] | CED84988 |
| X₈₁₈₆ | M8 | 249 | 212696 | G | A | [symbol] | CED84994 |
| X₈₁₈₇ | M8 | 249 | 253494 | C | T | [symbol] | CED85008 |
| X₈₁₈₈ | M8 | 249 | 272075 | C | T | [symbol] | CED85013 |
| X₈₁₈₉ | M8 | 249 | 285231 | C | T | [symbol] | CED85015 |
| X₈₁₉₀ | M8 | 249 | 294161 | G | A | [symbol] | CED85018 |
| X₈₁₉₁ | M8 | 249 | 305975 | G | A | [symbol] | CED85023 |
| X₈₁₉₂ | M8 | 249 | 311154 | G | A | [symbol] | CED85025 |
| X₈₁₉₃ | M8 | 249 | 359266 | C | T | [symbol] | CED85041 |
| X₈₁₉₄ | M8 | 249 | 371535 | G | A | [symbol] | CED85048 |
| X₈₁₉₅ | M8 | 249 | 377814 | G | A | [symbol] | CED85051 |
| X₈₁₉₆ | M8 | 249 | 420458 | C | T | [symbol] | CED85069 |
| X₈₁₉₇ | M8 | 249 | 485782 | C | T | [symbol] | CED85089 |
| X₈₁₉₈ | M8 | 249 | 500195 | C | T | [symbol] | CED85093 |
| X₈₁₉₉ | M8 | 249 | 501310 | C | T | [symbol] | CED85093 |
| X₈₂₀₀ | M8 | 249 | 501510 | T | C | [symbol] | CED85093 |
| X₈₂₀₁ | M8 | 249 | 509901 | C | T | [symbol] | CED85096 |
| X₈₂₀₂ | M8 | 249 | 532943 | A | G | [symbol] | CED85099 |
| X₈₂₀₃ | M8 | 249 | 576070 | G | A | [symbol] | CED85118 |
| X₈₂₀₄ | M8 | 249 | 598579 | C | T | [symbol] | CED85125 |
| X₈₂₀₅ | M8 | 249 | 626627 | G | A | [symbol] | CED85132 |
| X₈₂₀₆ | M8 | 249 | 637944 | G | A | [symbol] | CED85135 |
| X₈₂₀₇ | M8 | 249 | 660408 | G | A | [symbol] | CED85144 |
| X₈₂₀₈ | M8 | 249 | 715551 | G | A | [symbol] | CED85163 |
| X₈₂₀₉ | M8 | 249 | 751427 | G | A | [symbol] | CED85174 |
| X₈₂₁₀ | M8 | 249 | 803215 | C | T | [symbol] | CED85186 |
| X₈₂₁₁ | M8 | 249 | 805141 | T | A | [symbol] | CED85187 |
| X₈₂₁₂ | M8 | 249 | 854220 | G | A | [symbol] | CED85201 |
| X₈₂₁₃ | M8 | 249 | 871689 | G | A | [symbol] | CED85204 |
| X₈₂₁₄ | M8 | 249 | 889853 | G | A | [symbol] | CED85211 |
| X₈₂₁₅ | M8 | 249 | 911274 | C | T | [symbol] | CED85218 |
| X₈₂₁₆ | M8 | 249 | 927876 | C | T | [symbol] | CED85222 |
| X₈₂₁₇ | M8 | 249 | 932606 | C | T | [symbol] | CED85223 |
| X₈₂₁₈ | M8 | 249 | 934305 | G | A | [symbol] | CED85225 |
| X₈₂₁₉ | M8 | 249 | 935435 | C | T | [symbol] | CED85225 |
| X₈₂₂₀ | M8 | 249 | 945434 | C | T | [symbol] | CED85227 |
| X₈₂₂₁ | M8 | 249 | 945727 | C | T | [symbol] | CED85227 |
| X₈₂₂₂ | M8 | 249 | 969333 | G | T | [symbol] | CED85238 |
| X₈₂₂₃ | M8 | 249 | 977170 | C | T | [symbol] | CED85242 |
| X₈₂₂₄ | M8 | 249 | 983120 | T | A | [symbol] | CED85242 |
| X₈₂₂₅ | M8 | 249 | 989520 | C | T | [symbol] | CED85243 |
| X₈₂₂₆ | M8 | 249 | 1014098 | C | T | [symbol] | CED85252 |
| X₈₂₂₇ | M8 | 249 | 1021827 | C | T | [symbol] | CED85254 |
| X₈₂₂₈ | M8 | 249 | 1050123 | C | T | [symbol] | CED85262 |
| X₈₂₂₉ | M8 | 249 | 1062282 | G | A | [symbol] | CED85266 |
| X₈₂₃₀ | M8 | 249 | 1067266 | G | A | [symbol] | CED85267 |
| X₈₂₃₁ | M8 | 249 | 1075522 | G | A | [symbol] | CED85270 |
| X₈₂₃₂ | M8 | 249 | 1076333 | G | A | [symbol] | CED85270 |
| X₈₂₃₃ | M8 | 249 | 1089152 | G | A | [symbol] | CED85274 |
| X₈₂₃₄ | M8 | 249 | 1108583 | A | G | [symbol] | CED85281 |
| X₈₂₃₅ | M8 | 249 | 1114790 | G | A | [symbol] | CED85283 |
| X₈₂₃₆ | M8 | 249 | 1143228 | C | T | [symbol] | CED85292 |
| X₈₂₃₇ | M8 | 249 | 1144309 | G | A | [symbol] | CED85291 |
| X₈₂₃₈ | M8 | 249 | 1176977 | G | A | [symbol] | CED85303 |
| X₈₂₃₉ | M8 | 249 | 1195367 | G | A | [symbol] | CED85307 |
| X₈₂₄₀ | M8 | 249 | 1230068 | C | T | [symbol] | CED85319 |
| X₈₂₄₁ | M8 | 249 | 1299472 | C | T | [symbol] | CED85343 |
| X₈₂₄₂ | M8 | 249 | 1359399 | G | A | [symbol] | CED85360 |
| X₈₂₄₃ | M8 | 249 | 1391343 | G | A | [symbol] | CED85372 |
| X₈₂₄₄ | M8 | 249 | 1393971 | G | A | [symbol] | CED85373 |
| X₈₂₄₅ | M8 | 249 | 1457529 | G | A | [symbol] | CED85398 |
| X₈₂₄₆ | M8 | 249 | 1473400 | C | T | [symbol] | CED85404 |
| X₈₂₄₇ | M8 | 249 | 1475200 | G | A | [symbol] | CED85404 |
| X₈₂₄₈ | M8 | 249 | 1486325 | G | A | [symbol] | CED85409 |
| X₈₂₄₉ | M8 | 249 | 1498029 | T | C | [symbol] | CED85415 |
| X₈₂₅₀ | M8 | 249 | 1502631 | G | T | [symbol] | CED85416 |
| X₈₂₅₁ | M8 | 249 | 1502641 | T | A | [symbol] | CED85416 |
| X₈₂₅₂ | M8 | 249 | 1502819 | T | G | [symbol] | CED85416 |
| X₈₂₅₃ | M8 | 249 | 1505138 | G | A | [symbol] | CED85416 |
| X₈₂₅₄ | M8 | 249 | 1505634 | T | G | [symbol] | CED85416 |
| X₈₂₅₅ | M8 | 249 | 1519431 | A | G | [symbol] | CED85419 |
| X₈₂₅₆ | M8 | 249 | 1555472 | C | T | [symbol] | CED85428 |
| X₈₂₅₇ | M8 | 249 | 1619036 | G | A | [symbol] | CED85450 |
| X₈₂₅₈ | M8 | 249 | 1621516 | G | A | [symbol] | CED85451 |
| X₈₂₅₉ | M8 | 249 | 1623151 | G | A | [symbol] | CED85451 |
| X₈₂₆₀ | M8 | 249 | 1653615 | T | G | [symbol] | CED85457 |
| X₈₂₆₁ | M8 | 249 | 1653962 | C | T | [symbol] | CED85458 |
| X₈₂₆₂ | M8 | 249 | 1655479 | C | T | [symbol] | CED85458 |
| X₈₂₆₃ | M8 | 249 | 1666185 | C | T | [symbol] | CED85460 |
| X₈₂₆₄ | M8 | 249 | 1679615 | G | A | [symbol] | CED85461 |
| X₈₂₆₅ | M8 | 249 | 1726777 | C | T | [symbol] | CED85474 |
| X₈₂₆₆ | M8 | 249 | 1737431 | C | T | [symbol] | CED85478 |
| X₈₂₆₇ | M8 | 249 | 1780551 | A | G | [symbol] | CED85493 |
| X₈₂₆₈ | M8 | 249 | 1780569 | A | G | [symbol] | CED85493 |
| X₈₂₆₉ | M8 | 249 | 1782582 | G | T | [symbol] | CED85493 |
| X₈₂₇₀ | M8 | 249 | 1786050 | C | T | [symbol] | CED85496 |
| X₈₂₇₁ | M8 | 249 | 1801965 | G | A | [symbol] | CED85501 |
| X₈₂₇₂ | M8 | 249 | 1803575 | C | T | [symbol] | CED85502 |
| X₈₂₇₃ | M8 | 249 | 1803790 | G | A | [symbol] | CED85502 |
| X₈₂₇₄ | M8 | 249 | 1804835 | G | A | [symbol] | CED85502 |
| X₈₂₇₅ | M8 | 249 | 1834426 | G | A | [symbol] | CED85511 |
| X₈₂₇₆ | M8 | 249 | 1880762 | G | A | [symbol] | CED85525 |
| X₈₂₇₇ | M8 | 249 | 1944026 | G | A | [symbol] | CED85545 |
| X₈₂₇₈ | M8 | 249 | 1988505 | C | T | [symbol] | CED85560 |
| X₈₂₇₉ | M8 | 249 | 2010712 | G | A | [symbol] | CED85564 |
| X₈₂₈₀ | M8 | 249 | 2015272 | G | A | [symbol] | CED85567 |
| X₈₂₈₁ | M8 | 249 | 2027477 | G | A | [symbol] | CED85573 |
| X₈₂₈₂ | M8 | 249 | 2063467 | G | A | [symbol] | CED85586 |
| X₈₂₈₃ | M8 | 249 | 2110956 | C | T | [symbol] | CED85603 |
| X₈₂₈₄ | M8 | 249 | 2163304 | G | A | [symbol] | CED85618 |
| X₈₂₈₅ | M8 | 249 | 2170103 | C | T | [symbol] | CED85620 |
| X₈₂₈₆ | M8 | 249 | 2198205 | G | A | [symbol] | CED85628 |
| X₈₂₈₇ | M8 | 249 | 2223626 | G | A | [symbol] | CED85633 |
| X₈₂₈₈ | M8 | 249 | 2255547 | G | C | [symbol] | CED85640 |
| X₈₂₈₉ | M8 | 252 | 512 | C | T | [symbol] | |
| X₈₂₉₀ | M8 | 252 | 524 | C | T | [symbol] | |
| X₈₂₉₁ | M8 | 258 | 576 | A | G | [symbol] | |
| X₈₂₉₂ | M8 | 258 | 1139 | A | T | [symbol] | |
| X₈₂₉₃ | M8 | 260 | 156 | G | A | [symbol] | |
| X₈₂₉₄ | M8 | 262 | 4049 | G | A | [symbol] | CDZ98330 |
| X₈₂₉₅ | M8 | 262 | 30347 | G | A | [symbol] | CDZ98338 |
| X₈₂₉₆ | M8 | 262 | 30359 | G | A | [symbol] | CDZ98338 |
| X₈₂₉₇ | M8 | 262 | 39621 | C | T | [symbol] | CDZ98342 |
| X₈₂₉₈ | M8 | 262 | 109833 | C | T | [symbol] | CDZ98369 |
| X₈₂₉₉ | M8 | 262 | 130174 | C | T | [symbol] | CDZ98372 |
| X₈₃₀₀ | M8 | 262 | 138889 | C | T | [symbol] | CDZ98375 |
| X₈₃₀₁ | M8 | 262 | 144566 | G | A | [symbol] | CDZ98375 |
| X₈₃₀₂ | M8 | 262 | 148151 | C | T | [symbol] | CDZ98375 |
| X₈₃₀₃ | M8 | 262 | 164438 | G | A | [symbol] | CDZ98383 |
| X₈₃₀₄ | M8 | 262 | 191816 | C | T | [symbol] | CDZ98393 |
| X₈₃₀₅ | M8 | 262 | 201531 | G | A | [symbol] | CDZ98396 |
| X₈₃₀₆ | M8 | 262 | 226006 | C | A | [symbol] | CDZ98404 |
| X₈₃₀₇ | M8 | 262 | 233570 | G | A | [symbol] | CDZ98407 |
| X₈₃₀₈ | M8 | 262 | 252305 | G | A | [symbol] | CDZ98412 |
| X₈₃₀₉ | M8 | 262 | 319302 | G | A | [symbol] | CDZ98436 |
| X₈₃₁₀ | M8 | 262 | 327677 | C | T | [symbol] | CDZ98440 |
| X₈₃₁₁ | M8 | 262 | 366171 | G | A | [symbol] | CDZ98452 |
| X₈₃₁₂ | M8 | 262 | 373766 | C | T | [symbol] | CDZ98456 |
| X₈₃₁₃ | M8 | 262 | 380519 | C | T | [symbol] | CDZ98457 |
| X₈₃₁₄ | M8 | 262 | 390030 | C | T | [symbol] | CDZ98460 |
| X₈₃₁₅ | M8 | 262 | 397539 | G | A | [symbol] | CDZ98463 |
| X₈₃₁₆ | M8 | 262 | 410688 | C | T | [symbol] | CDZ98466 |
| X₈₃₁₇ | M8 | 262 | 418834 | C | T | [symbol] | CDZ98468 |
| X₈₃₁₈ | M8 | 262 | 420102 | G | A | [symbol] | CDZ98468 |
| X₈₃₁₉ | M8 | 262 | 446956 | C | T | [symbol] | CDZ98477 |
| X₈₃₂₀ | M8 | 262 | 471054 | C | T | [symbol] | CDZ98487 |
| X₈₃₂₁ | M8 | 262 | 498239 | C | T | [symbol] | CDZ98496 |
| X₈₃₂₂ | M8 | 262 | 539428 | G | A | [symbol] | CDZ98514 |
| X₈₃₂₃ | M8 | 262 | 539452 | A | G | [symbol] | CDZ98514 |
| X₈₃₂₄ | M8 | 262 | 539470 | A | G | [symbol] | CDZ98514 |
| X₈₃₂₅ | M8 | 262 | 539588 | A | G | [symbol] | CDZ98514 |
| X₈₃₂₆ | M8 | 262 | 552414 | C | T | [symbol] | CDZ98518 |
| X₈₃₂₇ | M8 | 262 | 557280 | G | A | [symbol] | CDZ98518 |
| X₈₃₂₈ | M8 | 262 | 560713 | G | A | [symbol] | CDZ98519 |
| X₈₃₂₉ | M8 | 262 | 562795 | C | T | [symbol] | CDZ98521 |
| X₈₃₃₀ | M8 | 262 | 567591 | G | A | [symbol] | CDZ98524 |
| X₈₃₃₁ | M8 | 262 | 567801 | G | A | [symbol] | CDZ98524 |
| X₈₃₃₂ | M8 | 262 | 618198 | G | A | [symbol] | CDZ98538 |
| X₈₃₃₃ | M8 | 262 | 627573 | T | C | [symbol] | CDZ98542 |
| X₈₃₃₄ | M8 | 262 | 627705 | C | T | [symbol] | CDZ98542 |
| X₈₃₃₅ | M8 | 262 | 628911 | G | C | [symbol] | CDZ98543 |
| X₈₃₃₆ | M8 | 262 | 632409 | A | T | [symbol] | CDZ98543 |
| X₈₃₃₇ | M8 | 262 | 632450 | T | G | [symbol] | CDZ98543 |
| X₈₃₃₈ | M8 | 262 | 632476 | T | C | [symbol] | CDZ98543 |
| X₈₃₃₉ | M8 | 262 | 638804 | G | C | [symbol] | CDZ98544 |
| X₈₃₄₀ | M8 | 262 | 638833 | G | T | [symbol] | CDZ98544 |
| X₈₃₄₁ | M8 | 262 | 639962 | A | G | [symbol] | CDZ98544 |
| X₈₃₄₂ | M8 | 262 | 640066 | A | G | [symbol] | CDZ98544 |
| X₈₃₄₃ | M8 | 262 | 644395 | A | G | [symbol] | CDZ98544 |
| X₈₃₄₄ | M8 | 262 | 653920 | A | G | [symbol] | CDZ98545 |
| X₈₃₄₅ | M8 | 262 | 655754 | A | T | [symbol] | CDZ98545 |
| X₈₃₄₆ | M8 | 262 | 655757 | T | C | [symbol] | CDZ98545 |
| X₈₃₄₇ | M8 | 262 | 656323 | C | G | [symbol] | CDZ98545 |
| X₈₃₄₈ | M8 | 262 | 666563 | G | A | [symbol] | CDZ98545 |
| X₈₃₄₉ | M8 | 262 | 668764 | C | T | [symbol] | CDZ98545 |
| X₈₃₅₀ | M8 | 262 | 669984 | C | T | [symbol] | CDZ98547 |
| X₈₃₅₁ | M8 | 262 | 691577 | C | T | [symbol] | CDZ98551 |
| X₈₃₅₂ | M8 | 262 | 771330 | G | A | [symbol] | CDZ98578 |
| X₈₃₅₃ | M8 | 262 | 801565 | G | A | [symbol] | CDZ98589 |
| X₈₃₅₄ | M8 | 262 | 822734 | G | A | [symbol] | CDZ98597 |
| X₈₃₅₅ | M8 | 262 | 825723 | A | G | [symbol] | CDZ98598 |
| X₈₃₅₆ | M8 | 262 | 835874 | C | T | [symbol] | CDZ98601 |
| X₈₃₅₇ | M8 | 262 | 865999 | G | A | [symbol] | CDZ98613 |
| X₈₃₅₈ | M8 | 262 | 886842 | C | T | [symbol] | CDZ98621 |
| X₈₃₅₉ | M8 | 262 | 971713 | G | A | [symbol] | CDZ98649 |
| X₈₃₆₀ | M8 | 262 | 1011054 | G | A | [symbol] | CDZ98659 |
| X₈₃₆₁ | M8 | 262 | 1051389 | C | T | [symbol] | CDZ98670 |
| X₈₃₆₂ | M8 | 262 | 1076581 | G | A | [symbol] | CDZ98679 |
| X₈₃₆₃ | M8 | 262 | 1107286 | C | T | [symbol] | CDZ98689 |
| X₈₃₆₄ | M8 | 262 | 1140198 | C | T | [symbol] | CDZ98701 |
| X₈₃₆₅ | M8 | 262 | 1152058 | C | A | [symbol] | CDZ98703 |
| X₈₃₆₆ | M8 | 262 | 1209662 | G | A | [symbol] | CDZ98723 |
| X₈₃₆₇ | M8 | 262 | 1226072 | C | T | [symbol] | CDZ98730 |
| X₈₃₆₈ | M8 | 262 | 1237021 | C | T | [symbol] | CDZ98735 |
| X₈₃₆₉ | M8 | 262 | 1257961 | C | T | [symbol] | CDZ98739 |
| X₈₃₇₀ | M8 | 262 | 1277604 | G | A | [symbol] | CDZ98747 |
| X₈₃₇₁ | M8 | 262 | 1284428 | G | A | [symbol] | CDZ98748 |
| X₈₃₇₂ | M8 | 262 | 1305361 | G | A | [symbol] | CDZ98753 |
| X₈₃₇₃ | M8 | 262 | 1329643 | C | T | [symbol] | CDZ98760 |
| X₈₃₇₄ | M8 | 262 | 1351116 | A | G | [symbol] | CDZ98766 |
| X₈₃₇₅ | M8 | 262 | 1415479 | C | T | [symbol] | CDZ98789 |
| X₈₃₇₆ | M8 | 262 | 1424293 | G | A | [symbol] | CDZ98791 |
| X₈₃₇₇ | M8 | 262 | 1455677 | G | A | [symbol] | CDZ98804 |
| X₈₃₇₈ | M8 | 262 | 1458863 | C | T | [symbol] | CDZ98807 |
| X₈₃₇₉ | M8 | 262 | 1550311 | C | T | [symbol] | CDZ98836 |
| X₈₃₈₀ | M8 | 262 | 1550456 | C | T | [symbol] | CDZ98837 |
| X₈₃₈₁ | M8 | 262 | 1615762 | G | A | [symbol] | CDZ98855 |
| X₈₃₈₂ | M8 | 262 | 1677620 | G | A | [symbol] | CDZ98873 |
| X₈₃₈₃ | M8 | 262 | 1684375 | G | A | [symbol] | CDZ98876 |
| X₈₃₈₄ | M8 | 262 | 1694625 | C | T | [symbol] | CDZ98878 |
| X₈₃₈₅ | M8 | 262 | 1712334 | G | A | [symbol] | CDZ98886 |
| X₈₃₈₆ | M8 | 262 | 1716385 | G | A | [symbol] | CDZ98887 |
| X₈₃₈₇ | M8 | 262 | 1717611 | C | T | [symbol] | CDZ98888 |
| X₈₃₈₈ | M8 | 266 | 85 | C | T | [symbol] | |
| X₈₃₈₉ | M8 | 266 | 252 | C | T | [symbol] | |
| X₈₃₉₀ | M8 | 267 | 93 | G | A | [symbol] | |
| X₈₃₉₁ | M8 | 267 | 94 | A | G | [symbol] | |
| X₈₃₉₂ | M8 | 267 | 133 | T | C | [symbol] | |
| X₈₃₉₃ | M8 | 267 | 134 | C | T | [symbol] | |
| X₈₃₉₄ | M8 | 267 | 201 | T | C | [symbol] | |
| X₈₃₉₅ | M8 | 267 | 208 | T | C | [symbol] | |

[symbol]

indicates data missing or illegible when filed

TABLE 13

| V | RS | RP | RB | SB | T | GC | CDS | AA Change |
|---|---|---|---|---|---|---|---|---|
| Y₁ | 22 | 1643 | C | T | 2 | cytochrome c oxidase subunit 1 | CED80056 | p.Leu366Phe |
| Y₂ | 22 | 2524 | G | A | 4 | cytochrome c oxidase subunit 1 | CED80056 | |
| Y₃ | 28 | 236 | G | A | 3 | atp synthase subunit 6 | CDZ96150 | |
| Y₄ | 28 | 377 | G | A | 3 | atp synthase subunit 6 | CDZ96150 | |
| Y₅ | 28 | 1506 | C | T | 2 | atp synthase subunit 6 | CDZ96150 | p.Ala227Val |
| Y₆ | 28 | 1677 | C | T | 4 | atp synthase subunit 6 | CDZ96150 | |
| Y₇ | 43 | 464 | G | A | 2 | nadh dehydrogenase subunit 4 | CDZ96151 | p.Thr147Ile |
| Y₈ | 43 | 753 | C | T | 2 | nadh dehydrogenase subunit 4 | CDZ96151 | p.Val51Ile |
| Y₉ | 43 | 1527 | C | T | 3 | nadh dehydrogenase subunit 4 | CDZ96151 | |
| Y₁₀ | 43 | 1748 | G | A | 3 | nadh dehydrogenase subunit 4 | CDZ96151 | |
| Y₁₁ | 43 | 1928 | C | T | 3 | nadh dehydrogenase subunit 4 | CDZ96151 | |
| Y₁₂ | 62 | 875 | G | A | 2 | cytochrome c oxidase subunit 2 | CDZ96152 | p.Thr110Ile |
| Y₁₃ | 102 | 339 | C | T | 4 | NADH dehydrogenase subunits 2, 5, and related proteins | CDZ96153 | |
| Y₁₄ | 102 | 951 | G | A | 4 | NADH dehydrogenase subunits 2, 5, and related proteins | CDZ96153 | |
| Y₁₅ | 102 | 1042 | G | A | 4 | NADH dehydrogenase subunits 2, 5, and related proteins | CDZ96153 | |
| Y₁₆ | 102 | 2334 | G | A | 2 | NADH dehydrogenase subunits 2, 5, and related proteins | CDZ96153 | p.Ser181Phe |
| Y₁₇ | 102 | 2590 | C | T | 2 | NADH dehydrogenase subunits 2, 5, and related proteins | CDZ96153 | p.Ala96Thr |
| Y₁₈ | 102 | 3427 | C | T | 3 | NADH dehydrogenase subunits 2, 5, and related proteins | CDZ96153 | |
| Y₁₉ | 176 | 358 | G | A | 3 | cytochrome b | CED80058 | |
| Y₂₀ | 176 | 1872 | G | A | 4 | cytochrome b | CED80058 | |
| Y₂₁ | 176 | 1980 | G | A | 4 | cytochrome b | CED80058 | |
| Y₂₂ | 179 | 1525 | G | A | 7 | NADH | CDZ96154 | |
| Y₂₃ | 179 | 1780 | C | T | 7 | NADH | CDZ96154 | |
| Y₂₄ | 188 | 815 | C | T | 2 | nadh dehydrogenase subunit 6 | CED80060 | p.Ala79Val |
| Y₂₅ | 188 | 1174 | C | T | 4 | nadh dehydrogenase subunit 6 | CED80060 | |
| Y₂₆ | 188 | 2163 | G | A | 4 | nadh dehydrogenase subunit 6 | CED80060 | |
| Y₂₇ | 188 | 2170 | G | A | 4 | nadh dehydrogenase subunit 6 | CED80060 | |
| Y₂₈ | 247 | 102 | G | A | 4 | cytochrome c oxidase subunit 3 | CED80061 | |
| Y₂₉ | 247 | 989 | C | T | 2 | cytochrome c oxidase subunit 3 | CED80061 | p.Gly104Glu |
| Y₃₀ | 247 | 1053 | G | A | 2 | cytochrome c oxidase subunit 3 | CED80061 | p.Leu83Phe |
| Y₃₁ | 7 | 160 | T | C | 6 | | | |
| Y₃₂ | 8 | 1110 | C | T | 6 | | | |
| Y₃₃ | 11 | 154 | A | C | 6 | | | |
| Y₃₄ | 11 | 158 | C | T | 6 | | | |
| Y₃₅ | 15 | 28 | C | G | 6 | | | |
| Y₃₆ | 24 | 5850 | C | T | 2 | hypothetical protein | CDZ96160 | p.Leu85Phe |
| Y₃₇ | 24 | 180340 | G | A | 3 | V-SNARE | CDZ96216 | |
| Y₃₈ | 24 | 307114 | G | A | 2 | DNA polymerase zeta, catalytic subunit | CDZ96255 | p.Gly717Glu |
| Y₃₉ | 24 | 340663 | T | C | 3 | mRNA splicing factor | CDZ96265 | |
| Y₄₀ | 24 | 420108 | G | A | 3 | Ubiquitin-conjugating enzyme E2-binding protein | CDZ96291 | |
| Y₄₁ | 27 | 445 | C | T | 6 | | | |
| Y₄₂ | 27 | 1012 | A | C | 6 | | | |
| Y₄₃ | 27 | 1013 | T | A | 6 | | | |
| Y₄₄ | 32 | 158 | C | T | 3 | hypothetical protein | CDZ96332 | |
| Y₄₅ | 32 | 215 | C | T | 3 | hypothetical protein | CDZ96332 | |
| Y₄₆ | 32 | 2438 | C | T | 3 | hypothetical protein | CDZ96332 | |
| Y₄₇ | 32 | 2821 | C | T | 7 | hypothetical protein | CDZ96332 | |
| Y₄₈ | 32 | 3067 | C | T | 2 | hypothetical protein | CDZ96332 | p.Ser105Phe |
| Y₄₉ | 32 | 3506 | C | T | 4 | hypothetical protein | CDZ96332 | |
| Y₅₀ | 32 | 3562 | G | A | 4 | hypothetical protein | CDZ96332 | |
| Y₅₁ | 33 | 45488 | C | T | 3 | transcription coactivator | CED82012 | |
| Y₅₂ | 33 | 109397 | G | A | 2 | phosphoenolpyruvate carboxykinase | CED82038 | p.Thr326Ile |
| Y₅₃ | 33 | 260027 | G | A | 3 | hypothetical protein | CED82084 | |
| Y₅₄ | 33 | 274627 | G | A | 8 | Mercaptopyruvate sulfurtransferase/thiosulfate | CED82091 | p.Ala256Thr |
| | | | | | | sulfurtransferase | | |
| Y₅₅ | 33 | 283808 | C | T | 2 | HLH transcription factor EBF/Olf-1 and related | CED82093 | p.Gly36Asp |
| | | | | | | DNA binding proteins | | |
| Y₅₆ | 33 | 341890 | G | A | 2 | Peptidase S9, prolyl oligopeptidase, catalytic domain | CED82113 | p.Pro656Ser |
| Y₅₇ | 33 | 448815 | G | A | 2 | cap1-related protein | CED82144 | p.Val460Ile |
| Y₅₈ | 33 | 453975 | C | T | 2 | C4-type Zn-finger protein | CED82147 | p.Asp703Asn |
| Y₅₉ | 33 | 455451 | C | T | 3 | hypothetical protein | CED82146 | |
| Y₆₀ | 33 | 509127 | C | T | 3 | Endonuclease MUS81 | CED82166 | |
| Y₆₁ | 33 | 693516 | C | T | 2 | p-loop containing nucleoside triphosphate | CED82225 | p.Leu417Phe |
| | | | | | | hydrolase protein | | |
| Y₆₂ | 33 | 1049699 | G | A | 3 | Inorganic phosphate transporter | CED82334 | |
| Y₆₃ | 33 | 1138444 | C | T | 3 | Nuclear AAA ATPase (VCP subfamily) | CED82363 | |
| Y₆₄ | 33 | 1165914 | G | A | 2 | leucine-trna ligase | CED82372 | p.Ser992Phe |
| Y₆₅ | 33 | 1191727 | C | T | 2 | xanthine uracil permease | CED82379 | p.Ser617Asn |
| Y₆₆ | 33 | 1324395 | G | A | 3 | Basic-leucine zipper domain | CED82417 | |
| Y₆₇ | 33 | 1339376 | C | T | 2 | DNA-binding centromere protein B (CENP-B) | CED82424 | p.Thr69Met |
| Y₆₈ | 33 | 1499347 | G | A | 3 | Dimeric dihydrodiol dehydrogenase | CED82472 | |
| Y₆₉ | 33 | 1502644 | G | A | 2 | pre-mrna splicing factor prp1 | CED82474 | p.Pro248Ser |
| Y₇₀ | 33 | 1515369 | G | A | 3 | hypothetical protein | CED82478 | |
| Y₇₁ | 33 | 1544951 | C | G | 6 | hypothetical protein | CED82485 | |
| Y₇₂ | 33 | 1587443 | C | T | 3 | atp-dependent clp protease proteolytic subunit | CED82497 | |
| Y₇₃ | 33 | 1596242 | C | T | 3 | myosin 5 | CED82498 | |
| Y₇₄ | 33 | 1638726 | G | A | 3 | hypothetical protein | CED82513 | |
| Y₇₅ | 33 | 1642659 | G | A | 2 | Uncharacterized MYND Zn-finger protein | CED82515 | p.Ala199Thr |
| Y₇₆ | 33 | 1700000 | G | A | 2 | hypothetical protein | CED82534 | p.Pro888Ser |
| Y₇₇ | 33 | 1938614 | G | A | 2 | Splicing factor 3b, subunit 2 | CED82612 | p.His486Tyr |
| Y₇₈ | 33 | 2010230 | C | T | 2 | OCH1 | CED82636 | p.Thr257Ile |
| Y₇₉ | 33 | 2014235 | C | T | 2 | Putative phosphoinositide phosphatase | CED82637 | p.Val106Ile |
| Y₈₀ | 36 | 320 | G | A | 6 | | | |
| Y₈₁ | 36 | 1056 | G | A | 6 | | | |
| Y₈₂ | 36 | 1295 | C | T | 6 | | | |
| Y₈₃ | 36 | 1461 | A | T | 6 | | | |
| Y₈₄ | 42 | 804 | C | T | 4 | atp synthase subunit mitochondrial | CDZ96333 | |
| Y₈₅ | 42 | 1559 | G | A | 4 | atp synthase subunit mitochondrial | CDZ96333 | |
| Y₈₆ | 50 | 145 | G | A | 6 | | | |
| Y₈₇ | 52 | 63859 | C | T | 2 | kinase-like protein | CED82686 | p.Pro363Ser |
| Y₈₈ | 52 | 144382 | C | T | 3 | hypothetical protein | CED82709 | |
| Y₈₉ | 52 | 151974 | C | T | 2 | Predicted small molecule transporter | CED82712 | p.Gly179Glu |
| Y₉₀ | 52 | 203253 | A | G | 3 | B-block binding subunit of TFIIIC | CED82730 | |
| Y₉₁ | 52 | 207354 | C | T | 8 | B-block binding subunit of TFIIIC | CED82730 | |
| Y₉₂ | 52 | 390095 | G | A | 3 | pre-mrna-splicing factor clf1 | CED82784 | |
| Y₉₃ | 52 | 395374 | G | A | 2 | transcriptional regulator | CED82786 | p.Pro371Ser |
| Y₉₄ | 52 | 398723 | C | T | 3 | transcriptional regulator | CED82786 | |
| Y₉₅ | 52 | 398728 | C | T | 3 | transcriptional regulator | CED82786 | |
| Y₉₆ | 52 | 552099 | G | A | 2 | Zuotin and related molecular chaperones (DnaJ | CED82837 | p.Val134Ile |
| | | | | | | superfamily), contains DNA-binding domains | | |
| Y₉₇ | 52 | 817452 | T | A | 2 | atypical pikk frap protein kinase | CED82928 | p.His270Leu |
| Y₉₈ | 52 | 938650 | G | A | 3 | hypothetical protein | CED82973 | |
| Y₉₉ | 52 | 967316 | A | T | 2 | 1,4-alpha-glucan branching enzyme/starch | CED82984 | p.Glu582Val |
| | | | | | | branching enzyme II | | |
| Y₁₀₀ | 52 | 967701 | T | A | 3 | cyclin-dependent kinase regulatory subunit | CED82983 | |
| Y₁₀₁ | 52 | 1003899 | G | A | 2 | heat shock protein 60 ame | CED83001 | p.Gly126Asp |
| Y₁₀₂ | 52 | 1151398 | G | A | 3 | FOG | CED83046 | |
| Y₁₀₃ | 52 | 1158103 | C | T | 3 | Density-regulated protein related to translation | CED83051 | |
| | | | | | | initiation factor 1 (elF-1/SUI1) | | |
| Y₁₀₄ | 52 | 1219894 | C | T | 3 | probable cdc12-septin | CED83071 | |
| Y₁₀₅ | 52 | 1363357 | G | A | 3 | mrg-domain-containing protein | CED83122 | |
| Y₁₀₆ | 52 | 1399439 | G | A | 2 | mitochondrial cytochrome b2- | CED83134 | p.Arg244Gln |
| Y₁₀₇ | 52 | 1526796 | G | A | 2 | eukaryotic translation initiation factor 2 subunit alpha | CED83181 | p.Gly134Glu |
| Y₁₀₈ | 52 | 1583655 | C | T | 2 | Predicted Zn-finger protein | CED83206 | p.Pro285Leu |
| Y₁₀₉ | 52 | 1708900 | A | G | 3 | dna mismatch repair protein | CED83249 | |
| Y₁₁₀ | 52 | 1716210 | C | T | 3 | atpase | CED83250 | |
| Y₁₁₁ | 52 | 1793370 | G | A | 3 | RNA polymerase II, subunit POLR2C/RPB3 | CED83275 | |
| Y₁₁₂ | 52 | 1807309 | G | A | 3 | Protein of unknown function DUF1264 | CED83283 | |
| Y₁₁₃ | 52 | 1871310 | C | T | 2 | Uncharacterized conserved protein | CED83304 | p.Ala574Val |
| Y₁₁₄ | 52 | 1893352 | G | A | 2 | atp-dependent metallopeptidase hfl | CED83313 | p.Pro375Leu |
| Y₁₁₅ | 52 | 1915927 | G | A | 3 | hypothetical protein | CED83315 | |
| Y₁₁₆ | 52 | 1987096 | G | A | 4 | Sexual differentiation process protein ISP4 | CED83341 | |
| Y₁₁₇ | 52 | 2050245 | G | A | 3 | Extracellular protein SEL-1 and related proteins | CED83359 | |
| Y₁₁₈ | 52 | 2120665 | C | T | 4 | hypothetical protein | CED83376 | |
| Y₁₁₉ | 52 | 2162878 | G | A | 2 | Nucleic acid-binding, OB-fold | CED83392 | p.Asp942Asn |
| Y₁₂₀ | 52 | 2258192 | C | T | 2 | hypothetical protein | CED83422 | p.Pro126Ser |
| Y₁₂₁ | 52 | 2265219 | C | T | 2 | hypothetical protein | CED83425 | p.Glu74Lys |
| Y₁₂₂ | 52 | 2266378 | C | T | 3 | dead-domain-containing protein | CED83423 | |
| Y₁₂₃ | 52 | 2327266 | C | T | 3 | 60s ribosomal protein I21 | CED83445 | |
| Y₁₂₄ | 52 | 2373120 | C | T | 2 | Protein phosphatase, regulatory subunit | CED83456 | p.Gly789Glu |
| | | | | | | PPP1R3C/D | | |
| Y₁₂₅ | 52 | 2400778 | C | T | 4 | atp-dependent rna helicase dhx8 | CED83463 | |
| Y₁₂₆ | 52 | 2543220 | C | T | 3 | Protein of unknown function DUF3468 | CED83509 | |
| Y₁₂₇ | 53 | 26291 | G | A | 2 | Uncharacterised protein family UPF0390 | CDZ96348 | p.Ser75Asn |
| Y₁₂₈ | 54 | 106086 | G | A | 3 | FOG | CDZ96416 | |
| Y₁₂₉ | 54 | 194230 | G | A | 2 | RmlC-like jelly roll fold | CDZ96446 | p.Pro179Ser |
| Y₁₃₀ | 54 | 206494 | G | A | 2 | white collar 1 protein | CDZ96450 | p.Asp88Asn |
| Y₁₃₁ | 54 | 370320 | G | A | 2 | UV radiation resistance associated protein | CDZ96499 | p.Thr57Ile |
| Y₁₃₂ | 54 | 391223 | A | G | 2 | SAP family cell cycle dependent phosphatase- | CDZ96509 | p.Asp477Gly |
| | | | | | | associated protein | | |
| Y₁₃₃ | 54 | 427542 | C | T | 2 | Exosomal 3′-5′ exoribonuclease complex, subunit | CDZ96520 | p.Ser51Asn |
| | | | | | | Rrp44/Dis3 | | |
| Y₁₃₄ | 54 | 431851 | C | T | 3 | Exosomal 3′-5′ exoribonuclease complex, subunit | CDZ96520 | |
| | | | | | | Rrp44/Dis3 | | |
| Y₁₃₅ | 54 | 478527 | C | T | 2 | abc transporter | CDZ96537 | p.Val1423Ile |
| Y₁₃₆ | 54 | 555986 | G | A | 2 | hypothetical protein | CDZ96563 | p.Pro8Ser |
| Y₁₃₇ | 54 | 733193 | T | C | start_lost | hypothetical protein | CDZ96619 | p.Met1? |
| Y₁₃₈ | 67 | 111 | G | A | 6 | | | |
| Y₁₃₉ | 69 | 29006 | G | A | 3 | hypothetical protein | CED83534 | |
| Y₁₄₀ | 69 | 201005 | G | A | 3 | hypothetical protein | CED83595 | |
| Y₁₄₁ | 69 | 305997 | C | T | 2 | Peptidase M28 | CED83631 | p.Leu341Phe |
| Y₁₄₂ | 69 | 384418 | G | A | 2 | Delta 9 fatty acid desaturase | CED83656 | p.Ala149Thr |
| Y₁₄₃ | 69 | 415659 | C | T | 2 | microtubule binding protein | CED83665 | p.Asp305Asn |
| Y₁₄₄ | 69 | 467686 | C | T | 2 | dna replication factor large subunit | CED83681 | p.Asp244Asn |
| Y₁₄₅ | 69 | 585845 | G | A | 2 | beta and beta-prime subunits of dna dependent | CED83722 | p.Gly1099Ser |
| | | | | | | rna-polymerase | | |
| Y₁₄₆ | 69 | 631511 | G | A | 2 | aspartate-semialdehyde dehydrogenase | CED83742 | p.Ala15Thr |
| Y₁₄₇ | 69 | 637299 | T | C | 2 | hypothetical protein | CED83744 | p.Thr41Ala |
| Y₁₄₈ | 69 | 675579 | G | A | 3 | hypothetical protein | CED83760 | |
| Y₁₄₉ | 69 | 676581 | G | A | 2 | hypothetical protein | CED83760 | p.Ala2Thr |
| Y₁₅₀ | 69 | 676853 | G | A | 3 | Metalloexopeptidases | CED83759 | |
| Y₁₅₁ | 69 | 678406 | C | T | 3 | Metalloexopeptidases | CED83759 | |
| Y₁₅₂ | 69 | 865820 | C | T | 2 | acyl-oxidase | CED83814 | p.Leu1253Phe |
| Y₁₅₃ | 69 | 869706 | G | A | 8 | Predicted E3 ubiquitin ligase | CED83815 | |
| Y₁₅₄ | 69 | 894462 | C | T | 3 | TPR repeat-containing protein | CED83821 | |
| Y₁₅₅ | 69 | 971219 | C | T | 3 | probable peroxisomal half abc transporter | CED83847 | |
| Y₁₅₆ | 69 | 988364 | G | A | 2 | hypothetical protein | CED83857 | p.Gly911Glu |
| Y₁₅₇ | 69 | 1102164 | C | T | 2 | nucleosome assembly protein | CED83897 | p.Glu89Lys |
| Y₁₅₈ | 69 | 1218409 | G | A | 3 | FOG | CED83936 | |
| Y₁₅₉ | 69 | 1260087 | G | A | 3 | mRNA cleavage and polyadenylation factor II | CED83949 | |
| | | | | | | complex, subunit CFT2 (CPSF subunit) | | |
| Y₁₆₀ | 69 | 1342909 | G | A | 3 | Inositol polyphosphate multikinase, component | CED83975 | |
| | | | | | | of the ARGR transcription regulatory complex | | |
| Y₁₆₁ | 69 | 1411421 | C | T | 3 | hypothetical protein | CED83999 | |
| Y₁₆₂ | 69 | 1652288 | C | T | 3 | atp-dependent rna helicase dbp5 | CED84077 | |
| Y₁₆₃ | 69 | 1714728 | G | A | 3 | hypothetical protein | CED84097 | |
| Y₁₆₄ | 69 | 1790823 | C | T | 2 | Protein of unknown function DUF1183, TMEM66 | CED84125 | p.Ala253Val |
| Y₁₆₅ | 69 | 1792597 | C | T | 2 | SMAD/FHA domain | CED84126 | p.Ala258Val |
| Y₁₆₆ | 69 | 1800584 | G | A | 3 | Uncharacterized conserved protein | CED84129 | |
| Y₁₆₇ | 69 | 1854739 | G | A | 3 | RNA polymerase II transcription | CED84145 | |
| | | | | | | initiation/nucleotide excision repair factor TFIIH, | | |
| | | | | | | subunit TFB2 | | |
| Y₁₆₈ | 69 | 1924621 | C | T | 3 | hypothetical protein | CED84172 | |
| Y₁₆₉ | 69 | 1968848 | A | G | 3 | Immunoglobulin-like fold | CED84189 | |
| Y₁₇₀ | 69 | 2001469 | C | T | 3 | pre-mrna splicing factor | CED84197 | |
| Y₁₇₁ | 69 | 2255001 | G | A | 2 | hypothetical protein | CED84282 | p.Ala239Val |
| Y₁₇₂ | 69 | 2438727 | C | T | 3 | g-protein alpha-subunit | CED84343 | |
| Y₁₇₃ | 69 | 2483433 | G | A | 3 | F-box protein containing LRR | CED84352 | |
| Y₁₇₄ | 72 | 584 | G | A | 6 | | | |
| Y₁₇₅ | 72 | 856 | C | T | 6 | | | |
| Y₁₇₆ | 72 | 1163 | C | T | 6 | | | |
| Y₁₇₇ | 77 | 84022 | G | A | 8 | DRIM (Down-regulated in metastasis)-like proteins | CDZ96659 | |
| Y₁₇₈ | 78 | 6333 | G | A | 8 | acid phosphatase | CED84360 | |
| Y₁₇₉ | 78 | 238854 | C | T | 3 | Extracellular matrix glycoprotein Laminin | CED84430 | |
| | | | | | | subunits alpha and gamma | | |
| Y₁₈₀ | 78 | 299644 | G | A | 3 | hypothetical protein | CED84443 | |
| Y₁₈₁ | 78 | 444292 | C | T | 2 | gtp-binding protein ypt1 | CED84490 | p.Ala156Val |
| Y₁₈₂ | 78 | 666005 | C | T | 3 | Protein involved in DNA repair | CED84562 | |
| Y₁₈₃ | 78 | 763771 | G | A | 3 | mrna (guanine-n7-)-methyltransferase | CED84600 | |
| Y₁₈₄ | 78 | 774252 | G | A | 2 | ataxia telangiectasia mutated | CED84602 | p.Val2842Ile |
| Y₁₈₅ | 78 | 952815 | G | A | 2 | Ornithine decarboxylase antizyme | CED84662 | p.Gly246Glu |
| Y₁₈₆ | 78 | 952860 | G | A | 2 | Ornithine decarboxylase antizyme | CED84662 | p.Gly261Glu |
| Y₁₈₇ | 78 | 1023381 | G | A | 2 | Aldo/keto reductase family proteins | CED84688 | p.Val43Ile |
| Y₁₈₈ | 78 | 1302286 | C | T | 3 | Spermidine/spermine synthases family | CED84782 | |
| Y₁₈₉ | 78 | 1317124 | G | A | 3 | hypothetical protein | CED84787 | |
| Y₁₉₀ | 78 | 1344640 | C | T | 3 | Predicted membrane protein | CED84795 | |
| Y₁₉₁ | 78 | 1426722 | C | T | 2 | high-affinity cell membrane calcium channel | CED84829 | p.Val866Ile |
| Y₁₉₂ | 78 | 1568326 | C | T | 2 | WD40/YVTN repeat-like-containing domain | CED84868 | p.Val1033Ile |
| Y₁₉₃ | 78 | 1642170 | G | A | 3 | hypothetical protein | CED84889 | |
| Y₁₉₄ | 78 | 1660408 | G | A | 2 | golgi apparatus membrane protein tvp23 | CED84897 | p.Thr539Ile |
| Y₁₉₅ | 78 | 1694684 | C | T | 2 | Conserved hypothetical protein CHP02453 | CED84912 | p.Asp239Asn |
| Y₁₉₆ | 79 | 57804 | G | A | 2 | AAA-type ATPase | CDZ96687 | p.Glu1838Lys |
| Y₁₉₇ | 79 | 132683 | C | T | 2 | Immunoglobulin-like fold | CDZ96713 | p.Ser156Asn |
| Y₁₉₈ | 79 | 307021 | C | T | 3 | HSP20-like chaperone | CDZ96777 | |
| Y₁₉₉ | 79 | 346823 | G | A | 2 | Pantothenate kinase PanK and related proteins | CDZ96789 | p.Gly590Arg |
| Y₂₀₀ | 79 | 492523 | C | T | 3 | hypothetical protein | CDZ96842 | |
| Y₂₀₁ | 79 | 575411 | C | T | 3 | Mediator complex, subunit Med4 | CDZ96868 | |
| Y₂₀₂ | 79 | 617057 | C | T | 2 | M13 family peptidase | CDZ96882 | p.Gly670Asp |
| Y₂₀₃ | 79 | 679140 | C | T | 2 | ca-transporting atpase | CDZ96904 | p.Met334Ile |
| Y₂₀₄ | 79 | 696174 | G | A | 4 | | CDZ96911 | |
| Y₂₀₅ | 79 | 747717 | A | G | 3 | Predicted histone tail methylase containing | CDZ96929 | |
| | | | | | | SET domain | | |
| Y₂₀₆ | 79 | 759589 | G | A | 4 | FOG | CDZ96932 | |
| Y₂₀₇ | 79 | 776112 | A | G | 4 | ribonuclease iii | CDZ96934 | |
| Y₂₀₈ | 79 | 1123288 | C | T | 2 | Zinc finger, RING-type | CDZ97049 | p.Thr364Ile |
| Y₂₀₉ | 79 | 1140763 | G | A | 3 | 40s ribosomal protein s15 | CDZ97053 | |
| Y₂₁₀ | 79 | 1229129 | G | A | 2 | nuclear export receptor crm1 | CDZ97086 | p.Leu253Phe |
| Y₂₁₁ | 79 | 1231740 | C | T | 2 | voltage-gated chloride channel | CDZ97087 | p.Arg715His |
| Y₂₁₂ | 79 | 1336766 | C | T | 4 | phosphatidylinositol 4-kinase | CDZ97121 | |
| Y₂₁₃ | 79 | 1430954 | G | A | 2 | hypothetical protein | CDZ97152 | p.Pro1037Ser |
| Y₂₁₄ | 79 | 1540205 | C | T | 2 | Geranylgeranyl pyrophosphate synthase | CDZ97186 | p.Met237Ile |
| Y₂₁₅ | 79 | 1674448 | G | A | 4 | Membrane coat complex Retromer, | CDZ97228 | |
| | | | | | | subunit VPS5/SNX1, Sorting nexins, and | | |
| | | | | | | related PX domain-containing proteins | | |
| Y₂₁₆ | 79 | 1797660 | C | T | 3 | Iron permease FTR1 | CDZ97265 | |
| Y₂₁₇ | 79 | 1797676 | G | A | 3 | Iron permease FTR1 | CDZ97265 | |
| Y₂₁₈ | 79 | 1842448 | G | A | 2 | t-complex protein alpha subunit (tcp-1-alpha) | CDZ97282 | p.Ser212Asn |
| Y₂₁₉ | 79 | 1855037 | A | G | 3 | hypothetical protein | CDZ97285 | |
| Y₂₂₀ | 79 | 2013361 | C | T | 8 | Predicted membrane protein | CDZ97344 | |
| Y₂₂₁ | 79 | 2027861 | C | T | 8 | Predicted short chain-type dehydrogenase | CDZ97350 | |
| Y₂₂₂ | 79 | 2121041 | G | A | 3 | Polyadenylation factor I complex, subunit, | CDZ97380 | |
| | | | | | | Yth1 (CPSF subunit) | | |
| Y₂₂₃ | 79 | 2152573 | C | T | 2 | Predicted lipase | CDZ97392 | p.Gly230Asp |
| Y₂₂₄ | 79 | 2188410 | G | A | 2 | RNA polymerase III, subunit C34 | CDZ97405 | p.Glu121Lys |
| Y₂₂₅ | 85 | 512 | A | G | 6 | | | |
| Y₂₂₆ | 85 | 516 | G | A | 6 | | | |
| Y₂₂₇ | 88 | 119 | C | T | 3 | hypothetical protein | CDZ97464 | |
| Y₂₂₈ | 88 | 196 | G | A | 3 | hypothetical protein | CDZ97464 | |
| Y₂₂₉ | 88 | 898 | C | T | 4 | hypothetical protein | CDZ97464 | |
| Y₂₃₀ | 99 | 245 | G | A | 6 | | | |
| Y₂₃₁ | 109 | 396 | T | C | 6 | | | |
| Y₂₃₂ | 118 | 396 | C | T | 2 | hypothetical protein | CDZ97478 | p.Pro41Ser |
| Y₂₃₃ | 118 | 870 | G | A | 4 | hypothetical protein | CDZ97478 | |
| Y₂₃₄ | 118 | 1491 | G | A | 4 | hypothetical protein | CDZ97478 | |
| Y₂₃₅ | 124 | 72117 | G | A | 2 | p-loop containing nucleoside triphosphate | CDZ97501 | p.Gly510Asp |
| | | | | | | hydrolase protein | | |
| Y₂₃₆ | 124 | 156052 | G | A | 2 | cytoplasm protein | CDZ97524 | p.Ala504Thr |
| Y₂₃₇ | 125 | 35864 | T | C | 3 | Plant ascorbate peroxidase | CDZ97573 | |
| Y₂₃₈ | 129 | 299 | G | A | 3 | hypothetical protein | CDZ97577 | |
| Y₂₃₉ | 129 | 433 | G | A | 3 | hypothetical protein | CDZ97577 | |
| Y₂₄₀ | 129 | 856 | G | A | 2 | hypothetical protein | CDZ97577 | p.Gly103Glu |
| Y₂₄₁ | 130 | 674 | C | T | 4 | hypothetical protein | CDZ97578 | |
| Y₂₄₂ | 141 | 15764 | C | T | 2 | lysine-trna ligase | CDZ97587 | p.Gly589Asp |
| Y₂₄₃ | 162 | 223407 | C | T | 2 | Protein of unknown function DUF2419 | CDZ97674 | p.Gly204Glu |
| Y₂₄₄ | 162 | 321070 | C | T | 4 | retrotransposon ty1-copia subclass | CDZ97703 | |
| Y₂₄₅ | 162 | 321073 | A | G | 4 | retrotransposon ty1-copia subclass | CDZ97703 | |
| Y₂₄₆ | 162 | 360320 | G | A | 2 | mRNA splicing factor | CDZ97714 | p.Ala393Val |
| Y₂₄₇ | 162 | 424391 | C | T | 3 | gtp-binding protein | CDZ97740 | |
| Y₂₄₈ | 162 | 444123 | T | C | 2 | ring finger protein | CDZ97748 | p.Asp157Gly |
| Y₂₄₉ | 162 | 467207 | C | T | 3 | cytochrome b5 | CDZ97755 | |
| Y₂₅₀ | 162 | 491906 | G | A | 3 | hypothetical protein | CDZ97764 | |
| Y₂₅₁ | 162 | 501886 | C | T | 8 | Tetraspanin/Peripherin | CDZ97769 | |
| Y₂₅₂ | 162 | 632311 | G | A | 2 | snf2 family amino-terminal protein | CDZ97814 | p.Gly88Asp |
| Y₂₅₃ | 162 | 633321 | G | A | 2 | snf2 family amino-terminal protein | CDZ97814 | p.Gly304Ser |
| Y₂₅₄ | 162 | 640005 | C | T | 2 | arginyl-trna synthetase | CDZ97815 | p.Arg318Lys |
| Y₂₅₅ | 162 | 808830 | G | A | 3 | dihydropteroate synthase | CDZ97869 | |
| Y₂₅₆ | 162 | 871911 | C | T | 8 | Predicted Zn-finger protein | CDZ97890 | |
| Y₂₅₇ | 189 | 126573 | G | A | 3 | START-like domain | CDZ97996 | |
| Y₂₅₈ | 189 | 323680 | C | T | 2 | hypothetical protein | CDZ98063 | p.Ala390Thr |
| Y₂₅₉ | 189 | 371247 | G | A | 5 | WD40 repeat-containing protein | CDZ98078 | p.Arg144* |
| Y₂₆₀ | 197 | 624 | C | T | 3 | hypothetical protein | CDZ98111 | |
| Y₂₆₁ | 198 | 238 | C | T | 6 | | | |
| Y₂₆₂ | 198 | 265 | C | T | 6 | | | |
| Y₂₆₃ | 199 | 688 | C | T | 6 | | | |
| Y₂₆₄ | 199 | 911 | C | T | 6 | | | |
| Y₂₆₅ | 199 | 971 | C | T | 6 | | | |
| Y₂₆₆ | 199 | 1218 | C | T | 6 | | | |
| Y₂₆₇ | 202 | 171 | C | T | 6 | | | |
| Y₂₆₈ | 205 | 360 | C | T | 3 | hypothetical protein | CDZ98112 | |
| Y₂₆₉ | 205 | 981 | C | T | 4 | hypothetical protein | CDZ98112 | |
| Y₂₇₀ | 208 | 117 | G | A | 6 | | | |
| Y₂₇₁ | 208 | 476 | G | A | 6 | | | |
| Y₂₇₂ | 208 | 616 | G | A | 6 | | | |
| Y₂₇₃ | 208 | 935 | G | A | 6 | | | |
| Y₂₇₄ | 209 | 312 | C | T | 8 | hypothetical protein | CDZ98113 | |
| Y₂₇₅ | 225 | 317 | C | T | 6 | | | |
| Y₂₇₆ | 227 | 202 | G | A | 6 | | | |
| Y₂₇₇ | 232 | 340 | G | A | 3 | hypothetical protein | CDZ98119 | |
| Y₂₇₈ | 232 | 1521 | C | T | 2 | hypothetical protein | CDZ98119 | p.Pro84Leu |
| Y₂₇₉ | 232 | 1662 | G | A | 2 | hypothetical protein | CDZ98119 | p.Ser131Asn |
| Y₂₈₀ | 232 | 1761 | C | T | 2 | hypothetical protein | CDZ98119 | p.Ser140Phe |
| Y₂₈₁ | 232 | 2027 | C | T | 4 | hypothetical protein | CDZ98119 | |
| Y₂₈₂ | 232 | 3060 | C | T | 2 | hypothetical protein | CDZ98120 | p.Gly115Glu |
| Y₂₈₃ | 232 | 3284 | C | T | 4 | hypothetical protein | CDZ98119 | |
| Y₂₈₄ | 232 | 4437 | G | A | 2 | hypothetical protein | CDZ98121 | p.Ser21Phe |
| Y₂₈₅ | 232 | 4561 | C | T | 3 | hypothetical protein | CDZ98120 | |
| Y₂₈₆ | 242 | 7334 | C | T | 2 | alanine-trna ligase | CDZ98125 | p.Asp781Asn |
| Y₂₈₇ | 242 | 41710 | G | A | 3 | Protein kinase essential for the initiation of | CDZ98131 | |
| | | | | | | DNA replication | | |
| Y₂₈₈ | 242 | 50262 | G | A | 8 | palp-domain-containing protein | CDZ98135 | |
| Y₂₈₉ | 242 | 88037 | G | A | 2 | hypothetical protein | CDZ98147 | p.Leu39Phe |
| Y₂₉₀ | 242 | 107587 | G | A | 4 | arginase deacetylase | CDZ98153 | |
| Y₂₉₁ | 242 | 213986 | G | A | 8 | atp-nad kinase | CDZ98185 | p.Asp654Asn |
| Y₂₉₂ | 242 | 227271 | C | T | 3 | hypothetical protein | CDZ98191 | |
| Y₂₉₃ | 242 | 233088 | G | A | 2 | fumarate reductase | CDZ98193 | p.Gly11Glu |
| Y₂₉₄ | 242 | 310353 | G | A | 2 | hypothetical protein | CDZ98216 | p.Ser76Phe |
| Y₂₉₅ | 242 | 404132 | G | A | 3 | hypothetical protein | CDZ98248 | |
| Y₂₉₆ | 242 | 412676 | G | A | 3 | peptidase c1b bleomycin hydrolase | CDZ98249 | |
| Y₂₉₇ | 242 | 485936 | G | A | 4 | Cytochrome c oxidase, subunit IV/COX5b | CDZ98270 | |
| Y₂₉₈ | 242 | 492389 | G | A | 2 | 1-aminocyclopropane-1-carboxylate | CDZ98274 | p.Glu201Lys |
| | | | | | | synthase, and related proteins | | |
| Y₂₉₉ | 242 | 514780 | C | T | 2 | endosomal p24a protein | CDZ98282 | p.Val585Met |
| Y₃₀₀ | 242 | 542663 | G | A | 3 | Sirtuin 4 and related class Il sirtuins (SIR2 family) | CDZ98290 | |
| Y₃₀₁ | 242 | 559999 | G | A | 2 | Protein-tyrosine/Dual specificity phosphatase | CDZ98297 | p.Glu29Lys |
| Y₃₀₂ | 242 | 602456 | G | A | 2 | calcineurin responsive transcription factor prz1 | CDZ98308 | p.Asp190Asn |
| Y₃₀₃ | 242 | 602531 | G | A | 2 | calcineurin responsive transcription factor prz1 | CDZ98308 | p.Ala215Thr |
| Y₃₀₄ | 242 | 604704 | C | T | 2 | hypothetical protein | CDZ98309 | p.Pro155Leu |
| Y₃₀₅ | 249 | 72016 | C | T | 3 | hypothetical protein | CED84950 | |
| Y₃₀₆ | 249 | 157550 | C | T | 8 | acyl-n-acyltransferase | CED84983 | |
| Y₃₀₇ | 249 | 191304 | C | T | 2 | Maintenance of telomere capping protein 1, Mtc1 | CED84988 | p.Gly64Ser |
| Y₃₀₈ | 249 | 272075 | C | T | 8 | beta-1,6-N-acetylglucosaminyltransferase, | CED85013 | |
| | | | | | | contains WSC domain | | |
| Y₃₀₉ | 249 | 305975 | G | A | 2 | Zn(2)-C6 fungal-type DNA-binding domain | CED85023 | p.Val135Ile |
| Y₃₁₀ | 249 | 485782 | C | T | 3 | Nuclear pore complex, Nup155 component | CED85089 | |
| | | | | | | (D Nup154, sc Nup157/Nup170) | | |
| Y₃₁₁ | 249 | 501310 | C | T | 3 | hypothetical protein | CED85093 | |
| Y₃₁₂ | 249 | 532943 | A | G | 3 | Zn(2)-C6 fungal-type DNA-binding domain | CED85099 | |
| Y₃₁₃ | 249 | 598579 | C | T | 2 | hypothetical protein | CED85125 | p.Val310Ile |
| Y₃₁₄ | 249 | 626627 | G | A | 2 | hypothetical protein | CED85132 | p.Asp723Asn |
| Y₃₁₅ | 249 | 660408 | G | A | 2 | Zn(2)-C6 fungal-type DNA-binding domain | CED85144 | p.Pro300Ser |
| Y₃₁₆ | 249 | 854220 | G | A | 2 | E3 ubiquitin protein ligase | CED85201 | p.Leu266Phe |
| Y₃₁₇ | 249 | 911274 | C | T | 2 | Putative transmembrane protein | CED85218 | p.Thr1003Ile |
| Y₃₁₈ | 249 | 932606 | C | T | 3 | hypothetical protein | CED85223 | |
| Y₃₁₉ | 249 | 945434 | C | T | 3 | Major facilitator superfamily domain, | CED85227 | |
| | | | | | | general substrate transporter | | |
| Y₃₂₀ | 249 | 945727 | C | T | 3 | Major facilitator superfamily domain, | CED85227 | |
| | | | | | | general substrate transporter | | |
| Y₃₂₁ | 249 | 977170 | C | T | 2 | protein kinase | CED85242 | p.Thr32Ile |
| Y₃₂₂ | 249 | 989520 | C | T | 3 | Glucosyltransferase-Alg8p | CED85243 | |
| Y₃₂₃ | 249 | 1014098 | C | T | 2 | Golgi-associated protein/Nedd4 WW | CED85252 | p.Val612Ile |
| | | | | | | domain-binding protein | | |
| Y₃₂₄ | 249 | 1144309 | G | A | 3 | Origin recognition complex, subunit 1, and | CED85291 | |
| | | | | | | related proteins | | |
| Y₃₂₅ | 249 | 1230068 | C | T | 2 | cysteine proteinase | CED85319 | p.Ala803Thr |
| Y₃₂₆ | 249 | 1619036 | G | A | 2 | related to c2h2 zinc finger protein flbc | CED85450 | p.Asp967Asn |
| Y₃₂₇ | 249 | 1726777 | C | T | 3 | C-14 reductase | CED85474 | |
| Y₃₂₈ | 249 | 1803575 | C | T | 2 | Hydroxymethylglutaryl-CoA reductase | CED85502 | p.Pro144Ser |
| Y₃₂₉ | 249 | 1988505 | C | T | 3 | Zn(2)-C6 fungal-type DNA-binding domain | CED85560 | |
| Y₃₃₀ | 249 | 2015272 | G | A | 2 | RNA polymerase II transcription | CED85567 | p.Arg120Lys |
| | | | | | | initiation/nucleotide excision repair factor | | |
| | | | | | | TFIIH, subunit TFB4 | | |
| Y₃₃₁ | 249 | 2198205 | G | A | 8 | Zn(2)-C6 fungal-type DNA-binding domain | CED85628 | |
| Y₃₃₂ | 252 | 512 | C | T | 6 | | | |
| Y₃₃₃ | 252 | 524 | C | T | 6 | | | |
| Y₃₃₄ | 260 | 156 | G | A | 6 | | | |
| Y₃₃₅ | 262 | 30347 | G | A | 2 | Microfibrillar-associated protein MFAP1 | CDZ98338 | p.Glu44Lys |
| Y₃₃₆ | 262 | 30359 | G | A | 2 | Microfibrillar-associated protein MFAP1 | CDZ98338 | p.Gly48Arg |
| Y₃₃₇ | 262 | 148151 | C | T | 3 | Tetratricopeptide-like helical | CDZ98375 | |
| Y₃₃₈ | 262 | 164438 | G | A | 2 | hypothetical protein | CDZ98383 | p.Gly276Glu |
| Y₃₃₉ | 262 | 201531 | G | A | 8 | snf2-family atp dependent chromatin | CDZ98396 | p.Arg1238Gln |
| | | | | | | remodeling factor snf21 | | |
| Y₃₄₀ | 262 | 252708 | G | A | 8 | arsenical pump-driving atpase | CDZ98414 | p.Gly39Asp |
| Y₃₄₁ | 262 | 380519 | C | T | 4 | guanylate kinase | CDZ98457 | |
| Y₃₄₂ | 262 | 397539 | G | A | 3 | fatty acid-2 hydroxylase | CDZ98463 | |
| Y₃₄₃ | 262 | 420102 | G | A | 2 | Sucrose transporter and related proteins | CDZ98468 | p.Thr146Ile |
| Y₃₄₄ | 262 | 446956 | C | T | 2 | RNA polymerase I termination factor, Myb | CDZ98477 | p.Ala859Val |
| | | | | | | superfamily | | |
| Y₃₄₅ | 262 | 557280 | G | A | 2 | Uncharacterized conserved protein | CDZ98518 | p.Gly2213Arg |
| Y₃₄₆ | 262 | 560713 | G | A | 8 | Uncharacterized conserved protein | CDZ98519 | |
| Y₃₄₇ | 262 | 562795 | C | T | 2 | Ferredoxin/adrenodoxin reductase | CDZ98521 | p.Gly327Asp |
| Y₃₄₈ | 262 | 567591 | G | A | 2 | wd40 repeat-like protein | CDZ98524 | p.Pro364Ser |
| Y₃₄₉ | 262 | 567801 | G | A | 2 | wd40 repeat-like protein | CDZ98524 | p.Pro294Ser |
| Y₃₅₀ | 262 | 618198 | G | A | 3 | Hsp90 co-chaperone CNS1 (contains TPR repeats) | CDZ98538 | |
| Y₃₅₁ | 262 | 639962 | A | G | 4 | hypothetical protein | CDZ98544 | |
| Y₃₅₂ | 262 | 656323 | C | G | 4 | RhoGEF GTPase | CDZ98545 | |
| Y₃₅₃ | 262 | 668764 | C | T | 3 | RhoGEF GTPase | CDZ98545 | |
| Y₃₅₄ | 262 | 691577 | C | T | 2 | Protein involved in vacuole import and degradation | CDZ98551 | p.Gly28Arg |
| Y₃₅₅ | 262 | 822734 | G | A | 2 | hypothetical protein | CDZ98597 | p.Gly184Asp |
| Y₃₅₆ | 262 | 835874 | C | T | 3 | FOG | CDZ98601 | |
| Y₃₅₇ | 262 | 865999 | G | A | 3 | Mitochondrial Fe2 transporter MMT1 and | CDZ98613 | |
| | | | | | | related transporters (cation diffusion | | |
| | | | | | | facilitator superfamily) | | |
| Y₃₅₈ | 262 | 971713 | G | A | 3 | Glycoside hydrolase, superfamily | CDZ98649 | |
| Y₃₅₉ | 262 | 1209662 | G | A | 2 | CLASP N-terminal domain | CDZ98723 | p.Leu48Phe |
| Y₃₆₀ | 262 | 1226072 | C | T | 2 | hypothetical protein | CDZ98730 | p.Ala131Val |
| Y₃₆₁ | 262 | 1305361 | G | A | 3 | Extracellular matrix glycoprotein Laminin | CDZ98753 | |
| | | | | | | subunits alpha and gamma | | |
| Y₃₆₂ | 262 | 1424293 | G | A | 2 | Pinin/SDK/MemA protein | CDZ98791 | p.Leu131Phe |
| Y₃₆₃ | 262 | 1455677 | G | A | 5 | G protein-coupled receptor, rhodopsin-like | CDZ98804 | p.Trp395* |
| Y₃₆₄ | 262 | 1550311 | C | T | 3 | Uncharacterized conserved protein | CDZ98836 | |
| Y₃₆₅ | 262 | 1615762 | G | A | 2 | histone deacetylase clr6 | CDZ98855 | p.Gly615Glu |
| Y₃₆₆ | 262 | 1677620 | G | A | 3 | Methylase | CDZ98873 | |
| Y₃₆₇ | 262 | 1694625 | C | T | 3 | RAB proteins geranylgeranyltransferase | CDZ98878 | |
| | | | | | | component A (RAB escort protein) | | |
| Y₃₆₈ | 266 | 252 | C | T | 6 | | | |

TABLE 14

| Var- | | | Refer- | | | | | | |
|---|---|---|---|---|---|---|---|---|---|
| ia- | Reference | Reference | ence | Strain | | | | | Amino Acid |
| tion | Scaffold | Position | Base | Base | Change Type | Impact | Gene Classification | CDS | Change |
| Z₁ | Scaffold_262 | 562795 | C | T | missense_variant | MODERATE | Ferredoxin/ | CDZ98521 | p.Gly327Asp |
| | | | | | | | adrenodoxin | | |
| | | | | | | | reductase | | |
| Z₂ | Scaffold_52 | 1399439 | G | A | missense_variant | MODERATE | Mitochondrial | CED83134 | p.Arg244Gln |
| | | | | | | | cytochrome b2- | | |
| Z₃ | Scaffold_176 | 358 | G | A | upstream_gene_variant | MODIFIER | Cytochrome b | CED80058 | |
| Z₄ | Scaffold_22 | 1643 | C | T | missense_variant | MODERATE | Cytochrome c oxidase | CED80056 | p.Leu366Phe |
| | | | | | | | subunit 1 | | |
| Z₅ | Scaffold_28 | 1506 | C | T | missense_variant | MODERATE | ATP synthase subunit | CDZ96150 | p.Ala227Val |
| | | | | | | | 6 | | |
| Z₆ | Scaffold_43 | 464 | G | A | missense_variant | MODERATE | NADH dehydrogenase | CDZ96151 | p.Thr147Ile |
| | | | | | | | subunit 4 | | |
| Z₇ | Scaffold_43 | 753 | C | T | missense_variant | MODERATE | NADH dehydrogenase | CDZ96151 | p.Val51Ile |
| | | | | | | | subunit 4 | | |
| Z₈ | Scaffold_62 | 875 | G | A | missense_variant | MODERATE | Cytochrome c oxidase | CDZ96152 | p.Thr110Ile |
| | | | | | | | subunit 2 | | |
| Z₉ | Scaffold_102 | 2334 | G | A | missense_variant | MODERATE | NADH dehydrogenase | CDZ96153 | p.Ser181Phe |
| | | | | | | | subunits 2, 5, and | | |
| | | | | | | | related proteins | | |
| Z₁₀ | Scaffold_102 | 2590 | C | T | missense_variant | MODERATE | NADH dehydrogenase | CDZ96153 | p.Ala96Thr |
| | | | | | | | subunits 2, 5, and | | |
| | | | | | | | related proteins | | |
| Z₁₁ | Scaffold_188 | 815 | C | T | missense_variant | MODERATE | NADH dehydrogenase | CED80060 | p.Ala79Val |
| | | | | | | | subunit 6 | | |
| Z₁₂ | Scaffold_247 | 989 | C | T | missense_variant | MODERATE | Cytochrome c oxidase | CED80061 | p.Gly104Glu |
| | | | | | | | subunit 3 | | |
| Z₁₃ | Scaffold_247 | 1053 | G | A | missense_variant | MODERATE | Cytochrome c oxidase | CED80061 | p.Leu83Phe |
| | | | | | | | subunit 3 | | |
| Z₁₄ | Scaffold_52 | 1399439 | G | A | missense_variant | MODERATE | Mitochondrial | CED83134 | p.Arg244Gln |
| | | | | | | | cytochrome b2- | | |
| Z₁₅ | Scaffold_69 | 384418 | G | A | missense_variant | MODERATE | Delta 9 fatty acid | CED83656 | p.Ala149Thr |
| | | | | | | | desaturase | | |
| Z₁₆ | Scaffold_69 | 865820 | C | T | missense_variant | MODERATE | Acyl-CoA-oxidase | CED83814 | p.Leu1253Phe |
| Z₁₇ | Scaffold_79 | 346823 | G | A | missense_variant | MODERATE | Pantothenate kinase | CDZ96789 | p.Gly590Arg |
| | | | | | | | PanK and related | | |
| | | | | | | | proteins | | |
| Z₁₈ | Scaffold_79 | 1540205 | C | T | missense_variant | MODERATE | Geranylgeranyl | CDZ97186 | p.Met237Ile |
| | | | | | | | pyrophosphate | | |
| | | | | | | | synthase | | |
| Z₁₉ | Scaffold_242 | 233088 | G | A | missense_variant | MODERATE | fumarate reductase | CDZ98193 | p.Gly11Glu |
| Z₂₀ | Scaffold_262 | 420102 | G | A | missense_variant | MODERATE | Sucrose transporter | CDZ98468 | p.Thr146Ile |
| | | | | | | | and related proteins | | |
| Z₂₁ | Scaffold_262 | 562795 | C | T | missense_variant | MODERATE | Ferredoxin/ | CDZ98521 | p.Gly327Asp |
| | | | | | | | adrenodoxin reductase | | |
| Z₂₂ | Scaffold_176 | 358 | G | A | upstream_gene_variant | MODIFIER | Cytochrome b | CED80058 | |
| Z₂₃ | Scaffold_32 | 2438 | C | T | upstream_gene_variant | MODIFIER | hypothetical protein | CDZ96332 | |
| Z₂₄ | Scaffold_69 | 1342909 | G | A | upstream_gene_variant | MODIFIER | Inositol polyphosphate | CED83975 | |
| | | | | | | | multikinase, | | |
| | | | | | | | component of the | | |
| | | | | | | | ARGR transcription | | |
| | | | | | | | regulatory complex | | |
| Z₂₅ | Scaffold_262 | 1455677 | G | A | stop_gained | HIGH | G protein-coupled | CDZ98804 | p.Trp395* |
| | | | | | | | receptor, rhodopsin- | | |
| | | | | | | | like | | |

TABLE 15

| | RS | RP | Change | T | GC | CDS |
|---|---|---|---|---|---|---|
| V₁ | Scaffold_262 | 562795 | c.980G > A | missense_variant | Ferredoxin/adrenodoxin reductase | CDZ98521 |
| | Scaffold_79 | 1540205 | c.711G > A | missense_variant | Geranylgeranyl pyrophosphate | CDZ97186 |
| | | | | | synthase | |
| | Scaffold_242 | 233088 | c.32G > A | missense_variant | Succinate dehydrogenase | CDZ98193 |
| | Scaffold_32 | 2438 | c.-9C > T | upstream_gene_variant | hypothetical protein | CDZ96332 |
| | Scaffold_176 | 358 | c.-91G > A | upstream_gene_variant | cytochrome b | CED80058 |
| | Scaffold_176 | 1872 | c.*923G > A | downstream_gene_variant | cytochrome b | CED80058 |
| | Scaffold_176 | 1980 | c.*1031G > A | downstream_gene_variant | cytochrome b | CED80058 |
| | Scaffold_179 | 1525 | c.516-188G > A | intron_variant | NADH:ubiquinone/plastoquinone | CDZ96154 |
| | | | | | oxidoreductase, chain 3 | |
| | Scaffold_179 | 1780 | c.556 + 27C > T | intron_variant | NADH:ubiquinone/plastoquinone | CDZ96154 |
| | | | | | oxidoreductase, chain 3 | |
| | Scaffold_22 | 1643 | c.1096C > T | missense_variant | cytochrome c oxidase subunit 1 | CED80056 |
| | Scaffold_22 | 2524 | c.*244G > A | downstream_gene_variant | cytochrome c oxidase subunit 1 | CED80056 |
| | Scaffold_62 | 875 | c.329C > T | missense_variant | cytochrome c oxidase subunit 2 | CDZ96152 |
| | Scaffold_247 | 102 | c.*598C > T | downstream_gene_variant | cytochrome c oxidase subunit 3 | CED80061 |
| | Scaffold_247 | 989 | c.311G > A | missense_variant | cytochrome c oxidase subunit 3 | CED80061 |
| | Scaffold_28 | 236 | c.-513G > A | upstream_gene_variant | atp synthase subunit 6 | CDZ96150 |
| | Scaffold_28 | 377 | c.-372G > A | upstream_gene_variant | atp synthase subunit 6 | CDZ96150 |
| | Scaffold_28 | 1506 | c.680C > T | missense_variant | atp synthase subunit 6 | CDZ96150 |
| | Scaffold_28 | 1677 | c.*89C > T | downstream_gene_variant | atp synthase subunit 6 | CDZ96150 |
| | Scaffold_42 | 804 | c.*2C > T | downstream_gene_variant | atp synthase subunit mitochondrial | CDZ96333 |
| | Scaffold_42 | 1559 | c.*757G > A | downstream_gene_variant | atp synthase subunit mitochondrial | CDZ96333 |
| | Scaffold_43 | 464 | c.440C > T | missense_variant | nadh dehydrogenase subunit 4 | CDZ96151 |
| | Scaffold_43 | 753 | c.151G > A | missense_variant | nadh dehydrogenase subunit 4 | CDZ96151 |
| | Scaffold_43 | 1527 | c.-6246 > A | upstream_gene_variant | nadb dehydrogenase subunit 4 | CDZ96151 |
| | Scaffold_43 | 1748 | c.-845C > T | upstream_gene_variant | nadh dehydrogenase subunit 4 | CDZ96151 |
| | Scaffold_43 | 1928 | c.-1025G > A | upstream_gene_variant | nadh dehydrogenase subunit 4 | CDZ96151 |
| V₂₆ | Scaffold_247 | 1053 | c.247C > T | missense_variant | cytochrome c oxidase subunit 3 | CED80061 |

TABLE 16

| | | log2 (fold | | |
|---|---|---|---|---|
| CDS | Genomic locus | change) | q value | Uniprot ID |
| CED85080 | Scaffold_249:455827-456255 | 9.2956 | 0.00107 | Uniprot/SPTREMBL:A0A0F7SWN7 |
| CDZ98286 | Scaffold_242:525123-525779 | 6.86206 | 0.00107 | Uniprot/SPTREMBL:A0A0F7SHB1 |
| CED84930 | Scaffold_249:6618-7695 | 6.68973 | 0.00107 | Uniprot/SPTREMBL:A0A0F7SWF7 |
| CDZ96332 | Scaffold_32:2446-3134 | 6.52032 | 0.00107 | Uniprot/SPTREMBL:A0A0F7SH35 |
| CED82392 | Scaffold_33:1246311-1246833 | 6.42503 | 0.00107 | Uniprot/SPTREMBL:A0A0F7SJX8 |
| CED82668 | Scaffold_52:13001-13910 | 6.33106 | 0.00107 | Uniprot/SPTREMBL:A0A0F7SRH2 |
| CDZ97516 | Scaffold_124:123781-126151 | 6.23645 | 0.00107 | Uniprot/SPTREMBL:A0A0F7SFE4 |
| CDZ98118 | Scaffold_223:211-788 | 6.11075 | 0.03259 | Uniprot/SPTREMBL:A0A0F7SKA6 |
| CDZ97577 | Scaffold_129:458-1082 | 6.09922 | 0.0043 | Uniprot/SPTREMBL:A0A0F7SKU8 |
| CED85432 | Scaffold_249:1559276-1562689 | 6.02212 | 0.00107 | Uniprot/SPTREMBL:A0A0F7STB7 |
| CDZ96153 | Scaffold_102:1486-3157 | 6.01467 | 0.00107 | Uniprot/SPTREMBL:A0A0F7SF89 |
| CDZ96711 | Scaffold_79:125953-127385 | 5.94901 | 0.00107 | Uniprot/SPTREMBL:A0A0F7SEF7 |
| CED80057 | Scaffold_55:626-1151 | 5.84552 | 0.0043 | Uniprot/SPTREMBL:A0A0F7SIU3 |
| CDZ96413 | Scaffold_54:92765-93283 | 5.60714 | 0.00107 | Uniprot/SPTREMBL:A0A0F7SFN7 |
| CED80056 | Scaffold_22:403-2280 | 5.57479 | 0.00107 | Uniprot/SPTREMBL:A0A0F7SKT4 |
| CDZ98119 | Scaffold_232:1114-1783 | 5.55736 | 0.00107 | Uniprot/SPTREMBL:A0A0F7SKZ2 |
| CED82658 | Scaffold_33:2068732-2071114 | 5.41561 | 0.00107 | Uniprot/SPTREMBL:A0A0F7SRG4 |
| CDZ97957 | Scaffold_185:365-1651 | 5.40013 | 0.00107 | Uniprot/SPTREMBL:A0A0F7SLT0 |
| CED80059 | Scaffold_176:1042-1615 | 5.32443 | 0.00107 | Uniprot/SPTREMBL:A0A0F7SMU1 |
| CDZ96152 | Scaffold_62:372-1203 | 5.30334 | 0.00107 | Uniprot/SPTREMBL:A0A0F7SGI5 |
| CDZ96150 | Scaffold_28:748-1588 | 5.25135 | 0.00107 | Uniprot/SPTREMBL:A0A0F7SEE8 |
| CDZ97807 | Scaffold_162:611422-614937 | 5.25097 | 0.00107 | Uniprot/SPTREMBL:A0A0F7SLF3 |
| CED85517 | Scaffold_249:1853363-1853729 | 5.20577 | 0.00107 | Uniprot/SPTREMBL:A0A0F7STM0 |
| CED80058 | Scaffold_176:448-949 | 5.15189 | 0.00107 | Uniprot/SPTREMBL:A0A0F7SPC4 |
| CED85164 | Scaffold_249:714476-715290 | 5.07079 | 0.00107 | Uniprot/SPTREMBL:A0A0F7SWM1 |
| CED80061 | Scaffold_247:699-1383 | 5.01115 | 0.00107 | Uniprot/SPTREMBL:A0A0F7SKU0 |
| CED80060 | Scaffold_188:484-1047 | 4.99248 | 0.00107 | Uniprot/SPTREMBL:A0A0F7SN33 |
| CDZ96865 | Scaffold_79:565627-566760 | 4.86279 | 0.00107 | Uniprot/SPTREMBL:A0A0F7SF95 |
| CDZ96908 | Scaffold_79:687220-687896 | 4.79852 | 0.00107 | Uniprot/SPTREMBL:A0A0F7SGN7 |
| CDZ96154 | Scaffold_179:741-2193 | 4.72875 | 0.0043 | Uniprot/SPTREMBL:A0A0F7SFY0 |
| CDZ96333 | Scaffold_42:183-802 | 4.64957 | 0.00107 | Uniprot/SPTREMBL:A0A0F7SFK3 |
| CED83979 | Scaffold_69:1348663-1349659 | 4.6261 | 0.00107 | Uniprot/SPTREMBL:A0A0F7STJ2 |
| CED83252 | Scaffold_52:1717622-1718044 | 4.60829 | 0.00107 | Uniprot/SPTREMBL:A0A0F7SMG2 |
| CDZ96608 | Scaffold_54:697264-699076 | 4.57217 | 0.00107 | Uniprot/SPTREMBL:A0A0F7SFX6 |
| CED83097 | Scaffold_52:1287383-1290100 | 4.53939 | 0.00107 | Uniprot/SPTREMBL:A0A0F7SM09 |
| CED84673 | Scaffold_78:975769-976045 | 4.39949 | 0.00107 | Uniprot/SPTREMBL:A0A0F7SX11 |
| CED83815 | Scaffold_69:866921-870931 | 4.33088 | 0.00107 | Uniprot/SPTREMBL:A0A0F7STE4 |
| CED84179 | Scaffold_69:1939122-1939368 | 4.33055 | 0.00879 | Uniprot/SPTREMBL:A0A0F7SU00 |
| CDZ98103 | Scaffold_189:441479-441882 | 4.29543 | 0.00107 | Uniprot/SPTREMBL:A0A0F7SK73 |
| CED84804 | Scaffold_78:1364982-1365369 | 4.25633 | 0.00107 | Uniprot/SPTREMBL:A0A0F7SVT2 |
| CDZ96624 | Scaffold_54:747460-747837 | 4.25212 | 0.00107 | Uniprot/SPTREMBL:A0A0F7SGZ8 |
| CED82344 | Scaffold_33:1072903-1074335 | 4.23726 | 0.00107 | Uniprot/SPTREMBL:A0A0F7SNU8 |
| CDZ96883 | Scaffold_79:620425-621230 | 4.23607 | 0.00283 | Uniprot/SPTREMBL:A0A0F7SGL4 |
| CDZ97379 | Scaffold_79:2108930-2109657 | 4.19032 | 0.00107 | Uniprot/SPTREMBL:A0A0F7SJ70 |
| CDZ98774 | Scaffold_262:1369422-1370696 | 4.17583 | 0.00107 | Uniprot/SPTREMBL:A0A0F7SMU0 |
| CDZ96507 | Scaffold_54:383723-384889 | 4.13638 | 0.01841 | Uniprot/SPTREMBL:A0A0F7SHK0 |
| CDZ98452 | Scaffold_262:363391-365724 | 4.1355 | 0.00107 | Uniprot/SPTREMBL:A0A0F7SMX1 |
| CDZ96151 | Scaffold_43:7-903 | 4.12896 | 0.00107 | Uniprot/SPTREMBL:A0A0F7SE37 |
| CDZ97452 | Scaffold_79:2315499-2317423 | 4.1242 | 0.00107 | Uniprot/SPTREMBL:A0A0F7SKJ4 |
| CED84998 | Scaffold_249:216807-219954 | 4.04803 | 0.00107 | Uniprot/SPTREMBL:A0A0F7SXS0 |
| CED84637 | Scaffold_78:884903-885167 | 3.95039 | 0.00107 | Uniprot/SPTREMBL:A0A0F7SQY4 |
| CDZ97448 | Scaffold_79:2302089-2304040 | 3.94041 | 0.00107 | Uniprot/SPTREMBL:A0A0F7SIB1 |
| CED82193 | Scaffold_33:587555-588509 | 3.91561 | 0.00107 | Uniprot/SPTREMBL:A0A0F7SQ04 |
| CED82352 | Scaffold_33:1097639-1100022 | 3.88483 | 0.00107 | Uniprot/SPTREMBL:A0A0F7SJU9 |
| CDZ96740 | Scaffold_79:209909-212506 | 3.85991 | 0.00107 | Uniprot/SPTREMBL:A0A0F7SF48 |
| CED84786 | Scaffold_78:1308664-1311311 | 3.84158 | 0.00107 | Uniprot/SPTREMBL:A0A0F7STE6 |
| CDZ96633 | Scaffold_77:13254-14404 | 3.73031 | 0.00107 | Uniprot/SPTREMBL:A0A0F7SG10 |
| CED84404 | Scaffold_78:150939-152226 | 3.6789 | 0.00107 | Uniprot/SPTREMBL:A0A0F7SUN7 |
| CDZ97797 | Scaffold_162:579804-580834 | 3.66705 | 0.00283 | Uniprot/SPTREMBL:A0A0F7SLE9 |
| CDZ96601 | Scaffold_54:679325-679595 | 3.62342 | 0.00107 | Uniprot/SPTREMBL:A0A0F7SEC7 |
| CDZ96647 | Scaffold_77:41123-42029 | 3.61574 | 0.00107 | Uniprot/SPTREMBL:A0A0F7SI01 |
| CDZ98284 | Scaffold_242:519765-520056 | 3.58807 | 0.00107 | Uniprot/SPTREMBL:A0A0F7SLM1 |
| CDZ96434 | Scaffold_54:155782-156484 | 3.56523 | 0.00107 | Uniprot/SPTREMBL:A0A0F7SGI3 |
| CED84299 | Scaffold_69:2304680-2305552 | 3.54505 | 0.00107 | Uniprot/SPTREMBL:A0A0F7SUE9 |
| CDZ96748 | Scaffold_79:228516-229974 | 3.54221 | 0.00107 | Uniprot/SPTREMBL:A0A0F7SGA0 |
| CDZ97723 | Scaffold_162:378790-379092 | 3.53675 | 0.00107 | Uniprot/SPTREMBL:A0A0F7SJ97 |
| CED84714 | Scaffold_78:1088351-1090512 | 3.52201 | 0.01647 | Uniprot/SPTREMBL:A0A0F7SVC6 |
| CED85389 | Scaffold_249:1437652-1438024 | 3.48785 | 0.00635 | Uniprot/SPTREMBL:A0A0F7SXD3 |
| CDZ96731 | Scaffold_79:178450-181319 | 3.46595 | 0.00107 | Uniprot/SPTREMBL:A0A0F7SEG4 |
| CDZ97605 | Scaffold_162:65-848 | 3.46476 | 0.02837 | Uniprot/SPTREMBL:A0A0F7SGW0 |
| CDZ96885 | Scaffold_79:627282-627758 | 3.4451 | 0.00107 | Uniprot/SPTREMBL:A0A0F7SFA1 |
| CED82665 | Scaffold_52:6245-6725 | 3.42717 | 0.00107 | Uniprot/SPTREMBL:A0A0F7SQ81 |
| CED82464 | Scaffold_33:1468151-1469956 | 3.40784 | 0.00572 | Uniprot/SPTREMBL:A0A0F7SP15 |
| CED83623 | Scaffold_69:281336-282359 | 3.39893 | 0.00107 | Uniprot/SPTREMBL:A0A0F7SUF7 |
| CDZ97986 | Scaffold_189:92376-93295 | 3.39563 | 0.00763 | Uniprot/SPTREMBL:A0A0F7SGH5 |
| CED84525 | Scaffold_78:546343-546634 | 3.39311 | 0.04003 | Uniprot/SPTREMBL:A0A0F7SVG1 |
| CED83140 | Scaffold_52:1417194-1418401 | 3.36574 | 0.00107 | Uniprot/SPTREMBL:A0A0F7SRK1 |
| CDZ97423 | Scaffold_79:2235980-2237243 | 3.33272 | 0.04038 | Uniprot/SPTREMBL:A0A0F7SI94 |
| CED83508 | Scaffold_52:2532580-2533462 | 3.2865 | 0.00107 | Uniprot/SPTREMBL:A0A0F7SU56 |
| CDZ96639 | Scaffold_77:25331-25763 | 3.27732 | 0.00107 | Uniprot/SPTREMBL:A0A0F7SH10 |
| CED82131 | Scaffold_33:407214-418268 | 3.23793 | 0.002 | Uniprot/SPTREMBL:A0A0F7SL25 |
| CDZ97778 | Scaffold_162:523968-524442 | 3.23551 | 0.00107 | Uniprot/SPTREMBL:A0A0F7SJE9 |
| CDZ97625 | Scaffold_162:67635-70853 | 3.23462 | 0.00107 | Uniprot/SPTREMBL:A0A0F7SGX3 |
| CED83795 | Scaffold_69:789151-792032 | 3.19812 | 0.00107 | Uniprot/SPTREMBL:A0A0F7STA1 |
| CED83831 | Scaffold_69:919459-919771 | 3.18779 | 0.00107 | Uniprot/SPTREMBL:A0A0F7SR09 |
| CED84215 | Scaffold_69:2041512-2041896 | 3.18206 | 0.00107 | Uniprot/SPTREMBL:A0A0F7SUD7 |
| CDZ97534 | Scaffold_124:183269-184916 | 3.17103 | 0.00107 | Uniprot/SPTREMBL:A0A0F7SJL0 |
| CDZ96425 | Scaffold_54:135835-138404 | 3.1657 | 0.00572 | Uniprot/SPTREMBL:A0A0F7SEQ8 |
| CDZ96691 | Scaffold_79:68284-68653 | 3.14581 | 0.00107 | Uniprot/SPTREMBL:A0A0F7SEF0 |
| CDZ96227 | Scaffold_24:209321-215733 | 3.10759 | 0.00107 | Uniprot/SPTREMBL:A0A0F7SGW6 |
| CDZ97639 | Scaffold_162:112120-113343 | 3.09923 | 0.00107 | Uniprot/SPTREMBL:A0A0F7SJT0 |
| CED85588 | Scaffold_249:2066996-2068681 | 3.09682 | 0.002 | Uniprot/SPTREMBL:A0A0F7SZ44 |
| CED82973 | Scaffold_52:935660-938515 | 3.08913 | 0.03157 | Uniprot/SPTREMBL:A0A0F7SSD6 |
| CED85285 | Scaffold_249:1122388-1123094 | 3.0859 | 0.02777 | Uniprot/SPTREMBL:A0A0F7SXA0 |
| CDZ96723 | Scaffold_79:158597-160262 | 3.05802 | 0.00107 | Uniprot/SPTREMBL:A0A0F7SG83 |
| CED85248 | Scaffold_249:999627-1000271 | 3.04686 | 0.00818 | Uniprot/SPTREMBL:A0A0F7SYB5 |
| CED84711 | Scaffold_78:1081064-1082458 | 3.03732 | 0.00107 | Uniprot/SPTREMBL:A0A0F7ST85 |
| CED84955 | Scaffold_249:76786-77647 | 3.03601 | 0.002 | Uniprot/SPTREMBL:A0A0F7SWH0 |
| CDZ96974 | Scaffold_79:897858-899128 | 3.01336 | 0.00107 | Uniprot/SPTREMBL:A0A0F7SI66 |
| CED82598 | Scaffold_33:1903939-1904188 | 3.00633 | 0.00697 | Uniprot/SPTREMBL:A0A0F7SRB7 |
| CDZ97694 | Scaffold_162:285211-285769 | 2.98783 | 0.00107 | Uniprot/SPTREMBL:A0A0F7SK35 |
| CDZ97736 | Scaffold_162:413045-414204 | 2.98331 | 0.00107 | Uniprot/SPTREMBL:A0A0F7SFV1 |
| CDZ96625 | Scaffold_63:96-1049 | 2.97684 | 0.026 | Uniprot/SPTREMBL:A0A0F7SEZ4 |
| CDZ97068 | Scaffold_79:1181236-1182652 | 2.93609 | 0.00107 | Uniprot/SPTREMBL:A0A0F7SH49 |
| CDZ97420 | Scaffold_79:2229810-2232473 | 2.93301 | 0.0139 | Uniprot/SPTREMBL:A0A0F7SG73 |
| CED85140 | Scaffold_249:646783-648424 | 2.92845 | 0.00635 | Uniprot/SPTREMBL:A0A0F7SWV9 |
| CDZ97946 | Scaffold_162:1032808-1037153 | 2.91654 | 0.00107 | Uniprot/SPTREMBL:A0A0F7SGD0 |
| CDZ98244 | Scaffold_242:394144-394730 | 2.91373 | 0.00763 | Uniprot/SPTREMBL:A0A0F7SLI0 |
| CED83041 | Scaffold_52:1131882-1133579 | 2.91355 | 0.00107 | Uniprot/SPTREMBL:A0A0F7SNP9 |
| CED85485 | Scaffold_249:1757631-1758380 | 2.9125 | 0.03701 | Uniprot/SPTREMBL:A0A0F7SY71 |
| CDZ96603 | Scaffold_54:684615-686836 | 2.86775 | 0.00107 | Uniprot/SPTREMBL:A0A0F7SFX2 |
| CED85448 | Scaffold_249:1609292-1610258 | 2.86226 | 0.01647 | Uniprot/SPTREMBL:A0A0F7SYS0 |
| CDZ96340 | Scaffold_53:5356-7165 | 2.86174 | 0.00107 | Uniprot/SPTREMBL:A0A0F7SEM7 |
| CDZ97752 | Scaffold_162:456053-456784 | 2.8593 | 0.01003 | Uniprot/SPTREMBL:A0A0F7SLC8 |
| CDZ96938 | Scaffold_79:794992-795565 | 2.85559 | 0.00107 | Uniprot/SPTREMBL:A0A0F7SGR2 |
| CED84750 | Scaffold_78:1210728-1211551 | 2.84262 | 0.01157 | Uniprot/SPTREMBL:A0A0F7SVW4 |
| CED84654 | Scaffold_78:929313-930567 | 2.83588 | 0.0421 | Uniprot/SPTREMBL:A0A0F7SV72 |
| CED84929 | Scaffold_249:1542-2672 | 2.82389 | 0.03333 | Uniprot/SPTREMBL:A0A0F7SW16 |
| CED85266 | Scaffold_249:1061106-1062657 | 2.81591 | 0.03435 | Uniprot/SPTREMBL:A0A0F7SUQ5 |
| CED83544 | Scaffold_69:53167-54761 | 2.81175 | 0.02802 | Uniprot/SPTREMBL:A0A0F7SSD9 |
| CED83430 | Scaffold_52:2282025-2284655 | 2.81037 | 0.00107 | Uniprot/SPTREMBL:A0A0F7SSA2 |
| CDZ97896 | Scaffold_162:885528-888251 | 2.8087 | 0.00107 | Uniprot/SPTREMBL:A0A0F7SG99 |
| CDZ98193 | Scaffold_242:233056-236702 | 2.80059 | 0.00107 | Uniprot/SPTREMBL:A0A0F7SKM1 |
| CDZ96546 | Scaffold_54:514464-515814 | 2.79309 | 0.01003 | Uniprot/SPTREMBL:A0A0F7SEB6 |
| CED82513 | Scaffold_33:1637082-1638403 | 2.78715 | 0.04003 | Uniprot/SPTREMBL:A0A0F7SR22 |
| CDZ98764 | Scaffold_262:1341690-1344148 | 2.77661 | 0.00107 | Uniprot/SPTREMBL:A0A0F7SMT3 |
| CED83907 | Scaffold_69:1129431-1131705 | 2.76752 | 0.01794 | Uniprot/SPTREMBL:A0A0F7SP83 |
| CED82580 | Scaffold_33:1852517-1855025 | 2.76238 | 0.00107 | Uniprot/SPTREMBL:A0A0F7SQ15 |
| CED83518 | Scaffold_52:2553963-2555767 | 2.743 | 0.03229 | Uniprot/SPTREMBL:A0A0F7SU60 |
| CDZ97921 | Scaffold_162:964515-965232 | 2.71423 | 0.00107 | Uniprot/SPTREMBL:A0A0F7SGB4 |
| CED85536 | Scaffold_249:1908367-1911501 | 2.71336 | 0.00107 | Uniprot/SPTREMBL:A0A0F7SVG2 |
| CDZ97601 | Scaffold_155:195-516 | 2.70857 | 0.03157 | Uniprot/SPTREMBL:A0A0F7SFL1 |
| CDZ96325 | Scaffold_24:506034-507436 | 2.69145 | 0.00283 | Uniprot/SPTREMBL:A0A0F7SEM4 |
| CDZ97097 | Scaffold_79:1257573-1259549 | 2.67196 | 0.04565 | Uniprot/SPTREMBL:A0A0F7SJC9 |
| CED85390 | Scaffold_249:1438192-1439158 | 2.66706 | 0.03435 | Uniprot/SPTREMBL:A0A0F7SXN7 |
| CED85516 | Scaffold_249:1850199-1853329 | 2.65919 | 0.00107 | Uniprot/SPTREMBL:A0A0F7SVE4 |
| CED83983 | Scaffold_69:1358613-1359556 | 2.64233 | 0.00107 | Uniprot/SPTREMBL:A0A0F7SVK0 |
| CDZ98301 | Scaffold_242:578537-580259 | 2.63598 | 0.00107 | Uniprot/SPTREMBL:A0A0F7SHC5 |
| CED84180 | Scaffold_69:1939424-1940850 | 2.63185 | 0.02306 | Uniprot/SPTREMBL:A0A0F7SUC0 |
| CED85339 | Scaffold_249:1288096-1288987 | 2.63024 | 0.00879 | Uniprot/SPTREMBL:A0A0F7SXB4 |
| CED83447 | Scaffold_52:2325373-2326346 | 2.60976 | 0.00635 | Uniprot/SPTREMBL:A0A0F7SN08 |
| CDZ98703 | Scaffold_262:1147976-1153160 | 2.60584 | 0.00572 | Uniprot/SPTREMBL:A0A0F7SM10 |
| CED83390 | Scaffold_52:2154690-2155940 | 2.57361 | 0.00107 | Uniprot/SPTREMBL:A0A0F7SS86 |
| CED85564 | Scaffold_249:2007538-2009056 | 2.56166 | 0.00107 | Uniprot/SPTREMBL:A0A0F7SXT5 |
| CED85596 | Scaffold_249:2088847-2090119 | 2.55839 | 0.02962 | Uniprot/SPTREMBL:A0A0F7SVL0 |
| CDZ96960 | Scaffold_79:859494-860819 | 2.55825 | 0.02443 | Uniprot/SPTREMBL:A0A0F7SFD1 |
| CED83901 | Scaffold_69:1112099-1112693 | 2.55723 | 0.00107 | Uniprot/SPTREMBL:A0A0F7SR75 |
| CDZ96968 | Scaffold_79:880554-881657 | 2.55571 | 0.00107 | Uniprot/SPTREMBL:A0A0F7SGU9 |
| CDZ97756 | Scaffold_162:463549-466940 | 2.55281 | 0.00107 | Uniprot/SPTREMBL:A0A0F7SFY6 |
| CED84981 | Scaffold_249:153000-155119 | 2.54954 | 0.00635 | Uniprot/SPTREMBL:A0A0F7SU30 |
| CDZ96256 | Scaffold_24:312616-313991 | 2.54133 | 0.00107 | Uniprot/SPTREMBL:A0A0F7SE58 |
| CED84768 | Scaffold_78:1260836-1261396 | 2.53828 | 0.00107 | Uniprot/SPTREMBL:A0A0F7SX63 |
| CDZ97720 | Scaffold_162:372745-373132 | 2.53182 | 0.00107 | Uniprot/SPTREMBL:A0A0F7SH84 |
| CDZ96462 | Scaffold_54:239487-240962 | 2.52853 | 0.03333 | Uniprot/SPTREMBL:A0A0F7SHG2 |
| CDZ96308 | Scaffold_24:471561-474813 | 2.51609 | 0.03435 | Uniprot/SPTREMBL:A0A0F7SFJ8 |
| CDZ96398 | Scaffold_54:48224-49552 | 2.51507 | 0.00107 | Uniprot/SPTREMBL:A0A0F7SFM9 |
| CED84125 | Scaffold_69:1789791-1791079 | 2.51267 | 0.00107 | Uniprot/SPTREMBL:A0A0F7SUA0 |
| CED82597 | Scaffold_33:1901063-1903830 | 2.51046 | 0.00107 | Uniprot/SPTREMBL:A0A0F7SKE3 |
| CDZ96812 | Scaffold_79:415347-415957 | 2.50562 | 0.00358 | Uniprot/SPTREMBL:A0A0F7SIN5 |
| CED85214 | Scaffold_249:894511-897801 | 2.4834 | 0.00107 | Uniprot/SPTREMBL:A0A0F7SWT8 |
| CED83935 | Scaffold_69:1212340-1212580 | 2.44459 | 0.00879 | Uniprot/SPTREMBL:A0A0F7STN4 |
| CDZ96565 | Scaffold_54:557265-562538 | 2.44098 | 0.00107 | Uniprot/SPTREMBL:A0A0F7SEY2 |
| CDZ96800 | Scaffold_79:377379-378952 | 2.43835 | 0.03632 | Uniprot/SPTREMBL:A0A0F7SF69 |
| CDZ97029 | Scaffold_79:1059984-1060272 | 2.43064 | 0.02802 | Uniprot/SPTREMBL:A0A0F7SI95 |
| CDZ97443 | Scaffold_79:2290162-2292224 | 2.41806 | 0.02473 | Uniprot/SPTREMBL:A0A0F7SIA8 |
| CED83766 | Scaffold_69:691513-694257 | 2.41186 | 0.00358 | Uniprot/SPTREMBL:A0A0F7SQQ1 |
| CDZ97945 | Scaffold_162:1031822-1032537 | 2.40755 | 0.02802 | Uniprot/SPTREMBL:A0A0F7SHT1 |
| CDZ96911 | Scaffold_79:690843-693362 | 2.38478 | 0.00107 | Uniprot/SPTREMBL:A0A0F7SEN6 |
| CDZ98503 | Scaffold_262:516975-517254 | 2.38051 | 0.00358 | Uniprot/SPTREMBL:A0A0F7SLD8 |
| CED84099 | Scaffold_69:1712578-1712954 | 2.37587 | 0.00107 | Uniprot/SPTREMBL:A0A0F7STV4 |
| CDZ97312 | Scaffold_79:1919826-1920493 | 2.37313 | 0.00107 | Uniprot/SPTREMBL:A0A0F7SK29 |
| CED82663 | Scaffold_33:2085699-2086479 | 2.36106 | 0.00107 | Uniprot/SPTREMBL:A0A0F7SRG7 |
| CED84677 | Scaffold_78:988591-991029 | 2.35953 | 0.00107 | Uniprot/SPTREMBL:A0A0F7SR25 |
| CED83843 | Scaffold_69:952349-955303 | 2.35584 | 0.00818 | Uniprot/SPTREMBL:A0A0F7SV82 |
| CED82395 | Scaffold_33:1255820-1258390 | 2.35553 | 0.00107 | Uniprot/SPTREMBL:A0A0F7SPH8 |
| CED85400 | Scaffold_249:1464663-1466595 | 2.35205 | 0.00107 | Uniprot/SPTREMBL:A0A0F7SXS5 |
| CED82482 | Scaffold_33:1524955-1525327 | 2.33456 | 0.00107 | Uniprot/SPTREMBL:A0A0F7SK45 |
| CED82114 | Scaffold_33:344547-346439 | 2.33295 | 0.00107 | Uniprot/SPTREMBL:A0A0F7SN68 |
| CDZ96998 | Scaffold_79:961487-962221 | 2.33028 | 0.00283 | Uniprot/SPTREMBL:A0A0F7SH05 |
| CDZ96634 | Scaffold_77:15676-16842 | 2.32402 | 0.00107 | Uniprot/SPTREMBL:A0A0F7SH06 |
| CDZ98558 | Scaffold_262:709808-712125 | 2.31029 | 0.00107 | Uniprot/SPTREMBL:A0A0F7SLI7 |
| CED85083 | Scaffold_249:460456-461478 | 2.30642 | 0.02919 | Uniprot/SPTREMBL:A0A0F7SXY0 |
| CDZ96978 | Scaffold_79:911819-914066 | 2.2979 | 0.03435 | Uniprot/SPTREMBL:A0A0F7SGV8 |
| CDZ97884 | Scaffold_162:847559-849948 | 2.28895 | 0.02473 | Uniprot/SPTREMBL:A0A0F7SKD6 |
| CED83769 | Scaffold_69:699438-701924 | 2.28794 | 0.00107 | Uniprot/SPTREMBL:A0A0F7SSZ9 |
| CED85326 | Scaffold_249:1257258-1258493 | 2.2837 | 0.00107 | Uniprot/SPTREMBL:A0A0F7SUY7 |
| CDZ96782 | Scaffold_79:323429-325820 | 2.27037 | 0.00107 | Uniprot/SPTREMBL:A0A0F7SIK6 |
| CDZ97481 | Scaffold_124:7774-13138 | 2.25897 | 0.0043 | Uniprot/SPTREMBL:A0A0F7SFC7 |
| CED85048 | Scaffold_249:370221-371540 | 2.25614 | 0.00697 | Uniprot/SPTREMBL:A0A0F7SXU8 |
| CED85332 | Scaffold_249:1271082-1271657 | 2.24969 | 0.02351 | Uniprot/SPTREMBL:A0A0F7ST43 |
| CED82842 | Scaffold_52:560142-562537 | 2.24235 | 0.04884 | Uniprot/SPTREMBL:A0A0F7SL74 |
| CDZ96732 | Scaffold_79:181587-183236 | 2.23715 | 0.00107 | Uniprot/SPTREMBL:A0A0F7SIG1 |
| CED83940 | Scaffold_69:1230023-1233189 | 2.23141 | 0.00572 | Uniprot/SPTREMBL:Q3HR17 |
| CDZ98646 | Scaffold_262:962599-964005 | 2.22002 | 0.00107 | Uniprot/SPTREMBL:A0A0F7SI49 |
| CED84596 | Scaffold_78:751045-752053 | 2.21506 | 0.00107 | Uniprot/SPTREMBL:A0A0F7ST01 |
| CED84309 | Scaffold_69:2328564-2329971 | 2.18139 | 0.00818 | Uniprot/SPTREMBL:A0A0F7SUF6 |
| CED85421 | Scaffold_249:1522642-1523545 | 2.1799 | 0.00107 | Uniprot/SPTREMBL:A0A0F7SV61 |
| CDZ96632 | Scaffold_77:12435-12783 | 2.17855 | 0.02637 | Uniprot/SPTREMBL:A0A0F7SHY4 |
| CED82055 | Scaffold_33:159801-160443 | 2.16592 | 0.00107 | Uniprot/SPTREMBL:A0A0F7SN80 |
| CED84932 | Scaffold_249:11741-12335 | 2.15937 | 0.00107 | Uniprot/SPTREMBL:A0A0F7SRU4 |
| CED83176 | Scaffold_52:1503852-1505330 | 2.15895 | 0.00107 | Uniprot/SPTREMBL:A0A0F7SP03 |
| CED85184 | Scaffold_249:785518-789209 | 2.15362 | 0.00107 | Uniprot/SPTREMBL:A0A0F7SWN9 |
| CED83158 | Scaffold_52:1456975-1458575 | 2.15067 | 0.01101 | Uniprot/SPTREMBL:A0A0F7SSX2 |
| CED84360 | Scaffold_78:4618-6613 | 2.14217 | 0.00107 | Uniprot/SPTREMBL:A0A0F7SV22 |
| CDZ96606 | Scaffold_54:691857-692139 | 2.13837 | 0.03188 | Uniprot/SPTREMBL:A0A0F7SEC8 |
| CDZ98281 | Scaffold_242:511970-514140 | 2.12939 | 0.03362 | Uniprot/SPTREMBL:A0A0F7SHA8 |
| CED83450 | Scaffold_52:2332008-2335986 | 2.12535 | 0.00107 | Uniprot/SPTREMBL:A0A0F7SSD2 |
| CDZ96255 | Scaffold_24:304621-312364 | 2.12075 | 0.00107 | Uniprot/SPTREMBL:A0A0F7SEK2 |
| CED84965 | Scaffold_249:100476-100977 | 2.12015 | 0.02687 | Uniprot/SPTREMBL:A0A0F7SWH8 |
| CED83977 | Scaffold_69:1344500-1346015 | 2.11941 | 0.03518 | Uniprot/SPTREMBL:A0A0F7SPB1 |
| CDZ96598 | Scaffold_54:674693-675994 | 2.11801 | 0.002 | Uniprot/SPTREMBL:A0A0F7SFW9 |
| CED85198 | Scaffold_249:838732-840721 | 2.11044 | 0.0431 | Uniprot/SPTREMBL:A0A0F7SY45 |
| CDZ98037 | Scaffold_189:240085-243335 | 2.1099 | 0.0367 | Uniprot/SPTREMBL:A0A0F7SM63 |
| CED84166 | Scaffold_69:1902914-1907183 | 2.10358 | 0.00107 | Uniprot/SPTREMBL:A0A0F7SRS9 |
| CDZ96253 | Scaffold_24:294036-295659 | 2.09696 | 0.00107 | Uniprot/SPTREMBL:A0A0F7SFH1 |
| CDZ96587 | Scaffold_54:635972-638782 | 2.07411 | 0.00283 | Uniprot/SPTREMBL:A0A0F7SHU1 |
| CDZ97406 | Scaffold_79:2190879-2192026 | 2.06531 | 0.01217 | Uniprot/SPTREMBL:A0A0F7SF75 |
| CED82118 | Scaffold_33:355172-355794 | 2.06453 | 0.00107 | Uniprot/SPTREMBL:A0A0F7SPR7 |
| CED84712 | Scaffold_78:1082888-1085081 | 2.04606 | 0.00107 | Uniprot/SPTREMBL:A0A0F7SR59 |
| CED83235 | Scaffold_52:1658608-1660253 | 2.03709 | 0.02837 | Uniprot/SPTREMBL:A0A0F7SRX7 |
| CDZ96808 | Scaffold_79:402194-403759 | 2.01274 | 0.00107 | Uniprot/SPTREMBL:A0A0F7SGF8 |
| CED84189 | Scaffold_69:1965278-1968656 | 2.00903 | 0.00107 | Uniprot/SPTREMBL:A0A0F7SU09 |
| CDZ96972 | Scaffold_79:892224-894290 | 2.00813 | 0.00107 | Uniprot/SPTREMBL:A0A0F7SJ16 |
| CDZ98157 | Scaffold_242:119690-120995 | 2.00799 | 0.01157 | Uniprot/SPTREMBL:A0A0F7SMG5 |
| CED85202 | Scaffold_249:856230-864330 | 2.00782 | 0.00107 | Uniprot/SPTREMBL:A0A0F7SSN3 |
| CDZ97710 | Scaffold_162:350139-350415 | 2.00424 | 0.00697 | Uniprot/SPTREMBL:A0A0F7SH77 |
| CED82504 | Scaffold_33:1607291-1608419 | 2.0026 | 0.00107 | Uniprot/SPTREMBL:A0A0F7SP52 |
| CDZ98740 | Scaffold_262:1258470-1261686 | 2.00231 | 0.00107 | Uniprot/SPTREMBL:A0A0F7SK26 |
| CDZ98359 | Scaffold_262:82976-84729 | 1.99765 | 0.01794 | Uniprot/SPTREMBL:A0A0F7SLU2 |
| CED84345 | Scaffold_69:2445860-2450055 | 1.99755 | 0.00107 | Uniprot/SPTREMBL:A0A0F7SV09 |
| CDZ96501 | Scaffold_54:372224-373353 | 1.99602 | 0.00635 | Uniprot/SPTREMBL:A0A0F7SEA7 |
| CED84559 | Scaffold_78:652640-653728 | 1.99303 | 0.00107 | Uniprot/SPTREMBL:A0A0F7SUY8 |
| CED82642 | Scaffold_33:2021875-2023953 | 1.98413 | 0.00107 | Uniprot/SPTREMBL:A0A0F7SKH3 |
| CED82491 | Scaffold_33:1571741-1572704 | 1.96965 | 0.00107 | Uniprot/SPTREMBL:A0A0F7SM44 |
| CDZ98294 | Scaffold_242:549453-552382 | 1.96744 | 0.01332 | Uniprot/SPTREMBL:A0A0F7SLM8 |
| CDZ96892 | Scaffold_79:643491-645980 | 1.96608 | 0.00107 | Uniprot/SPTREMBL:A0A0F7SIU6 |
| CED82781 | Scaffold_52:377187-379075 | 1.96467 | 0.03632 | Uniprot/SPTREMBL:A0A0F7SMZ9 |
| CED84469 | Scaffold_78:379871-381445 | 1.96299 | 0.0161 | Uniprot/SPTREMBL:A0A0F7SUT6 |
| CED83869 | Scaffold_69:1022462-1022876 | 1.9615 | 0.02177 | Uniprot/SPTREMBL:A0A0F7STC4 |
| CDZ98639 | Scaffold_262:942397-945182 | 1.96071 | 0.00697 | Uniprot/SPTREMBL:A0A0F7SMC3 |
| CED82294 | Scaffold_33:915824-923046 | 1.95891 | 0.00107 | Uniprot/SPTREMBL:A0A0F7SNM9 |
| CDZ98287 | Scaffold_242:526295-527209 | 1.95446 | 0.01694 | Uniprot/SPTREMBL:A0A0F7SMN1 |
| CDZ98041 | Scaffold_189:257441-258978 | 1.95439 | 0.00358 | Uniprot/SPTREMBL:A0A0F7SGM4 |
| CDZ96788 | Scaffold_79:341612-343354 | 1.95437 | 0.03157 | Uniprot/SPTREMBL:A0A0F7SGC5 |
| CDZ97716 | Scaffold_162:364590-367041 | 1.95203 | 0.00107 | Uniprot/SPTREMBL:A0A0F7SFU3 |
| CED83610 | Scaffold_69:242322-244080 | 1.92797 | 0.00107 | Uniprot/SPTREMBL:A0A0F7SST7 |
| CDZ96286 | Scaffold_24:397274-398963 | 1.92503 | 0.00107 | Uniprot/SPTREMBL:A0A0F7SE64 |
| CED84538 | Scaffold_78:578277-581045 | 1.90782 | 0.03932 | Uniprot/SPTREMBL:A0A0F7SWS5 |
| CED84356 | Scaffold_69:2490030-2490654 | 1.90252 | 0.00107 | Uniprot/SPTREMBL:A0A0F7SS99 |
| CED85504 | Scaffold_249:1810396-1812070 | 1.90035 | 0.00358 | Uniprot/SPTREMBL:A0A0F7SXP5 |
| CED82460 | Scaffold_33:1453523-1455238 | 1.89525 | 0.00107 | Uniprot/SPTREMBL:A0A0F7SPP5 |
| CED82775 | Scaffold_52:362164-364734 | 1.89452 | 0.00283 | Uniprot/SPTREMBL:A0A0F7SQD0 |
| CED83321 | Scaffold_52:1931031-1933041 | 1.88777 | 0.002 | Uniprot/SPTREMBL:A0A0F7SPI4 |
| CDZ96906 | Scaffold_79:681395-683346 | 1.88628 | 0.01694 | Uniprot/SPTREMBL:A0A0F7SEN4 |
| CED84096 | Scaffold_69:1707265-1708032 | 1.88125 | 0.0161 | Uniprot/SPTREMBL:A0A0F7SRN0 |
| CED85628 | Scaffold_249:2197535-2201856 | 1.8811 | 0.00107 | Uniprot/SPTREMBL:A0A0F7SZ68 |
| CED82156 | Scaffold_33:478691-480487 | 1.88089 | 0.0043 | Uniprot/SPTREMBL:A0A0F7SL33 |
| CDZ96504 | Scaffold_54:378291-378717 | 1.88061 | 0.00283 | Uniprot/SPTREMBL:A0A0F7SGP6 |
| CED85328 | Scaffold_249:1262299-1263857 | 1.87508 | 0.0043 | Uniprot/SPTREMBL:A0A0F7SYK9 |
| CED83818 | Scaffold_69:877698-879991 | 1.86052 | 0.00107 | Uniprot/SPTREMBL:A0A0F7SV21 |
| CDZ97194 | Scaffold_79:1560834-1562423 | 1.84772 | 0.0043 | Uniprot/SPTREMBL:A0A0F7SIN2 |
| CDZ98812 | Scaffold_262:1476547-1477648 | 1.84706 | 0.00697 | Uniprot/SPTREMBL:A0A0F7SP59 |
| CDZ97787 | Scaffold_162:549563-550935 | 1.83915 | 0.00107 | Uniprot/SPTREMBL:A0A0F7SLE1 |
| CDZ98454 | Scaffold_262:367663-368762 | 1.83557 | 0.04815 | Uniprot/SPTREMBL:A0A0F7SLZ5 |
| CED83570 | Scaffold_69:136793-137232 | 1.83385 | 0.00763 | Uniprot/SPTREMBL:A0A0F7SSP1 |
| CDZ98779 | Scaffold_262:1387128-1388066 | 1.83114 | 0.02143 | Uniprot/SPTREMBL:A0A0F7SMW1 |
| CED82892 | Scaffold_52:712686-713696 | 1.82093 | 0.002 | Uniprot/SPTREMBL:A0A0F7SLA9 |
| CDZ98620 | Scaffold_262:884277-885713 | 1.82088 | 0.00107 | Uniprot/SPTREMBL:A0A0F7SJJ9 |
| CED84456 | Scaffold_78:343882-347639 | 1.80468 | 0.00107 | Uniprot/SPTREMBL:A0A0F7SSL8 |
| CED85327 | Scaffold_249:1258917-1262061 | 1.79428 | 0.00107 | Uniprot/SPTREMBL:A0A0F7ST41 |
| CED83941 | Scaffold_69:1233633-1235992 | 1.7932 | 0.00107 | Uniprot/SPTREMBL:A0A0F7SRB6 |
| CED82524 | Scaffold_33:1668538-1669641 | 1.79313 | 0.04455 | Uniprot/SPTREMBL:A0A0F7SP69 |
| CED85282 | Scaffold_249:1112034-1112403 | 1.79149 | 0.00107 | Uniprot/SPTREMBL:A0A0F7SSW3 |
| CED84172 | Scaffold_69:1923729-1924227 | 1.7889 | 0.01101 | Uniprot/SPTREMBL:A0A0F7SPM4 |
| CDZ96439 | Scaffold_54:171347-173858 | 1.78847 | 0.00107 | Uniprot/SPTREMBL:A0A0F7SGI8 |
| CDZ96760 | Scaffold_79:261484-264763 | 1.78807 | 0.0043 | Uniprot/SPTREMBL:A0A0F7SF56 |
| CDZ97680 | Scaffold_162:241932-249389 | 1.78266 | 0.00107 | Uniprot/SPTREMBL:A0A0F7SH15 |
| CED83749 | Scaffold_69:647207-648008 | 1.7682 | 0.00763 | Uniprot/SPTREMBL:A0A0F7SSY3 |
| CED84996 | Scaffold_249:211362-212285 | 1.76735 | 0.01647 | Uniprot/SPTREMBL:A0A0F7SU50 |
| CDZ97494 | Scaffold_124:53255-54125 | 1.76701 | 0.01332 | Uniprot/SPTREMBL:A0A0F7SJH9 |
| CDZ98520 | Scaffold_262:561685-561949 | 1.76251 | 0.03739 | Uniprot/SPTREMBL:A0A0F7SJA9 |
| CED82328 | Scaffold_33:1021691-1022108 | 1.76246 | 0.00107 | Uniprot/SPTREMBL:A0A0F7SQL5 |
| CDZ97939 | Scaffold_162:1013551-1014587 | 1.75145 | 0.002 | Uniprot/SPTREMBL:A0A0F7SKJ1 |
| CDZ96930 | Scaffold_79:746360-747555 | 1.75114 | 0.00572 | Uniprot/SPTREMBL:A0A0F7SFC1 |
| CED82946 | Scaffold_52:860371-866416 | 1.74633 | 0.00283 | Uniprot/SPTREMBL:A0A0F7SNI9 |
| CED83711 | Scaffold_69:554013-556123 | 1.74598 | 0.00107 | Uniprot/SPTREMBL:A0A0F7SQJ8 |
| CED82123 | Scaffold_33:388987-389410 | 1.74366 | 0.01053 | Uniprot/SPTREMBL:A0A0F7SPS1 |
| CED82360 | Scaffold_33:1130243-1130913 | 1.73312 | 0.00107 | Uniprot/SPTREMBL:A0A0F7SPF3 |
| CDZ97779 | Scaffold_162:525829-527237 | 1.733 | 0.01694 | Uniprot/SPTREMBL:A0A0F7SK88 |
| CED85569 | Scaffold_249:2019949-2021723 | 1.72317 | 0.01945 | Uniprot/SPTREMBL:A0A0F7SXT8 |
| CED83436 | Scaffold_52:2300030-2305206 | 1.71845 | 0.0431 | Uniprot/SPTREMBL:A0A0F7SPX5 |
| CDZ98665 | Scaffold_262:1028338-1030601 | 1.71812 | 0.00358 | Uniprot/SPTREMBL:A0A0F7SJN5 |
| CED85020 | Scaffold_249:296664-298545 | 1.71623 | 0.01157 | Uniprot/SPTREMBL:A0A0F7SWL0 |
| CED84604 | Scaffold_78:779180-781208 | 1.71439 | 0.00107 | Uniprot/SPTREMBL:A0A0F7SV30 |
| CED82780 | Scaffold_52:376708-377149 | 1.70936 | 0.02871 | Uniprot/SPTREMBL:A0A0F7SQD4 |
| CDZ97281 | Scaffold_79:1836628-1840608 | 1.69661 | 0.00107 | Uniprot/SPTREMBL:A0A0F7SF24 |
| CED83439 | Scaffold_52:2309892-2311510 | 1.69193 | 0.02637 | Uniprot/SPTREMBL:A0A0F7SS19 |
| CED82079 | Scaffold_33:239200-241650 | 1.69016 | 0.002 | Uniprot/SPTREMBL:A0A0F7SN39 |
| CDZ98224 | Scaffold_242:327901-329763 | 1.68977 | 0.04003 | Uniprot/SPTREMBL:A0A0F7SLH2 |
| CED82722 | Scaffold_52:182117-184588 | 1.68822 | 0.00107 | Uniprot/SPTREMBL:A0A0F7SKP4 |
| CDZ97375 | Scaffold_79:2093793-2097753 | 1.68491 | 0.02103 | Uniprot/SPTREMBL:A0A0F7SG41 |
| CDZ97123 | Scaffold_79:1339460-1339748 | 1.67557 | 0.00879 | Uniprot/SPTREMBL:A0A0F7SH81 |
| CED84572 | Scaffold_78:691147-691673 | 1.6727 | 0.03932 | Uniprot/SPTREMBL:A0A0F7SQS5 |
| CDZ97512 | Scaffold_124:111983-114421 | 1.65771 | 0.00283 | Uniprot/SPTREMBL:A0A0F7SKN5 |
| CED85019 | Scaffold_249:294296-296444 | 1.65616 | 0.00283 | Uniprot/SPTREMBL:A0A0F7SW64 |
| CED82324 | Scaffold_33:1008644-1009307 | 1.65351 | 0.04494 | Uniprot/SPTREMBL:A0A0F7SNU0 |
| CED82508 | Scaffold_33:1616764-1620298 | 1.65261 | 0.02995 | Uniprot/SPTREMBL:A0A0F7SR17 |
| CDZ97693 | Scaffold_162:282885-284685 | 1.6427 | 0.04565 | Uniprot/SPTREMBL:A0A0F7SJ63 |
| CED82289 | Scaffold_33:901370-903029 | 1.64196 | 0.02177 | Uniprot/SPTREMBL:A0A0F7SNM3 |
| CED83145 | Scaffold_52:1426474-1427363 | 1.63568 | 0.00501 | Uniprot/SPTREMBL:A0A0F7SRK6 |
| CED85454 | Scaffold_249:1633248-1635799 | 1.63511 | 0.01053 | Uniprot/SPTREMBL:A0A0F7SXI7 |
| CED82385 | Scaffold_33:1213652-1214862 | 1.63026 | 0.00107 | Uniprot/SPTREMBL:A0A0F7SPH1 |
| CED85322 | Scaffold_249:1240882-1244102 | 1.62685 | 0.00107 | Uniprot/SPTREMBL:A0A0F7ST39 |
| CED84535 | Scaffold_78:571126-573958 | 1.62373 | 0.00107 | Uniprot/SPTREMBL:A0A0F7SVH0 |
| CED84214 | Scaffold_69:2039858-2041252 | 1.61855 | 0.00283 | Uniprot/SPTREMBL:A0A0F7SU34 |
| CDZ98683 | Scaffold_262:1084236-1085358 | 1.61606 | 0.03299 | Uniprot/SPTREMBL:A0A0F7SLR4 |
| CDZ96646 | Scaffold_77:37852-39974 | 1.61544 | 0.0412 | Uniprot/SPTREMBL:A0A0F7SED6 |
| CDZ97655 | Scaffold_162:169391-171313 | 1.61044 | 0.00107 | Uniprot/SPTREMBL:A0A0F7SGZ1 |
| CED82435 | Scaffold_33:1375657-1376321 | 1.60294 | 0.03362 | Uniprot/SPTREMBL:A0A0F7SPL1 |
| CDZ96353 | Scaffold_53:39630-41165 | 1.60113 | 0.01332 | Uniprot/SPTREMBL:A0A0F7SFK7 |
| CED85316 | Scaffold_249:1219985-1222284 | 1.5994 | 0.00107 | Uniprot/SPTREMBL:A0A0F7SUY1 |
| CED85551 | Scaffold_249:1966372-1966880 | 1.5983 | 0.02306 | Uniprot/SPTREMBL:A0A0F7SVH5 |
| CED82905 | Scaffold_52:739430-741872 | 1.5972 | 0.00283 | Uniprot/SPTREMBL:A0A0F7SQX4 |
| CED82119 | Scaffold_33:356446-357504 | 1.59584 | 0.02777 | Uniprot/SPTREMBL:A0A0F7SN74 |
| CDZ97090 | Scaffold_79:1242177-1243818 | 1.58623 | 0.00358 | Uniprot/SPTREMBL:A0A0F7SFM3 |
| CDZ98290 | Scaffold_242:536964-539211 | 1.58604 | 0.00107 | Uniprot/SPTREMBL:A0A0F7SIT5 |
| CDZ97832 | Scaffold_162:704190-706731 | 1.58336 | 0.02802 | Uniprot/SPTREMBL:A0A0F7SLG7 |
| CED85078 | Scaffold_249:452193-453817 | 1.58042 | 0.00572 | Uniprot/SPTREMBL:A0A0F7SXX7 |
| CDZ97342 | Scaffold_79:2008848-2011495 | 1.57743 | 0.00358 | Uniprot/SPTREMBL:A0A0F7SKA1 |
| CDZ98442 | Scaffold_262:332477-334363 | 1.57599 | 0.00107 | Uniprot/SPTREMBL:A0A0F7SMW0 |
| CDZ98586 | Scaffold_262:790738-792475 | 1.57232 | 0.036 | Uniprot/SPTREMBL:A0A0F7SHZ1 |
| CDZ96795 | Scaffold_79:367786-368691 | 1.57118 | 0.00107 | Uniprot/SPTREMBL:A0A0F7SF68 |
| CED84312 | Scaffold_69:2335968-2339524 | 1.56304 | 0.00107 | Uniprot/SPTREMBL:A0A0F7SQ38 |
| CED85566 | Scaffold_249:2010817-2014453 | 1.56205 | 0.00818 | Uniprot/SPTREMBL:A0A0F7SVJ0 |
| CDZ96533 | Scaffold_54:469308-470639 | 1.54987 | 0.00107 | Uniprot/SPTREMBL:A0A0F7SFT7 |
| CED83799 | Scaffold_69:806596-808829 | 1.54674 | 0.01555 | Uniprot/SPTREMBL:A0A0F7ST65 |
| CDZ97301 | Scaffold_79:1895673-1899713 | 1.54005 | 0.00107 | Uniprot/SPTREMBL:A0A0F7SF28 |
| CDZ98863 | Scaffold_262:1643499-1645000 | 1.53807 | 0.015 | Uniprot/SPTREMBL:A0A0F7SMR4 |
| CDZ97626 | Scaffold_162:72630-75282 | 1.53645 | 0.02871 | Uniprot/SPTREMBL:A0A0F7SFM5 |
| CED85634 | Scaffold_249:2227699-2228797 | 1.53581 | 0.00107 | Uniprot/SPTREMBL:A0A0F7SXX2 |
| CED85324 | Scaffold_249:1248991-1251887 | 1.53192 | 0.02802 | Uniprot/SPTREMBL:A0A0F7SXA4 |
| CED82417 | Scaffold_33:1319300-1322122 | 1.53133 | 0.04244 | Uniprot/SPTREMBL:A0A0F7SJZ6 |
| CDZ97678 | Scaffold_162:232784-241715 | 1.52463 | 0.0043 | Uniprot/SPTREMBL:A0A0F7SIX8 |
| CDZ96274 | Scaffold_24:357108-358373 | 1.51225 | 0.005005 | Uniprot/SPTREMBL:A0A0F7SG98 |
| CDZ98521 | Scaffold_262:562010-563865 | 1.50923 | 0.043893 | Uniprot/SPTREMBL:A0A0F7SHS8 |
| CDZ98400 | Scaffold_262:210340-212288 | 1.50678 | 0.021773 | Uniprot/SPTREMBL:A0A0F7SJ22 |
| CED83916 | Scaffold_69:1154024-1156799 | 1.50497 | 0.001074 | Uniprot/SPTREMBL:A0A0F7SR83 |
| CDZ96728 | Scaffold_79:169536-171538 | 1.50386 | 0.001074 | Uniprot/SPTREMBL:A0A0F7SG87 |
| CED84058 | Scaffold_69:1585666-1587120 | 1.50001 | 0.04038 | Uniprot/SPTREMBL:A0A0F7SVP8 |
| CDZ97260 | Scaffold_79:1781498-1784170 | 1.49942 | 0.001074 | Uniprot/SPTREMBL:A0A0F7SFY9 |
| CDZ98006 | Scaffold_189:153436-154789 | 1.49578 | 0.011005 | Uniprot/SPTREMBL:A0A0F7SGJ4 |
| CDZ97704 | Scaffold_162:327605-328202 | 1.49284 | 0.023995 | Uniprot/SPTREMBL:A0A0F7SK48 |
| CED85192 | Scaffold_249:819695-822477 | 1.47714 | 0.001074 | Uniprot/SPTREMBL:A0A0F7SSM3 |
| CED82260 | Scaffold_33:802880-804905 | 1.47606 | 0.001074 | Uniprot/SPTREMBL:A0A0F7SNS6 |
| CDZ96526 | Scaffold_54:453538-454510 | 1.47498 | 0.001074 | Uniprot/SPTREMBL:A0A0F7SEB2 |
| CED85479 | Scaffold_249:1739097-1739458 | 1.46899 | 0.036699 | Uniprot/SPTREMBL:A0A0F7SXK3 |
| CDZ97261 | Scaffold_79:1784392-1786248 | 1.46845 | 0.031209 | Uniprot/SPTREMBL:A0A0F7SF20 |
| CDZ98595 | Scaffold_262:816862-820045 | 1.46285 | 0.002826 | Uniprot/SPTREMBL:A0A0F7SJH7 |
| CDZ96765 | Scaffold_79:275148-276949 | 1.46086 | 0.005005 | Uniprot/SPTREMBL:A0A0F7SF58 |
| CED82370 | Scaffold_33:1159209-1160902 | 1.46051 | 0.003585 | Uniprot/SPTREMBL:A0A0F7SPF9 |
| CED84441 | Scaffold_78:281458-282484 | 1.45883 | 0.039325 | Uniprot/SPTREMBL:A0A0F7SSK4 |
| CED84821 | Scaffold_78:1400404-1402626 | 1.45723 | 0.001998 | Uniprot/SPTREMBL:A0A0F7STL5 |
| CED83992 | Scaffold_69:1384528-1390584 | 1.45703 | 0.003585 | Uniprot/SPTREMBL:A0A0F7SPB8 |
| CED85625 | Scaffold_249:2187157-2189464 | 1.45685 | 0.001074 | Uniprot/SPTREMBL:A0A0F7SYG0 |
| CED82584 | Scaffold_33:1862368-1865218 | 1.45497 | 0.004297 | Uniprot/SPTREMBL:A0A0F7SPF4 |
| CDZ98305 | Scaffold_242:592604-596344 | 1.45288 | 0.002826 | Uniprot/SPTREMBL:A0A0F7SIU5 |
| CDZ96872 | Scaffold_79:584983-586708 | 1.45215 | 0.001074 | Uniprot/SPTREMBL:A0A0F7SIT0 |
| CED85203 | Scaffold_249:864947-866126 | 1.44951 | 0.001074 | Uniprot/SPTREMBL:A0A0F7SY49 |
| CDZ96187 | Scaffold_24:77879-79734 | 1.44778 | 0.005005 | Uniprot/SPTREMBL:A0A0F7SGN5 |
| CED82635 | Scaffold_33:2007011-2008851 | 1.44289 | 0.039087 | Uniprot/SPTREMBL:A0A0F7SQ56 |
| CDZ97519 | Scaffold_124:131824-135131 | 1.43614 | 0.008176 | Uniprot/SPTREMBL:A0A0F7SJJ8 |
| CDZ98632 | Scaffold_262:919319-922346 | 1.43541 | 0.00697 | Uniprot/SPTREMBL:A0A0F7SNG6 |
| CED82723 | Scaffold_52:185738-187226 | 1.43248 | 0.039087 | Uniprot/SPTREMBL:A0A0F7SRM0 |
| CED83667 | Scaffold_69:419784-423977 | 1.4323 | 0.033335 | Uniprot/SPTREMBL:A0A0F7SNP5 |
| CED84931 | Scaffold_249:9545-10343 | 1.43044 | 0.001998 | Uniprot/SPTREMBL:A0A0F7STW7 |
| CDZ97346 | Scaffold_79:2017105-2018316 | 1.42427 | 0.001998 | Uniprot/SPTREMBL:A0A0F7SF46 |
| CED82879 | Scaffold_52:682296-684509 | 1.42222 | 0.023063 | Uniprot/SPTREMBL:A0A0F7SQF9 |
| CED85363 | Scaffold_249:1364200-1366036 | 1.41596 | 0.028707 | Uniprot/SPTREMBL:A0A0F7SYN0 |
| CED83093 | Scaffold_52:1272752-1277459 | 1.40238 | 0.012168 | Uniprot/SPTREMBL:A0A0F7SSQ8 |
| CDZ97515 | Scaffold_124:121733-122976 | 1.40111 | 0.008176 | Uniprot/SPTREMBL:A0A0F7SGL2 |
| CED85082 | Scaffold_249:459159-460208 | 1.39994 | 0.001998 | Uniprot/SPTREMBL:A0A0F7SS76 |
| CED82416 | Scaffold_33:1318149-1318509 | 1.39146 | 0.006352 | Uniprot/SPTREMBL:A0A0F7SLW8 |
| CDZ96555 | Scaffold_54:529030-531464 | 1.39109 | 0.001998 | Uniprot/SPTREMBL:A0A0F7SEX9 |
| CED83550 | Scaffold_69:64295-67968 | 1.38618 | 0.030842 | Uniprot/SPTREMBL:A0A0F7SSM5 |
| CED84396 | Scaffold_78:126951-127725 | 1.38546 | 0.038728 | Uniprot/SPTREMBL:A0A0F7SSE3 |
| CED85377 | Scaffold_249:1408739-1411342 | 1.38479 | 0.00946 | Uniprot/SPTREMBL:A0A0F7ST75 |
| CED83404 | Scaffold_52:2200688-2204341 | 1.38262 | 0.006352 | Uniprot/SPTREMBL:A0A0F7SRT1 |
| CDZ96537 | Scaffold_54:476312-485671 | 1.37497 | 0.002826 | Uniprot/SPTREMBL:A0A0F7SHN7 |
| CED84907 | Scaffold_78:1683401-1684137 | 1.37476 | 0.030421 | Uniprot/SPTREMBL:A0A0F7SRT5 |
| CDZ98870 | Scaffold_262:1660620-1662142 | 1.37382 | 0.003585 | Uniprot/SPTREMBL:A0A0F7SKR5 |
| CED83400 | Scaffold_52:2189553-2193378 | 1.37211 | 0.038544 | Uniprot/SPTREMBL:A0A0F7SS90 |
| CED84717 | Scaffold_78:1099608-1102777 | 1.36352 | 0.004297 | Uniprot/SPTREMBL:A0A0F7SR63 |
| CED83262 | Scaffold_52:1748245-1750055 | 1.36085 | 0.033623 | Uniprot/SPTREMBL:A0A0F7SMH1 |
| CED85636 | Scaffold_249:2230567-2237697 | 1.35621 | 0.008176 | Uniprot/SPTREMBL:A0A0F7SVP1 |
| CED83271 | Scaffold_52:1774600-1776501 | 1.35608 | 0.00946 | Uniprot/SPTREMBL:A0A0F7SP88 |
| CED84610 | Scaffold_78:800066-802271 | 1.35432 | 0.006352 | Uniprot/SPTREMBL:A0A0F7SVM2 |
| CDZ98422 | Scaffold_262:270958-273739 | 1.35393 | 0.002826 | Uniprot/SPTREMBL:A0A0F7SMV6 |
| CDZ96871 | Scaffold_79:578233-584688 | 1.34599 | 0.036323 | Uniprot/SPTREMBL:A0A0F7SEK9 |
| CDZ97741 | Scaffold_162:423647-425533 | 1.34525 | 0.021426 | Uniprot/SPTREMBL:A0A0F7SFV3 |
| CDZ98291 | Scaffold_242:539694-546572 | 1.33466 | 0.018414 | Uniprot/SPTREMBL:A0A0F7SHB6 |
| CDZ97728 | Scaffold_162:389377-390258 | 1.33175 | 0.04182 | Uniprot/SPTREMBL:A0A0F7SJA1 |
| CDZ98348 | Scaffold_262:54334-55821 | 1.33015 | 0.003585 | Uniprot/SPTREMBL:A0A0F7SL12 |
| CED84009 | Scaffold_69:1435898-1436204 | 1.3291 | 0.019451 | Uniprot/SPTREMBL:A0A0F7STM1 |
| CED85638 | Scaffold_249:2239413-2241638 | 1.32658 | 0.003585 | Uniprot/SPTREMBL:A0A0F7SZ74 |
| CED84849 | Scaffold_78:1487844-1488916 | 1.32316 | 0.044221 | Uniprot/SPTREMBL:A0A0F7SVU9 |
| CDZ98506 | Scaffold_262:521152-522007 | 1.32277 | 0.012761 | Uniprot/SPTREMBL:A0A0F7SHR7 |
| CED82117 | Scaffold_33:352832-354601 | 1.31747 | 0.00697 | Uniprot/SPTREMBL:A0A0F7SJ77 |
| CED83712 | Scaffold_69:556348-559225 | 1.31552 | 0.023063 | Uniprot/SPTREMBL:A0A0F7SNS0 |
| CDZ98726 | Scaffold_262:1216707-1218957 | 1.3071 | 0.004297 | Uniprot/SPTREMBL:A0A0F7SIG5 |
| CED84966 | Scaffold_249:102086-105924 | 1.30617 | 0.008794 | Uniprot/SPTREMBL:A0A0F7SU20 |
| CDZ98007 | Scaffold_189:155162-158020 | 1.3058 | 0.02103 | Uniprot/SPTREMBL:A0A0F7SM57 |
| CED83352 | Scaffold_52:2030450-2032970 | 1.30096 | 0.011005 | Uniprot/SPTREMBL:A0A0F7SMR0 |
| CED83142 | Scaffold_52:1419683-1420879 | 1.29835 | 0.010025 | Uniprot/SPTREMBL:A0A0F7SM39 |
| CED82188 | Scaffold_33:570189-571995 | 1.29177 | 0.008176 | Uniprot/SPTREMBL:A0A0F7SPX6 |
| CDZ96996 | Scaffold_79:956121-957904 | 1.28872 | 0.011005 | Uniprot/SPTREMBL:A0A0F7SER8 |
| CDZ96775 | Scaffold_79:305615-306953 | 1.28852 | 0.044221 | Uniprot/SPTREMBL:A0A0F7SF61 |
| CED82003 | Scaffold_33:6263-8990 | 1.28482 | 0.008176 | Uniprot/SPTREMBL:A0A0F7SPC8 |
| CDZ98578 | Scaffold_262:765711-771979 | 1.28359 | 0.038544 | Uniprot/SPTREMBL:A0A0F7SLK6 |
| CED85353 | Scaffold_249:1337251-1339959 | 1.27446 | 0.025536 | Uniprot/SPTREMBL:A0A0F7SYM4 |
| CDZ98588 | Scaffold_262:796167-798642 | 1.27123 | 0.013896 | Uniprot/SPTREMBL:A0A0F7SLL0 |
| CED83307 | Scaffold_52:1875282-1876355 | 1.27038 | 0.022195 | Uniprot/SPTREMBL:A0A0F7SMM7 |
| CED84032 | Scaffold_69:1512430-1513697 | 1.27023 | 0.021426 | Uniprot/SPTREMBL:A0A0F7SPE1 |
| CDZ98569 | Scaffold_262:739379-741142 | 1.26802 | 0.041478 | Uniprot/SPTREMBL:A0A0F7SM79 |
| CDZ98688 | Scaffold_262:1099242-1100302 | 1.26445 | 0.00697 | Uniprot/SPTREMBL:A0A0F7SLR9 |
| CED83715 | Scaffold_69:562869-565995 | 1.24624 | 0.008794 | Uniprot/SPTREMBL:A0A0F7ST29 |
| CED83820 | Scaffold_69:882993-885014 | 1.24418 | 0.024732 | Uniprot/SPTREMBL:A0A0F7STE7 |
| CED83549 | Scaffold_69:61984-62980 | 1.24031 | 0.042833 | Uniprot/SPTREMBL:A0A0F7SSE4 |
| CED84460 | Scaffold_78:355483-356767 | 1.23011 | 0.023063 | Uniprot/SPTREMBL:A0A0F7SV97 |
| CED85451 | Scaffold_249:1624921-1626657 | 1.22324 | 0.043104 | Uniprot/SPTREMBL:A0A0F7SV85 |
| CED82386 | Scaffold_33:1218622-1221995 | 1.22271 | 0.012761 | Uniprot/SPTREMBL:A0A0F7SLV1 |
| CED83043 | Scaffold_52:1135868-1137875 | 1.22052 | 0.010525 | Uniprot/SPTREMBL:A0A0F7SSK2 |
| CDZ98811 | Scaffold_262:1473304-1476092 | 1.21361 | 0.032587 | Uniprot/SPTREMBL:A0A0F7SIN6 |
| CDZ97506 | Scaffold_124:85143-88051 | 1.20656 | 0.02507 | Uniprot/SPTREMBL:A0A0F7SFD8 |
| CED83086 | Scaffold_52:1254770-1257364 | 1.19723 | 0.014998 | Uniprot/SPTREMBL:A0A0F7SNS9 |
| CED82788 | Scaffold_52:403939-404632 | 1.19422 | 0.037386 | Uniprot/SPTREMBL:A0A0F7SRW9 |
| CED84216 | Scaffold_69:2042437-2043750 | 1.19358 | 0.017391 | Uniprot/SPTREMBL:A0A0F7SRY7 |
| CDZ96433 | Scaffold_54:153007-155386 | 1.1934 | 0.032587 | Uniprot/SPTREMBL:A0A0F7SFP7 |
| CDZ98349 | Scaffold_262:56113-60622 | 1.19098 | 0.016475 | Uniprot/SPTREMBL:A0A0F7SLT6 |
| CED83191 | Scaffold_52:1553706-1554253 | 1.18772 | 0.004297 | Uniprot/SPTREMBL:A0A0F7SP16 |
| CDZ98482 | Scaffold_262:454249-456087 | 1.18613 | 0.028368 | Uniprot/SPTREMBL:A0A0F7SN03 |
| CDZ96583 | Scaffold_54:624919-626843 | 1.18481 | 0.034352 | Uniprot/SPTREMBL:A0A0F7SFW2 |
| CDZ97486 | Scaffold_124:25893-28134 | 1.18431 | 0.020508 | Uniprot/SPTREMBL:A0A0F7SFC9 |
| CED83905 | Scaffold_69:1122672-1126938 | 1.17901 | 0.015553 | Uniprot/SPTREMBL:A0A0F7STK9 |
| CED83752 | Scaffold_69:654878-656794 | 1.17072 | 0.031879 | Uniprot/SPTREMBL:A0A0F7SNU1 |
| CED83251 | Scaffold_52:1716422-1717459 | 1.16668 | 0.038728 | Uniprot/SPTREMBL:A0A0F7SP79 |
| CED83476 | Scaffold_52:2440519-2444040 | 1.16528 | 0.024732 | Uniprot/SPTREMBL:A0A0F7SPZ9 |
| CED83038 | Scaffold_52:1127125-1128716 | 1.16222 | 0.031209 | Uniprot/SPTREMBL:A0A0F7SSJ7 |
| CDZ96921 | Scaffold_79:720825-723066 | 1.15054 | 0.018414 | Uniprot/SPTREMBL:A0A0F7SEP0 |
| CED83405 | Scaffold_52:2204641-2206845 | 1.15036 | 0.014466 | Uniprot/SPTREMBL:A0A0F7SS92 |
| CED85577 | Scaffold_249:2034538-2035696 | 1.14395 | 0.022695 | Uniprot/SPTREMBL:A0A0F7STS4 |
| CED84341 | Scaffold_69:2427694-2431829 | 1.14249 | 0.016101 | Uniprot/SPTREMBL:A0A0F7SS93 |
| CED84378 | Scaffold_78:55256-58433 | 1.14156 | 0.025536 | Uniprot/SPTREMBL:A0A0F7SWD5 |
| CED83553 | Scaffold_69:75264-77681 | 1.14032 | 0.024732 | Uniprot/SPTREMBL:A0A0F7SU77 |
| CED82771 | Scaffold_52:350846-353099 | 1.13824 | 0.033623 | Uniprot/SPTREMBL:A0A0F7SMY7 |
| CDZ97021 | Scaffold_79:1038990-1040784 | 1.13037 | 0.017391 | Uniprot/SPTREMBL:A0A0F7SES3 |
| CED83259 | Scaffold_52:1738331-1743319 | 1.12885 | 0.038544 | Uniprot/SPTREMBL:A0A0F7SR95 |
| CED82412 | Scaffold_33:1307391-1309267 | 1.12475 | 0.016475 | Uniprot/SPTREMBL:A0A0F7SJZ3 |
| CDZ98341 | Scaffold_262:35667-38316 | 1.12283 | 0.028368 | Uniprot/SPTREMBL:A0A0F7SHG1 |
| CED85033 | Scaffold_249:337165-337887 | 1.12149 | 0.019982 | Uniprot/SPTREMBL:A0A0F7SXU0 |
| CED82616 | Scaffold_33:1954259-1956659 | 1.10658 | 0.039325 | Uniprot/SPTREMBL:A0A0F7SMG4 |
| CDZ97069 | Scaffold_79:1183297-1184786 | 1.09255 | 0.029947 | Uniprot/SPTREMBL:A0A0F7SIC3 |
| CED85496 | Scaffold_249:1787393-1789483 | 1.08855 | 0.020508 | Uniprot/SPTREMBL:A0A0F7SVC5 |
| CED83300 | Scaffold_52:1857521-1859414 | 1.08604 | 0.031209 | Uniprot/SPTREMBL:A0A0F7SS27 |
| CDZ98200 | Scaffold_242:250674-254711 | 1.08597 | 0.041478 | Uniprot/SPTREMBL:A0A0F7SIG2 |
| CED84746 | Scaffold_78:1198346-1201827 | 1.0804 | 0.029947 | Uniprot/SPTREMBL:A0A0F7STB9 |
| CED83284 | Scaffold_52:1809160-1812031 | 1.07834 | 0.04884 | Uniprot/SPTREMBL:A0A0F7SRE1 |
| CED84708 | Scaffold_78:1072521-1075060 | 1.07826 | 0.031879 | Uniprot/SPTREMBL:A0A0F7SX29 |
| CED83817 | Scaffold_69:875777-877630 | 1.07691 | 0.02507 | Uniprot/SPTREMBL:A0A0F7SP17 |
| CED83099 | Scaffold_52:1293775-1295496 | 1.06576 | 0.021773 | Uniprot/SPTREMBL:A0A0F7SQW6 |
| CDZ98336 | Scaffold_262:20250-23019 | 1.05966 | 0.037015 | Uniprot/SPTREMBL:A0A0F7SHF8 |
| CED82364 | Scaffold_33:1144383-1147171 | 1.04101 | 0.03518 | Uniprot/SPTREMBL:A0A0F7SNW1 |
| CDZ98117 | Scaffold_217:54-464 | 1.02549 | 0.038728 | Uniprot/SPTREMBL:A0A0F7SMD0 |
| CED83984 | Scaffold_69:1359841-1362644 | 1.01909 | 0.029947 | Uniprot/SPTREMBL:A0A0F7STJ7 |
| CED84925 | Scaffold_78:1735682-1737491 | 1.01862 | 0.038728 | Uniprot/SPTREMBL:A0A0F7SWF4 |
| CED82457 | Scaffold_33:1446468-1449248 | 1.01542 | 0.04182 | Uniprot/SPTREMBL:A0A0F7SK27 |
| CDZ96188 | Scaffold_24:80138-81245 | 1.00373 | 0.04884 | Uniprot/SPTREMBL:A0A0F7SFB4 |
| CED82454 | Scaffold_33:1436004-1437727 | 0.992268 | 0.042098 | Uniprot/SPTREMBL:A0A0F7SP07 |
| CED83808 | Scaffold_69:839010-841550 | −0.978993 | 0.047318 | Uniprot/SPTREMBL:A0A0F7SV12 |
| CED85102 | Scaffold_249:534858-536034 | −0.985732 | 0.041196 | Uniprot/SPTREMBL:A0A0F7SSD5 |
| CDZ97737 | Scaffold_162:414362-415273 | −1.0347 | 0.037015 | Uniprot/SPTREMBL:A0A0F7SLC3 |
| CED83020 | Scaffold_52:1066811-1069140 | −1.03586 | 0.038238 | Uniprot/SPTREMBL:A0A0F7SRA2 |
| CDZ97353 | Scaffold_79:2035798-2037908 | −1.04258 | 0.035564 | Uniprot/SPTREMBL:A0A0F7SI09 |
| CED83590 | Scaffold_69:189208-191677 | −1.04734 | 0.044547 | Uniprot/SPTREMBL:A0A0F7SSR7 |
| CDZ97748 | Scaffold_162:440988-444947 | −1.05847 | 0.046032 | Uniprot/SPTREMBL:A0A0F7SJC1 |
| CDZ98248 | Scaffold_242:405320-407366 | −1.06134 | 0.034795 | Uniprot/SPTREMBL:A0A0F7SKS7 |
| CED82777 | Scaffold_52:366477-369023 | −1.06214 | 0.024433 | Uniprot/SPTREMBL:A0A0F7SKV2 |
| CDZ98789 | Scaffold_262:1417586-1420425 | −1.06443 | 0.02507 | Uniprot/SPTREMBL:A0A0F7SMW9 |
| CED85557 | Scaffold_249:1982109-1984110 | −1.07089 | 0.042435 | Uniprot/SPTREMBL:A0A0F7STQ4 |
| CDZ98271 | Scaffold_242:482272-482866 | −1.09092 | 0.045325 | Uniprot/SPTREMBL:A0A0F7SHA1 |
| CDZ98662 | Scaffold_262:1019159-1020208 | −1.10081 | 0.023509 | Uniprot/SPTREMBL:A0A0F7SNI7 |
| CED82472 | Scaffold_33:1494855-1496930 | −1.10171 | 0.018414 | Uniprot/SPTREMBL:A0A0F7SK39 |
| CDZ97707 | Scaffold_162:338953-341097 | −1.10306 | 0.021773 | Uniprot/SPTREMBL:A0A0F7SL99 |
| CED85444 | Scaffold_249:1598059-1599446 | −1.10671 | 0.024433 | Uniprot/SPTREMBL:A0A0F7SXI2 |
| CDZ96809 | Scaffold_79:406623-408256 | −1.12039 | 0.024732 | Uniprot/SPTREMBL:A0A0F7SHL1 |
| CDZ96362 | Scaffold_53:66709-68840 | −1.12412 | 0.041478 | Uniprot/SPTREMBL:A0A0F7SH50 |
| CDZ97886 | Scaffold_162:851177-854338 | −1.12472 | 0.019451 | Uniprot/SPTREMBL:A0A0F7SG92 |
| CDZ97531 | Scaffold_124:175643-176259 | −1.1447 | 0.011566 | Uniprot/SPTREMBL:A0A0F7SFF4 |
| CDZ97630 | Scaffold_162:88839-89856 | −1.14847 | 0.014998 | Uniprot/SPTREMBL:A0A0F7SGX6 |
| CED85001 | Scaffold_249:223979-224984 | −1.15874 | 0.02507 | Uniprot/SPTREMBL:A0A0F7SU78 |
| CED84248 | Scaffold_69:2142836-2144757 | −1.1588 | 0.021426 | Uniprot/SPTREMBL:A0A0F7SW39 |
| CED84017 | Scaffold_69:1466803-1468329 | −1.16715 | 0.023509 | Uniprot/SPTREMBL:A0A0F7SPD2 |
| CED84592 | Scaffold_78:741601-743464 | −1.17198 | 0.017391 | Uniprot/SPTREMBL:A0A0F7SQU2 |
| CDZ96956 | Scaffold_79:851688-852078 | −1.17483 | 0.032587 | Uniprot/SPTREMBL:A0A0F7SEQ5 |
| CED85092 | Scaffold_249:492482-495573 | −1.17844 | 0.027321 | Uniprot/SPTREMBL:A0A0F7SSC5 |
| CED82255 | Scaffold_33:790676-791081 | −1.18841 | 0.012761 | Uniprot/SPTREMBL:A0A0F7SNS2 |
| CED82283 | Scaffold_33:873009-877325 | −1.19141 | 0.008176 | Uniprot/SPTREMBL:A0A0F7SQ69 |
| CED82196 | Scaffold_33:596179-597979 | −1.19696 | 0.017391 | Uniprot/SPTREMBL:A0A0F7SL59 |
| CED83534 | Scaffold_69:26238-28721 | −1.20197 | 0.014466 | Uniprot/SPTREMBL:A0A0F7SSC9 |
| CDZ97633 | Scaffold_162:95746-97373 | −1.20226 | 0.016937 | Uniprot/SPTREMBL:A0A0F7SIS9 |
| CED83828 | Scaffold_69:912691-913814 | −1.20493 | 0.010025 | Uniprot/SPTREMBL:A0A0F7SV71 |
| CED83695 | Scaffold_69:506810-508045 | −1.20596 | 0.011566 | Uniprot/SPTREMBL:A0A0F7ST13 |
| CED85542 | Scaffold_249:1928334-1933614 | −1.20846 | 0.010525 | Uniprot/SPTREMBL:A0A0F7STP1 |
| CED85129 | Scaffold_249:609328-612469 | −1.23685 | 0.00946 | Uniprot/SPTREMBL:A0A0F7SWG4 |
| CDZ98405 | Scaffold_262:223404-225048 | −1.24291 | 0.02962 | Uniprot/SPTREMBL:A0A0F7SJ27 |
| CED85490 | Scaffold_249:1765942-1769233 | −1.25343 | 0.00697 | Uniprot/SPTREMBL:A0A0F7SY73 |
| CED85278 | Scaffold_249:1098519-1099599 | −1.25754 | 0.011005 | Uniprot/SPTREMBL:A0A0F7SYD5 |
| CDZ98800 | Scaffold_262:1444973-1446444 | −1.26381 | 0.010525 | Uniprot/SPTREMBL:A0A0F7SKG7 |
| CED84979 | Scaffold_249:145173-147662 | −1.26975 | 0.014466 | Uniprot/SPTREMBL:A0A0F7SW36 |
| CED83389 | Scaffold_52:2151630-2154286 | −1.27251 | 0.010525 | Uniprot/SPTREMBL:A0A0F7SRR6 |
| CDZ97840 | Scaffold_162:727586-729218 | −1.27681 | 0.00697 | Uniprot/SPTREMBL:A0A0F7SHH7 |
| CED82710 | Scaffold_52:148247-149050 | −1.27962 | 0.022195 | Uniprot/SPTREMBL:A0A0F7SQ90 |
| CDZ97744 | Scaffold_162:432635-434201 | −1.288 | 0.021773 | Uniprot/SPTREMBL:A0A0F7SK71 |
| CED83517 | Scaffold_52:2551434-2553636 | −1.30585 | 0.010025 | Uniprot/SPTREMBL:A0A0F7SN81 |
| CED83472 | Scaffold_52:2424613-2428401 | −1.31501 | 0.002826 | Uniprot/SPTREMBL:A0A0F7SN42 |
| CDZ98888 | Scaffold_262:1716621-1719877 | −1.31542 | 0.010525 | Uniprot/SPTREMBL:A0A0F7SMT6 |
| CED84417 | Scaffold_78:190965-193843 | −1.31562 | 0.022695 | Uniprot/SPTREMBL:A0A0F7SQC2 |
| CED82856 | Scaffold_52:615050-617722 | −1.34542 | 0.008176 | Uniprot/SPTREMBL:A0A0F7SNB3 |
| CDZ98000 | Scaffold_189:132797-135164 | −1.35451 | 0.010025 | Uniprot/SPTREMBL:A0A0F7SHY2 |
| CED85117 | Scaffold_249:574535-575250 | −1.36204 | 0.021426 | Uniprot/SPTREMBL:A0A0F7SSF0 |
| CED85637 | Scaffold_249:2238001-2238611 | −1.36511 | 0.006352 | Uniprot/SPTREMBL:A0A0F7STX9 |
| CED83010 | Scaffold_52:1037960-1038639 | −1.36959 | 0.005005 | Uniprot/SPTREMBL:A0A0F7SR81 |
| CED84090 | Scaffold_69:1691100-1694027 | −1.3718 | 0.031879 | Uniprot/SPTREMBL:A0A0F7SU51 |
| CED84418 | Scaffold_78:194247-197639 | −1.37256 | 0.016937 | Uniprot/SPTREMBL:A0A0F7SWE3 |
| CDZ97839 | Scaffold_162:723435-726147 | −1.38193 | 0.019982 | Uniprot/SPTREMBL:A0A0F7SKA0 |
| CED85497 | Scaffold_249:1790049-1792770 | −1.38461 | 0.022195 | Uniprot/SPTREMBL:A0A0F7STK2 |
| CED84228 | Scaffold_69:2077031-2079020 | −1.38491 | 0.006352 | Uniprot/SPTREMBL:A0A0F7SW30 |
| CDZ98142 | Scaffold_242:72315-72984 | −1.39076 | 0.016475 | Uniprot/SPTREMBL:A0A0F7SMF1 |
| CED83841 | Scaffold_69:945530-947189 | −1.3942 | 0.003585 | Uniprot/SPTREMBL:A0A0F7SR18 |
| CED84830 | Scaffold_78:1431276-1433662 | −1.41737 | 0.001074 | Uniprot/SPTREMBL:A0A0F7SW68 |
| CDZ96750 | Scaffold_79:233801-235070 | −1.41946 | 0.005005 | Uniprot/SPTREMBL:A0A0F7SF52 |
| CDZ98868 | Scaffold_262:1656053-1656973 | −1.42059 | 0.001074 | Uniprot/SPTREMBL:A0A0F7SMR8 |
| CDZ97870 | Scaffold_162:808063-808921 | −1.42078 | 0.028707 | Uniprot/SPTREMBL:A0A0F7SHK3 |
| CED84081 | Scaffold_69:1660757-1661605 | −1.42877 | 0.010525 | Uniprot/SPTREMBL:A0A0F7SRM1 |
| CED84218 | Scaffold_69:2047542-2048755 | −1.43718 | 0.001074 | Uniprot/SPTREMBL:A0A0F7SW26 |
| CED84514 | Scaffold_78:515920-517461 | −1.44083 | 0.005005 | Uniprot/SPTREMBL:A0A0F7SUW1 |
| CED84940 | Scaffold_249:36361-39079 | −1.44153 | 0.006352 | Uniprot/SPTREMBL:A0A0F7SWG3 |
| CDZ96815 | Scaffold_79:422815-425938 | −1.44247 | 0.001074 | Uniprot/SPTREMBL:A0A0F7SF76 |
| CED82015 | Scaffold_33:46454-47993 | −1.44841 | 0.001074 | Uniprot/SPTREMBL:A0A0F7SN44 |
| CED84369 | Scaffold_78:29525-30507 | −1.45503 | 0.003585 | Uniprot/SPTREMBL:A0A0F7SUL5 |
| CED83696 | Scaffold_69:511061-511998 | −1.46363 | 0.011005 | Uniprot/SPTREMBL:A0A0F7SQJ0 |
| CED85556 | Scaffold_249:1975453-1981704 | −1.47673 | 0.016475 | Uniprot/SPTREMBL:A0A0F7SVI0 |
| CED82505 | Scaffold_33:1609241-1610829 | −1.48428 | 0.032989 | Uniprot/SPTREMBL:A0A0F7SPT3 |
| CED82697 | Scaffold_52:107314-110474 | −1.4861 | 0.001074 | Uniprot/SPTREMBL:A0A0F7SKM2 |
| CDZ96174 | Scaffold_24:45029-46448 | −1.48792 | 0.001998 | Uniprot/SPTREMBL:A0A0F7SFZ4 |
| CDZ97929 | Scaffold_162:985527-987486 | −1.49375 | 0.001074 | Uniprot/SPTREMBL:A0A0F7SKI7 |
| CED83303 | Scaffold_52:1864569-1867964 | −1.49629 | 0.001998 | Uniprot/SPTREMBL:A0A0F7STG3 |
| CDZ96727 | Scaffold_79:168408-169040 | −1.50767 | 0.035564 | Uniprot/SPTREMBL:A0A0F7SID4 |
| CDZ98383 | Scaffold_262:163269-165707 | −1.50983 | 0.001998 | Uniprot/SPTREMBL:A0A0F7SL66 |
| CDZ97208 | Scaffold_79:1602896-1603746 | −1.52051 | 0.028024 | Uniprot/SPTREMBL:A0A0F7SHL4 |
| CED84696 | Scaffold_78:1041262-1043489 | −1.52121 | 0.005005 | Uniprot/SPTREMBL:A0A0F7ST73 |
| CED85179 | Scaffold_249:768057-769128 | −1.528 | 0.005005 | Uniprot/SPTREMBL:A0A0F7SWN5 |
| CDZ97456 | Scaffold_79:2325450-2327139 | −1.53518 | 0.001998 | Uniprot/SPTREMBL:A0A0F7SFB7 |
| CED84729 | Scaffold_78:1142277-1143722 | −1.54842 | 0.02507 | Uniprot/SPTREMBL:A0A0F7SVE0 |
| CDZ97944 | Scaffold_162:1029594-1031564 | −1.55315 | 0.032288 | Uniprot/SPTREMBL:A0A0F7SKJ3 |
| CED82961 | Scaffold_52:899381-901807 | −1.55439 | 0.001998 | Uniprot/SPTREMBL:A0A0F7SNJ6 |
| CED85145 | Scaffold_249:663696-666391 | −1.56549 | 0.001074 | Uniprot/SPTREMBL:A0A0F7SWW3 |
| CDZ96993 | Scaffold_79:946175-946791 | −1.56735 | 0.010025 | Uniprot/SPTREMBL:A0A0F7SH00 |
| CDZ98218 | Scaffold_242:313958-314979 | −1.57462 | 0.039739 | Uniprot/SPTREMBL:A0A0F7SKP7 |
| CDZ97354 | Scaffold_79:2038247-2039550 | −1.57466 | 0.026366 | Uniprot/SPTREMBL:A0A0F7SJ53 |
| CED85074 | Scaffold_249:442737-444170 | −1.58124 | 0.001074 | Uniprot/SPTREMBL:A0A0F7SWB7 |
| CDZ97526 | Scaffold_124:162119-164466 | −1.5836 | 0.001074 | Uniprot/SPTREMBL:A0A0F7SFF1 |
| CDZ98135 | Scaffold_242:49823-52376 | −1.58729 | 0.001074 | Uniprot/SPTREMBL:A0A0F7SI82 |
| CED84431 | Scaffold_78:237377-238586 | −1.60776 | 0.001074 | Uniprot/SPTREMBL:A0A0F7SSJ4 |
| CED85313 | Scaffold_249:1208655-1213573 | −1.63218 | 0.004297 | Uniprot/SPTREMBL:A0A0F7SYJ8 |
| CED84836 | Scaffold_78:1448687-1449940 | −1.63345 | 0.023995 | Uniprot/SPTREMBL:A0A0F7STM7 |
| CED83274 | Scaffold_52:1784640-1786631 | −1.66122 | 0.022195 | Uniprot/SPTREMBL:A0A0F7SRA0 |
| CED85626 | Scaffold_249:2189998-2193215 | −1.6636 | 0.001074 | Uniprot/SPTREMBL:A0A0F7SVN2 |
| CDZ97245 | Scaffold_79:1727581-1730708 | −1.66565 | 0.015553 | Uniprot/SPTREMBL:A0A0F7SFX9 |
| CED85026 | Scaffold_249:319340-320235 | −1.6759 | 0.001074 | Uniprot/SPTREMBL:A0A0F7SU90 |
| CDZ97907 | Scaffold_162:926229-926777 | −1.68467 | 0.001074 | Uniprot/SPTREMBL:A0A0F7SLM2 |
| CED85146 | Scaffold_249:667273-668861 | −1.6897 | 0.001074 | Uniprot/SPTREMBL:A0A0F7SUH6 |
| CDZ96446 | Scaffold_54:193458-195288 | −1.69218 | 0.005005 | Uniprot/SPTREMBL:A0A0F7SE96 |
| CED85386 | Scaffold_249:1428350-1429974 | −1.69704 | 0.007631 | Uniprot/SPTREMBL:A0A0F7SV36 |
| CED83236 | Scaffold_52:1660428-1665437 | −1.70904 | 0.019451 | Uniprot/SPTREMBL:A0A0F7SP66 |
| CDZ97306 | Scaffold_79:1907876-1908952 | −1.71442 | 0.001074 | Uniprot/SPTREMBL:A0A0F7SF29 |
| CED83823 | Scaffold_69:895697-898455 | −1.71756 | 0.007631 | Uniprot/SPTREMBL:A0A0F7SV28 |
| CDZ97777 | Scaffold_162:521349-522266 | −1.7263 | 0.001074 | Uniprot/SPTREMBL:A0A0F7SLD7 |
| CED85594 | Scaffold_249:2084742-2086107 | −1.73902 | 0.001074 | Uniprot/SPTREMBL:A0A0F7SXV3 |
| CDZ97012 | Scaffold_79:1010624-1012290 | −1.74477 | 0.017391 | Uniprot/SPTREMBL:A0A0F7SJ45 |
| CED85303 | Scaffold_249:1175266-1177190 | −1.75298 | 0.030842 | Uniprot/SPTREMBL:A0A0F7SYJ0 |
| CDZ98236 | Scaffold_242:365011-366553 | −1.76023 | 0.001074 | Uniprot/SPTREMBL:A0A0F7SH75 |
| CDZ96540 | Scaffold_54:497380-497756 | −1.77148 | 0.001074 | Uniprot/SPTREMBL:A0A0F7SEX6 |
| CDZ96250 | Scaffold_24:287314-287702 | −1.78589 | 0.025999 | Uniprot/SPTREMBL:A0A0F7SEK1 |
| CED82279 | Scaffold_33:855341-858413 | −1.78693 | 0.001074 | Uniprot/SPTREMBL:A0A0F7SNL5 |
| CDZ96876 | Scaffold_79:595587-596170 | −1.79528 | 0.005005 | Uniprot/SPTREMBL:A0A0F7SEL1 |
| CED83529 | Scaffold_69:6140-10274 | −1.79593 | 0.013319 | Uniprot/SPTREMBL:A0A0F7SSA8 |
| CDZ98664 | Scaffold_262:1024362-1027941 | −1.79806 | 0.043499 | Uniprot/SPTREMBL:A0A0F7SMD3 |
| CED83336 | Scaffold_52:1970924-1973100 | −1.84478 | 0.001074 | Uniprot/SPTREMBL:A0A0F7SPJ6 |
| CDZ98496 | Scaffold_262:495689-498598 | −1.86631 | 0.001998 | Uniprot/SPTREMBL:A0A0F7SHQ9 |
| CED83987 | Scaffold_69:1368003-1369177 | −1.87504 | 0.001074 | Uniprot/SPTREMBL:A0A0F7SPB6 |
| CED82860 | Scaffold_52:629851-631596 | −1.8768 | 0.001074 | Uniprot/SPTREMBL:A0A0F7SQU0 |
| CED84129 | Scaffold_69:1804647-1807171 | −1.89497 | 0.001074 | Uniprot/SPTREMBL:A0A0F7STY0 |
| CDZ96983 | Scaffold_79:922379-925116 | −1.90977 | 0.004297 | Uniprot/SPTREMBL:A0A0F7SGZ2 |
| CED83784 | Scaffold_69:745510-748575 | −1.91551 | 0.001998 | Uniprot/SPTREMBL:A0A0F7ST12 |
| CED82708 | Scaffold_52:141033-144586 | −1.92185 | 0.001074 | Uniprot/SPTREMBL:A0A0F7SRK5 |
| CED84035 | Scaffold_69:1521641-1522601 | −1.947 | 0.026366 | Uniprot/SPTREMBL:A0A0F7STX6 |
| CED83223 | Scaffold_52:1629817-1630351 | −1.95328 | 0.001074 | Uniprot/SPTREMBL:A0A0F7ST26 |
| CED85344 | Scaffold_249:1300710-1302755 | −1.95401 | 0.001074 | Uniprot/SPTREMBL:A0A0F7SXB7 |
| CED83617 | Scaffold_69:267842-271966 | −1.96243 | 0.001074 | Uniprot/SPTREMBL:A0A0F7SNK8 |
| CDZ96955 | Scaffold_79:850815-851296 | −1.96811 | 0.011005 | Uniprot/SPTREMBL:A0A0F7SFD0 |
| CDZ96589 | Scaffold_54:643479-645853 | −1.98651 | 0.001074 | Uniprot/SPTREMBL:A0A0F7SGX4 |
| CDZ97148 | Scaffold_79:1418833-1420884 | −1.98756 | 0.012168 | Uniprot/SPTREMBL:A0A0F7SHA7 |
| CED83678 | Scaffold_69:454981-456676 | −2.00538 | 0.013896 | Uniprot/SPTREMBL:A0A0F7SUM1 |
| CDZ97063 | Scaffold_79:1160642-1161469 | −2.00563 | 0.001074 | Uniprot/SPTREMBL:A0A0F7SH47 |
| CED83232 | Scaffold_52:1650347-1652499 | −2.00736 | 0.019451 | Uniprot/SPTREMBL:A0A0F7SME3 |
| CED84569 | Scaffold_78:683193-684172 | −2.01311 | 0.038728 | Uniprot/SPTREMBL:A0A0F7SUZ6 |
| CED85593 | Scaffold_249:2082233-2084415 | −2.0274 | 0.001074 | Uniprot/SPTREMBL:A0A0F7SZ46 |
| CED82571 | Scaffold_33:1819188-1821941 | −2.03204 | 0.001074 | Uniprot/SPTREMBL:A0A0F7SMA6 |
| CED82024 | Scaffold_33:79365-79988 | −2.03815 | 0.001074 | Uniprot/SPTREMBL:A0A0F7SMX9 |
| CED84840 | Scaffold_78:1463247-1464601 | −2.04553 | 0.001074 | Uniprot/SPTREMBL:O60019 |
| CDZ97958 | Scaffold_185:2335-3721 | −2.05558 | 0.001074 | Uniprot/SPTREMBL:A0A0F7SJV4 |
| CDZ96695 | Scaffold_79:79818-82579 | −2.05792 | 0.001074 | Uniprot/SPTREMBL:A0A0F7SF31 |
| CED84039 | Scaffold_69:1530094-1533993 | −2.06613 | 0.001074 | Uniprot/SPTREMBL:A0A0F7STP4 |
| CED83377 | Scaffold_52:2117808-2120026 | −2.08523 | 0.001074 | Uniprot/SPTREMBL:A0A0F7SMT0 |
| CED82529 | Scaffold_33:1688676-1690831 | −2.1036 | 0.010525 | Uniprot/SPTREMBL:A0A0F7SP73 |
| CDZ97994 | Scaffold_189:112542-113046 | −2.11032 | 0.001074 | Uniprot/SPTREMBL:A0A0F7SKM4 |
| CED83890 | Scaffold_69:1080480-1082192 | −2.12819 | 0.001074 | Uniprot/SPTREMBL:A0A0F7STJ5 |
| CED82578 | Scaffold_33:1844646-1846846 | −2.14622 | 0.001074 | Uniprot/SPTREMBL:A0A0F7SR99 |
| CDZ98694 | Scaffold_262:1113499-1115533 | −2.17485 | 0.001074 | Uniprot/SPTREMBL:A0A0F7SMM3 |
| CED84398 | Scaffold_78:130805-133471 | −2.17595 | 0.001074 | Uniprot/SPTREMBL:A0A0F7SWD9 |
| CED85532 | Scaffold_249:1894027-1894929 | −2.22038 | 0.001074 | Uniprot/SPTREMBL:A0A0F7STN3 |
| CDZ96641 | Scaffold_77:26787-28432 | −2.23969 | 0.001074 | Uniprot/SPTREMBL:A0A0F7SED5 |
| CED85075 | Scaffold_249:444854-448105 | −2.24815 | 0.001074 | Uniprot/SPTREMBL:A0A0F7SWN2 |
| CDZ96176 | Scaffold_24:47894-49932 | −2.26781 | 0.037813 | Uniprot/SPTREMBL:A0A0F7SE42 |
| CDZ96699 | Scaffold_79:90772-94522 | −2.27624 | 0.001074 | Uniprot/SPTREMBL:A0A0F7SHB2 |
| CED82661 | Scaffold_33:2081366-2082099 | −2.29285 | 0.042098 | Uniprot/SPTREMBL:A0A0F7SMJ8 |
| CED85015 | Scaffold_249:277754-280328 | −2.2993 | 0.001074 | Uniprot/SPTREMBL:A0A0F7SWK9 |
| CDZ97249 | Scaffold_79:1746839-1748488 | −2.3182 | 0.001074 | Uniprot/SPTREMBL:A0A0F7SIX6 |
| CDZ96334 | Scaffold_47:23-661 | −2.32877 | 0.001074 | Uniprot/SPTREMBL:A0A0F7SGD2 |
| CED83532 | Scaffold_69:20326-23031 | −2.35024 | 0.001074 | Uniprot/SPTREMBL:A0A0F7SN95 |
| CED84492 | Scaffold_78:450665-451017 | −2.36775 | 0.001074 | Uniprot/SPTREMBL:A0A0F7SQK1 |
| CED85166 | Scaffold_249:719426-720769 | −2.37977 | 0.001074 | Uniprot/SPTREMBL:A0A0F7SUI9 |
| CED83489 | Scaffold_52:2474332-2475671 | −2.38064 | 0.001074 | Uniprot/SPTREMBL:A0A0F7SS48 |
| CDZ96278 | Scaffold_24:368207-369197 | −2.39138 | 0.002826 | Uniprot/SPTREMBL:A0A0F7SFI5 |
| CED84034 | Scaffold_69:1519055-1520738 | −2.4005 | 0.001074 | Uniprot/SPTREMBL:A0A0F7STP0 |
| CED84697 | Scaffold_78:1044388-1045081 | −2.40872 | 0.001998 | Uniprot/SPTREMBL:A0A0F7SR45 |
| CDZ97983 | Scaffold_189:81800-82783 | −2.41732 | 0.001074 | Uniprot/SPTREMBL:A0A0F7SJX3 |
| CDZ96933 | Scaffold_79:768574-769075 | −2.44241 | 0.001074 | Uniprot/SPTREMBL:A0A0F7SGQ8 |
| CDZ98807 | Scaffold_262:1460878-1462217 | −2.46814 | 0.001998 | Uniprot/SPTREMBL:A0A0F7SP56 |
| CED84065 | Scaffold_69:1612575-1613807 | −2.48264 | 0.001074 | Uniprot/SPTREMBL:A0A0F7SU21 |
| CDZ98091 | Scaffold_189:408922-411088 | −2.49712 | 0.001074 | Uniprot/SPTREMBL:A0A0F7SGR3 |
| CED85462 | Scaffold_249:1676632-1679003 | −2.50553 | 0.001074 | Uniprot/SPTREMBL:A0A0F7STH0 |
| CDZ97924 | Scaffold_162:971572-972091 | −2.53677 | 0.001074 | Uniprot/SPTREMBL:A0A0F7SKI4 |
| CDZ97392 | Scaffold_79:2152424-2153342 | −2.55979 | 0.001074 | Uniprot/SPTREMBL:A0A0F7SKD9 |
| CED84952 | Scaffold_249:70148-71328 | −2.57142 | 0.001074 | Uniprot/SPTREMBL:A0A0F7SRU8 |
| CED83368 | Scaffold_52:2087748-2092282 | −2.61347 | 0.001074 | Uniprot/SPTREMBL:A0A0F7STR3 |
| CED83646 | Scaffold_69:350868-353990 | −2.66544 | 0.001074 | Uniprot/SPTREMBL:A0A0F7SQG8 |
| CED85401 | Scaffold_249:1467760-1469049 | −2.69341 | 0.001074 | Uniprot/SPTREMBL:A0A0F7SV47 |
| CED82304 | Scaffold_33:956694-958264 | −2.71132 | 0.001074 | Uniprot/SPTREMBL:A0A0F7SNT3 |
| CDZ97780 | Scaffold_162:527493-528752 | −2.73943 | 0.001074 | Uniprot/SPTREMBL:A0A0F7SHC9 |
| CED82230 | Scaffold_33:706033-706327 | −2.74682 | 0.001074 | Uniprot/SPTREMBL:A0A0F7SNQ6 |
| CED84839 | Scaffold_78:1459933-1461957 | −2.76513 | 0.001074 | Uniprot/SPTREMBL:A0A0F7SVU5 |
| CDZ97703 | Scaffold_162:322608-324574 | −2.77756 | 0.002826 | Uniprot/SPTREMBL:A0A0F7SJ79 |
| CED84019 | Scaffold_69:1470201-1473044 | −2.78186 | 0.001074 | Uniprot/SPTREMBL:A0A0F7STM8 |
| CED85116 | Scaffold_249:571977-573388 | −2.84413 | 0.001074 | Uniprot/SPTREMBL:A0A0F7SUE0 |
| CDZ98221 | Scaffold_242:318841-320089 | −2.86547 | 0.001074 | Uniprot/SPTREMBL:A0A0F7SH67 |
| CDZ96418 | Scaffold_54:107801-108657 | −2.90528 | 0.001074 | Uniprot/SPTREMBL:A0A0F7SFN9 |
| CED82158 | Scaffold_33:482712-485332 | −2.96302 | 0.001074 | Uniprot/SPTREMBL:A0A0F7SPV3 |
| CED83626 | Scaffold_69:289862-292855 | −3.0158 | 0.001074 | Uniprot/SPTREMBL:A0A0F7SQF3 |
| CED82286 | Scaffold_33:885651-888286 | −3.13743 | 0.001074 | Uniprot/SPTREMBL:A0A0F7SLG8 |
| CED82646 | Scaffold_33:2036969-2038849 | −3.14718 | 0.001074 | Uniprot/SPTREMBL:A0A0F7SMJ2 |
| CED82645 | Scaffold_33:2031954-2035008 | −3.22499 | 0.001074 | Uniprot/SPTREMBL:A0A0F7SQ63 |
| CED82966 | Scaffold_52:916495-918046 | −3.27009 | 0.001074 | Uniprot/SPTREMBL:A0A0F7SNJ9 |
| CDZ98220 | Scaffold_242:316107-317206 | −3.33816 | 0.001074 | Uniprot/SPTREMBL:A0A0F7SII2 |
| CDZ97624 | Scaffold_162:66225-66878 | −3.36931 | 0.001074 | Uniprot/SPTREMBL:A0A0F7SJS3 |
| CED83962 | Scaffold_69:1288283-1292950 | −3.46187 | 0.003585 | Uniprot/SPTREMBL:A0A0F7SPA4 |
| CDZ96670 | Scaffold_77:106964-110092 | −3.50921 | 0.001074 | Uniprot/SPTREMBL:A0A0F7SF12 |
| CDZ96436 | Scaffold_54:160437-161831 | −3.66011 | 0.001074 | Uniprot/SPTREMBL:A0A0F7SE94 |
| CED85434 | Scaffold_249:1567428-1569423 | −3.74639 | 0.001074 | Uniprot/SPTREMBL:A0A0F7SXH6 |
| CDZ96388 | Scaffold_54:18689-18947 | −3.88549 | 0.001074 | Uniprot/SPTREMBL:A0A0F7SFM4 |
| CDZ96819 | Scaffold_79:433020-434119 | −4.1179 | 0.001074 | Uniprot/SPTREMBL:A0A0F7SHM0 |
| CDZ96258 | Scaffold_24:318573-319834 | −4.2954 | 0.001074 | Uniprot/SPTREMBL:A0A0F7SFH3 |
| CED83073 | Scaffold_52:1224482-1226236 | −4.39164 | 0.001074 | Uniprot/SPTREMBL:A0A0F7SSN1 |
| CDZ97363 | Scaffold_79:2059802-2060236 | −4.42159 | 0.014998 | Uniprot/SPTREMBL:A0A0F7SI17 |
| CDZ96973 | Scaffold_79:896164-897185 | −4.44277 | 0.001074 | Uniprot/SPTREMBL:A0A0F7SGV4 |
| CED84060 | Scaffold_69:1592326-1594451 | −4.5001 | 0.001074 | Uniprot/SPTREMBL:A0A0F7SU17 |
| CDZ98154 | Scaffold_242:109579-111004 | −4.58439 | 0.001074 | Uniprot/SPTREMBL:A0A0F7SL35 |
| CED82980 | Scaffold_52:954553-957016 | −4.59855 | 0.001074 | Uniprot/SPTREMBL:A0A0F7SR47 |
| CED85062 | Scaffold_249:401979-403145 | −4.85533 | 0.001074 | Uniprot/SPTREMBL:A0A0F7SS57 |

TABLE 17

| | Enzyme name | Gene ID | Log₂ change | q-value | Significant |
|---|---|---|---|---|---|
| T₁ | Glucose-6-phosphate 1-dehydrogenase | CED83429 | −0.42 | 0.6681 | no |
| T₂ | Phosphoglucomutase/phosphomannomutase | CDZ97253 | −0.74 | 0.2877 | no |
| T₃ | 6-phosphofructokinase | CDZ97071 | −1.04 | 0.2238 | no |
| T₄ | Glucose-6-phosphate isomerase | CED83630 | −1.43 | 0.1038 | no |
| T₅ | Fructose 1,6-bisphosphate aldolase | CDZ98367 | 0 | 0.9982 | no |
| T₆ | Phosphoglycerate mutase | CED83840 | −0.79 | 0.1508 | no |
| T₇ | Phosphoglycerate kinase | CDZ96270 | −0.96 | 0.3434 | no |
| T₈ | Glyceraldehyde-3-phosphate dehydrogenase | CED85376 | −0.5 | 0.8098 | no |
| T₉ | Enolase | CED83362 | −0.51 | 0.7568 | no |
| T₁₀ | Pyruvate kinase | CDZ98564 | −0.87 | 0.398 | no |
| T₁₁ | Pyruvate decarboxylase | CED83333 | −1.68 | 0.0746 | no |
| T₁₂ | Isocitrate lyase | CED85129 | −1.24 | 0.0095 | yes |
| T₁₃ | Citrate synthase | CED84246 | 0.71 | 0.2059 | no |
| T₁₄ | Aconitate hydratase | CED85427 | −0.18 | 0.8799 | no |
| T₁₅ | Ketoglutarate dehydrogenase | CED83799 | 1.55 | 0.0156 | yes |
| T₁₆ | Succinate dehydroganase | CDZ98193 | 2.8 | 0.0011 | yes |
| T₁₇ | Malate synthase | CED85130 | −0.14 | 0.8949 | no |
| T₁₈ | 6-phosphogluconate decarboxylating | CED82777 | −1.06 | 0.0244 | yes |
| T₁₉ | Gluconate kinase | CDZ97633 | −1.2 | 0.0169 | yes |
| T₂₀ | Geranylgeranyl pyrophosphate synthase | CED82684 | 0.86 | 0.4365 | no |
| T₂₁ | Phytoene dehydrogenase | CED83513 | 1.8 | 0.2754 | no |
| T₂₂ | Phytoene-beta carotene synthase | CED83449 | 1.52 | 0.087 | no |
| T₂₃ | Astaxanthin synthase | CED83940 | 2.23 | 0.0057 | yes |
| T₂₄ | Cytochrome P450 CYP3/CYP5/CYP6/CYP9 subfamilies | CED84998 | 4.05 | 0.0011 | yes |
| T₂₅ | Cytochrome P450 CYP4/CYP19/CYP26 subfamilies | CDZ98632 | 1.44 | 0.007 | yes |
| T₂₆ | Cytochrome P450 CYP2 subfamily | CED85015 | −2.3 | 0.0011 | yes |
| T₂₇ | Apocytochrome b | CED80059 | 5.32 | 0.0011 | yes |
| T₂₈ | Cytochrome b | CED80058 | 5.15 | 0.0011 | yes |
| T₂₉ | NADH: ubiquinone/plastoquinone oxidoreductase, chain 3 | CDZ96154 | 4.73 | 0.0043 | yes |
| T₃₀ | NADH: ubiquinone oxidoreductase, NDUFA9/39 kDa subunit | CED84925 | 1.02 | 0.0387 | yes |
| T₃₁ | Cytochrome c oxidase subunit 1 | CED80056 | 5.57 | 0.0011 | yes |
| T₃₂ | Cytochrome c oxidase subunit 2 | CDZ96152 | 5.3 | 0.0011 | yes |
| T₃₃ | Cytochrome c oxidase subunit 3 | CED80061 | 5.01 | 0.0011 | yes |
| T₃₄ | Cytochrome c oxidase assembly protein PET191 | CED84572 | 1.67 | 0.0393 | yes |
| T₃₅ | Putative cytochrome c oxidase, subunit COX19 | CED82283 | −1.19 | 0.0082 | yes |
| T₃₆ | ATP synthase subunit 6 | CDZ96150 | 5.25 | 0.0011 | yes |
| T₃₇ | ATP synthase subunit mitochondrial | CDZ96333 | 4.65 | 0.0011 | yes |
| T₃₈ | NADH dehydrogenase subunits 2, 5, and related proteins | CDZ96153 | 6.01 | 0.0011 | yes |
| T₃₉ | NADH dehydrogenase subunit 4 | CDZ96151 | 4.13 | 0.0011 | yes |
| T₄₀ | Aldo/keto reductase family proteins | CDZ97194 | 1.85 | 0.0043 | yes |
| T₄₁ | Aldo/keto reductase family proteins | CDZ97021 | 1.13 | 0.0174 | yes |
| T₄₂ | Hexose carrier protein | CED82529 | −2.1 | 0.0105 | yes |
| T₄₃ | Hexokinase | CED82858 | −1.3 | 0.1658 | no |
| T₄₄ | Ferredoxin/adrenodoxin reductase | CDZ98521 | 1.87 | 0.0438 | yes |
| T₄₅ | acyl-dehydrogenase | CED84717 | 1.36 | 0.0042 | yes |
| T₄₆ | hexose carrier protein | CED82529 | −2.1 | 0.0105 | yes |
| T₄₇ | Catalase 1 | CDZ96425 | 3.16 | 0.0057 | yes |
| T₄₈ | Catalase-like domain | CDZ98863 | 1.53 | 0.0149 | yes |
| T₄₉ | Glutathione S-transferase | CED84930 | 6.68 | 0.001 | yes |
| T₅₀ | Glutathione S-transferase | CDZ97957 | 5.4 | 0.001 | yes |
| T₅₁ | Predicted glutathione S-transferase | CED82196 | −1.19 | 0.0173 | yes |
| T₅₂ | Delta 9 fatty acid desaturase | CED83656 | −0.53 | 0.7699 | no |
| T₅₃ | Asparagine synthase | CED83843 | 2.35 | 0.0081 | yes |
| T₅₄ | Copper transporter | CED82663 | 2.36 | 0.001 | yes |
| T₅₅ | Conidiation-specific protein 6 | CDZ97534 | 3.17 | 0.001 | yes |

TABLE 18

| Protein | log2FC | adj. pvalue | Protein name |
|---|---|---|---|
| CDZ96711 | 3.272326443 | 0.00057316 | short-chain dehydrogenase |
| CED82658 | 2.557045495 | 0.01154058 | Deoxyribodipyrimidine photolyase/cryptochrome |
| CED84367 | 2.318616444 | 0.01799604 | Nuclear transport factor 2 |
| CED85066 | 2.239020548 | 0.03538521 | 60s ribosomal protein I32 |
| CED82723 | 2.140206091 | 0.01820556 | Armadillo/beta-catenin-like repeat-containing protein |
| CDZ96346 | 2.1328695 | 0.02431585 | 60s ribosomal protein I10a |
| CED83196 | 2.114885867 | 0.00057316 | Pyridoxamine 5′-phosphate oxidase-like, FMN-binding domain |
| CDZ97688 | 1.962719758 | 0.0472272 | glutaredoxin-related protein |
| CED82344 | 1.930631149 | 0.01505998 | Glycosyl transferase, family 8-glycogenin |
| CDZ96731 | 1.92915995 | 0.0156358 | mitochondrial carrier |
| CED85501 | 1.799809195 | 0.02428145 | nucleosome assembly protein |
| CED85055 | 1.731193901 | 0.03932151 | Sterile alpha motif, type 2 |
| CED84052 | 1.690858303 | 0.00057316 | snare protein ykt6 |
| CED82753 | 1.672583239 | 0.0472272 | udp-glucose dehydrogenase |
| CED82004 | 1.648999686 | 0.0188681 | Predicted translation factor, contains W2 domain |
| CED82942 | 1.626342108 | 0.0195415 | G protein beta subunit-like protein |
| CED82433 | 1.618966359 | 0.01109532 | heat shock protein hss1 |
| CED84880 | 1.610275821 | 0.03376189 | 40s ribosomal protein s7 |
| CED83740 | 1.589899371 | 0.00905229 | atp synthase f1 beta subunit |
| CED82360 | 1.561433152 | 0.01276031 | hypothetical protein |
| CDZ96425 | 1.552015184 | 0.01060517 | catalase 1 |
| CED84965 | 1.534893848 | 0.04391875 | Stress responsive alpha-beta barrel |
| CED83216 | 1.48274394 | 0.01649435 | Uncharacterized conserved protein |
| CED85079 | 1.452711928 | 0.03416979 | Cytokinin riboside 5′-monophosphate phosphoribohydrolase LOG |
| CDZ96256 | 1.400081003 | 0.01652963 | EF-hand domain pair |
| CED84618 | 1.363223801 | 0.01583624 | 20s proteasome subunit |
| CDZ96583 | 1.336737341 | 0.0020292 | ferrochelatase |
| CDZ98540 | 1.304088911 | 0.03416979 | glycine hydroxymethyltransferase |
| CDZ98291 | 1.299250675 | 0.03376189 | carboxypeptidase s |
| CED84995 | 1.27866734 | 0.0020292 | nadh-ubiquinone oxidoreductase 304 kda subunit precursor |
| CED83513 | 1.272006068 | 0.00427065 | phytoene dehydrogenase |
| CED82558 | 1.255848347 | 0.03519539 | Ribosomal protein L49/IMG2 |
| CED85248 | 1.21214568 | 0.03416979 | nop10p-domain-containing protein |
| CED84223 | 1.211570639 | 0.03297342 | Thioredoxin/protein disulfide isomerase |
| CDZ96398 | 1.210395736 | 0.01697913 | Predicted dehydrogenase |
| CED82081 | 1.124637661 | 0.03043844 | 6-phosphogluconate dehydrogenase |
| CDZ97938 | 1.090327535 | 0.01799604 | NADH-dehydrogenase (ubiquinone) |
| CDZ97188 | 1.041653101 | 0.02454864 | COPII vesicle protein |
| CED82583 | 0.972812085 | 0.04622283 | ornithine aminotransferase |
| CDZ97607 | 0.961343748 | 0.02264306 | er-associated protein catabolism-related protein |
| CDZ98576 | 0.956641899 | 0.04101412 | isocitrate dehydrogenase |
| CED83153 | 0.937690879 | 0.00164427 | aaa atpase |
| CED83708 | 0.919968342 | 0.02513695 | probable nadp( )-dependent dehydrogenase acting on 3-hydroxy acids |
| CED82933 | 0.915744964 | 0.00468473 | cndp dipeptidase |
| CED83441 | 0.899886386 | 0.01389815 | Actin-related protein Arp2/3 complex, subunit ARPC2 |
| CED84012 | 0.882703364 | 0.0396396 | branched-chain amino acid aminotransferase ii |
| CED85564 | 0.878847461 | 0.03403724 | Carbon-nitrogen hydrolase |
| CED84537 | 0.86940849 | 0.04899403 | aspartate aminotransferase |
| CED84732 | 0.819059765 | 0.01820556 | NADPH oxidase |
| CDZ96582 | 0.783460677 | 0.00757621 | 26s proteasome subunit p45 |
| CED84295 | 0.727101959 | 0.04595691 | pre-mrna-splicing factor rse1 |
| CDZ97585 | 0.702232279 | 0.04441472 | Porphobilinogen deaminase |
| CDZ97299 | 0.684300182 | 0.02856417 | prolyl oligopeptidase |
| CED83351 | 0.53279685 | 0.01820556 | abc transporter |
| CED83447 | −0.540843796 | 0.04054781 | 40s ribosomal protein s9 |
| CED82282 | −0.549026515 | 0.02203629 | polyadenylate-binding protein |
| CED83463 | −0.549306874 | 0.02914553 | atp-dependent rna helicase dhx8 |
| CDZ96620 | −0.550699218 | 0.00730273 | Fatty acid synthase complex subunit alpha |
| CED85357 | −0.552976694 | 0.03416979 | glycosyltransferase family 35 protein |
| CDZ98458 | −0.579289258 | 0.0396396 | hypothetical protein |
| CDZ97730 | −0.588026153 | 0.03442525 | WD repeat protein |
| CED83001 | −0.592611944 | 0.0185739 | heat shock protein 60 ame: full = 60 kda chaperonin |
| CED83868 | −0.625916454 | 0.03416979 | succinate dehydrogenase |
| CDZ97731 | −0.643476843 | 0.01109532 | Translocase of outer mitochondrial membrane complex, subunit TOM70/TOM72 |
| CDZ97556 | −0.643931077 | 0.02878294 | hypothetical protein |
| CDZ96847 | −0.645141048 | 0.01932677 | nucleic acid-binding protein |
| CDZ98246 | −0.651973989 | 0.03188712 | Nucleotide excision repair factor NEF2, RAD23 component |
| CED84183 | −0.685890266 | 0.0188681 | carbon-nitrogen hydrolase |
| CDZ97282 | −0.69152768 | 0.02513695 | t-complex protein alpha subunit (tcp-1-alpha) |
| CED82059 | −0.693303008 | 0.04460738 | fk506-binding protein 2 |
| CED85216 | −0.695853389 | 0.04250729 | Aromatic amino acid aminotransferase and related proteins |
| CDZ97115 | −0.702133604 | 0.00468473 | adenylate kinase |
| CDZ96380 | −0.730249947 | 0.0188681 | alpha-aminoadipate reductase lys1p |
| CED82220 | −0.730863676 | 0.02513695 | coatomer protein subunit alpha |
| CED82774 | −0.745400143 | 0.04391875 | 40s ribosomal protein s21 |
| CED83139 | −0.74609568 | 0.00828925 | carbamoyl-phosphate synth |
| CDZ98369 | −0.746457631 | 0.00730273 | Histone acetyltransferase SAGA, TRRAP/TRA1 component, PI-3 kinase superfamily |
| CED82652 | −0.758190818 | 0.04990868 | SAM-dependent RNA methyltransferase, predicted |
| CED83286 | −0.775731741 | 0.01093808 | related to 2-hydroxy-3-oxopropionate reductase |
| CED84878 | −0.779531222 | 0.03376189 | Transcriptional coactivator p100 |
| CDZ97020 | −0.781450259 | 0.02649992 | 60s ribosomal protein I13a |
| CDZ96477 | −0.785705988 | 0.01799604 | ornithine carbamoyltransferase |
| CDZ98039 | −0.788300037 | 0.01799604 | eukaryotic translation initiation factor 5b |
| CED85427 | −0.80342206 | 0.03519539 | aconitate hydratase |
| CED82232 | −0.807033917 | 0.02649992 | rrna 2-o-methyltransferase fibrillarin |
| CED84791 | −0.820220844 | 0.03029551 | t-complex protein beta subunit (tcp-1-beta) |
| CED84188 | −0.835143316 | 0.02856417 | voltage-dependent ion-selective channel |
| CDZ98718 | −0.835331242 | 0.0118088 | coatomer beta subunit |
| CED84980 | −0.840382794 | 0.00778145 | succinate-ligase (adp-forming) |
| CED83765 | −0.85429126 | 0.02649992 | carbamoyl-phosphate synthase |
| CDZ96447 | −0.854577872 | 0.03155268 | related to ste23-metalloprotease involved in a- factor processing |
| CED83665 | −0.85634675 | 0.02060729 | microtubule binding protein |
| CED82100 | −0.857908244 | 0.0396396 | Pyridoxalphosphate-dependent enzyme/predicted threonine synthase |
| CED83464 | −0.868102971 | 0.04122494 | fact complex subunit spt16 |
| CDZ96576 | −0.876356779 | 0.01688491 | sly1 vesicle trafficking sec1-like protein |
| CDZ97524 | −0.883112569 | 0.01168687 | cytoplasm protein |
| CED84444 | −0.893719592 | 0.00229207 | nadh dehydrogenase |
| CED85449 | −0.903173171 | 0.04250729 | 20s proteasome subunit |
| CDZ96270 | −0.918929334 | 0.0020292 | phosphoglycerate kinase |
| CED84681 | −0.929912636 | 0.03631055 | arm repeat-containing protein |
| CDZ97551 | −0.932426135 | 0.03282912 | Ribonuclease III domain |
| CED84960 | −0.938006938 | 0.02264306 | gtp binding protein 4 |
| CED82053 | −0.949623751 | 0.03376189 | peptidyl-prolyl cis-trans isomerase b |
| CDZ96524 | −0.9544128 | 0.01168687 | Translation initiation factor 4F, ribosome/mRNA- bridging subunit (elF-4G) |
| CED83897 | −0.974995763 | 0.02513695 | nucleosome assembly protein |
| CDZ96352 | −0.983332602 | 0.00831414 | eukaryotic polypeptide chain release factor 3 |
| CDZ98525 | −0.992343475 | 0.02215675 | asparagine synthase (glutamine-hydrolyzing) |
| CED84522 | −0.993837467 | 0.04128817 | Splicing factor U2AF, large subunit (RRM superfamily) |
| CED82181 | −1.005480158 | 0.00925982 | nadh-cytochrome b5 reductase |
| CED82591 | −1.029639978 | 0.03787191 | histidine biosynthesis trifunctional-protein |
| CED83723 | −1.037585374 | 0.04122494 | Enoyl-CoA hydratase |
| CDZ97012 | −1.043031541 | 0.01932677 | alcohol |
| CDZ96916 | −1.043355493 | 0.01932677 | imidazoleglycerol phosphate synthase |
| CED84114 | −1.043474748 | 0.03331544 | Thioredoxin-like fold |
| CDZ98026 | −1.044917324 | 0.02651527 | ef-hand |
| CED83652 | −1.05240471 | 0.00905229 | electron-transferring-flavoprotein dehydrogenase |
| CED82273 | −1.056067612 | 0.02914553 | mbf1-domain-containing protein |
| CED82044 | −1.067075615 | 0.02878294 | Transcription factor IIS, N-terminal |
| CED83685 | −1.067321455 | 0.00361302 | heat shock protein 70 |
| CED82614 | −1.073787138 | 0.0020292 | pyruvate carboxylase |
| CDZ96680 | −1.074598877 | 0.01276031 | homoaconitate hydratase |
| CED83939 | −1.078083583 | 0.03043844 | Uncharacterized conserved coiled-coil protein |
| CED83611 | −1.095807523 | 0.0238592 | Alternative splicing factor SRp55/B52/SRp75 (RRM superfamily) |
| CDZ98729 | −1.100728689 | 0.02432014 | eukaryotic translation initiation factor 3 subunit 7 |
| CED83034 | −1.100823166 | 0.00057316 | threonyl-trna synthetase |
| CDZ98402 | −1.103940436 | 0.02748415 | RmIC-like jelly roll fold |
| CED85540 | −1.128024094 | 0.00468473 | 60s ribosomal protein I20 |
| CED83021 | −1.148413349 | 0.04783144 | mRNA splicing factor |
| CDZ97267 | −1.149128196 | 0.00905229 | pre-mrna-processing protein 45 |
| CED82480 | −1.149348994 | 0.04702612 | atp-dependent rrna helicase rrp3 |
| CDZ96746 | −1.154878981 | 0.02549825 | dihydrolipoyllysine-residue acetyltransferase |
| CED83926 | −1.172857388 | 0.04339517 | Acyl-CoA synthetase |
| CDZ98315 | −1.177258586 | 0.02432014 | Ribosomal protein S5 |
| CDZ98765 | −1.177803882 | 0.01508991 | phenylalanyl-trna synthetase subunit beta |
| CED82811 | −1.179117557 | 0.00926928 | wd40 repeat-like protein |
| CDZ98852 | −1.183130469 | 0.01583624 | vacuolar atp synthase subunit d |
| CED83932 | −1.187051314 | 0.03441326 | Phosphatidylserine decarboxylase |
| CDZ98263 | −1.196465477 | 0.02645449 | Vigilin |
| CED84276 | −1.205793039 | 0.02212097 | RNA recognition motif domain |
| CED82490 | −1.21564933 | 0.01253292 | plasma membrane h( )-atpase 1 |
| CED83200 | −1.217961416 | 0.03376189 | RRM motif-containing protein |
| CDZ97483 | −1.218256982 | 0.01389815 | Predicted GTPase-activating protein |
| CED83084 | −1.225292534 | 0.0472272 | F1-ATP synthase assembly protein |
| CDZ97245 | −1.233180145 | 0.00905229 | acetyl-hydrolase |
| CDZ96943 | −1.240309934 | 0.01350904 | Peptidyl-prolyl cis-trans isomerase |
| CDZ97689 | −1.249838431 | 0.02649992 | antiviral helicase |
| CDZ98179 | −1.259964099 | 0.00361302 | Acetyl CoA carboxylase |
| CED84347 | −1.263008364 | 0.01393287 | agc pka protein kinase |
| CED83589 | −1.265861918 | 0.01218618 | ATP-dependent RNA helicase pitchoune |
| CED83658 | −1.266003386 | 0.04316808 | Microtubule-associated protein |
| CED82186 | −1.268044412 | 0.0308089 | Cell-cycle nuclear protein, contains WD-40 repeats |
| CED84113 | −1.27089372 | 0.03126627 | phosphoserine aminotransferase |
| CED84268 | −1.280229433 | 0.02549825 | Vacuolar protein sorting-associated protein |
| CED84243 | −1.280431294 | 0.0018404 | gmp synthase |
| CDZ96172 | −1.287548114 | 0.02941486 | translational regulator gcn20-like abc transporter |
| CED82356 | −1.288291751 | 0.04391875 | GDP-mannose pyrophosphorylase |
| CED84922 | −1.289443888 | 0.00874094 | Acetyl CoA acyltransferase 2 |
| CED84556 | −1.292812239 | 0.01932677 | phosphoketolase |
| CED84796 | −1.295776509 | 0.03376189 | Delta 12 fatty acid desaturase |
| CED83864 | −1.313283154 | 0.02649992 | vacuolar protein 8 |
| CED82178 | −1.320876871 | 0.0118088 | Predicted haloacid-halidohydrolase and related hydrolases |
| CDZ97101 | −1.32734763 | 0.02988308 | peptidyl-prolyl cis-trans isomerase |
| CDZ98445 | −1.335643909 | 0.03297342 | class iii adh enzyme |
| CDZ98528 | −1.335685233 | 0.00905229 | carbamoyl-phosphate synthase |
| CED83469 | −1.348907932 | 0.00905229 | t-complex protein 1 |
| CED85129 | −1.349857903 | 0.03671048 | isocitrate lyase |
| CED83250 | −1.359585261 | 0.02549825 | atpase |
| CED83852 | −1.380864038 | 0.04702612 | 6-phosphogluconolactonase |
| CDZ97571 | −1.389240555 | 0.04290904 | mitochondrial inner membrane protein |
| CED84645 | −1.395950599 | 0.02960533 | t-complex protein 1 subunit delta |
| CED84885 | −1.400831215 | 0.0310697 | adaptor protein complex ap-1 gamma subunit |
| CED84004 | −1.410145406 | 0.03448029 | arm repeat-containing protein |
| CDZ96721 | −1.413395703 | 0.02914553 | rRNA processing protein Rrp5 |
| CDZ97030 | −1.424528912 | 0.00099383 | succinate:fumarate antiporter |
| CED85589 | −1.425848646 | 0.02839911 | Predicted proline-serine-threonine phosphatase- interacting protein (PSTPIP) |
| CED82624 | −1.43305487 | 0.02513695 | phospho-2-dehydro-3-deoxyheptonate aldolase |
| CED84664 | −1.433337418 | 0.00831414 | rna-binding domain-containing protein |
| CED83236 | −1.435153651 | 0.00374945 | epsilon dna polymerase |
| CDZ96438 | −1.436256297 | 0.0182665 | Cullins |
| CED82493 | −1.438548522 | 0.03416979 | asparaginyl-trna synthetase |
| CED83361 | −1.441977148 | 0.00926928 | dihydroxy-acid dehydratase |
| CDZ97327 | −1.448812399 | 0.00828925 | hypothetical protein |
| CDZ96706 | −1.450203913 | 0.01001901 | SNARE protein SED5/Syntaxin 5 |
| CDZ96703 | −1.468072782 | 0.02645449 | centromere microtubule binding protein cbf5 |
| CDZ97922 | −1.483216564 | 0.01093808 | histidyl-trna synthetase |
| CDZ96493 | −1.521855592 | 0.01791703 | Endoplasmic reticulum protein EP58, contains filamin rod domain and KDEL motif |
| CED84450 | −1.533220692 | 0.01109532 | 3-isopropylmalate dehydrogenase |
| CED84039 | −1.537415237 | 0.04054781 | Glycosyl transferase, family 1 |
| CDZ97426 | −1.540107744 | 0.00468097 | eukaryotic translation initiation factor 3 subunit 6 |
| CED83785 | −1.543039464 | 0.04316808 | phosphoglycerate mutase family |
| CED84622 | −1.543931468 | 0.02549825 | chromatin remodelling complex atpase chain |
| CED85268 | −1.553723075 | 0.04128817 | carboxypeptidase s |
| CED84941 | −1.560007044 | 0.01060517 | Predicted hydrolases or acyltransferases (alpha/beta hydrolase superfamily) |
| CDZ96153 | −1.561131772 | 0.04339517 | NADH dehydrogenase subunits 2, 5, and related proteins |
| CDZ97901 | −1.567756257 | 0.03376189 | synaptobrevin-like protein |
| CED85483 | −1.575183227 | 0.00905229 | 40s ribosomal protein s6 |
| CDZ98650 | −1.581282177 | 0.02428145 | Ubiquitin C-terminal hydrolase UCHL1 |
| CED82653 | −1.587084692 | 0.02889048 | PolyC-binding proteins alphaCP-1 and related KH domain proteins |
| CED82987 | −1.587476435 | 0.02432014 | Nucleolar RNA-associated protein (NRAP) |
| CED82302 | −1.589117444 | 0.03376189 | WD40 repeat-containing protein |
| CED83333 | −1.590249823 | 0.0020292 | pyruvate decarboxylase |
| CED84972 | −1.5960981 | 0.01093808 | NADH-dehydrogenase (ubiquinone) |
| CDZ97229 | −1.596189229 | 0.04783144 | RhoGEF GTPase |
| CED82008 | −1.598536492 | 0.01016089 | Ca2-dependent lipid-binding protein CLB1/vesicle protein vp115/Granuphilin A, contains C2 domain |
| CED85558 | −1.602612866 | 0.03649973 | Molecular co-chaperone STI1 |
| CED84694 | −1.608371962 | 0.02031649 | Acyl-CoA synthetase |
| CED85482 | −1.609224816 | 0.02478907 | Vacuolar H-ATPase V1 sector, subunit E |
| CDZ97501 | −1.609942116 | 0.04201509 | p-loop containing nucleoside triphosphate hydrolase protein |
| CED82887 | −1.614733759 | 0.02490967 | Spliceosome subunit |
| CED82373 | −1.617336057 | 0.01331504 | Microtubule-binding protein involved in cell cycle control |
| CED85608 | −1.627956219 | 0.01688491 | Karyopherin (importin) beta 3 |
| CDZ96772 | −1.633635875 | 0.0215727 | dna-dependent rna polymerase ii second largest subunit |
| CED82875 | −1.636243466 | 0.02878294 | p-loop containing nucleoside triphosphate hydrolase protein |
| CDZ96709 | −1.643701581 | 0.01276031 | coatomer subunit gamma |
| CED82718 | −1.653749043 | 0.02914553 | Dehydrogenase kinase |
| CDZ98379 | −1.654855765 | 0.03376189 | mitochondrial pyruvate dehydrogenase e1 component beta subunit |
| CDZ98664 | −1.664987389 | 0.00828925 | glycoside hydrolase family 13 protein |
| CDZ97227 | −1.676730007 | 0.01799604 | nad-specific glutamate dehydrogenase |
| CED84865 | −1.693137102 | 0.02925005 | mitochondrial 50s ribosomal protein I3 |
| CDZ97357 | −1.69780688 | 0.01583624 | Ran GTPase-activating protein |
| CDZ97274 | −1.703158642 | 0.04128817 | fkbp-type peptidyl-prolyl cis-trans isomerase |
| CED85510 | −1.704437647 | 0.03376189 | hypothetical protein |
| CDZ98568 | −1.707428296 | 0.01799604 | 60s ribosomal protein I19 |
| CDZ97211 | −1.708555431 | 0.0195227 | Small Nuclear ribonucleoprotein splicing factor |
| CED84798 | −1.717516704 | 0.01276031 | Mannosyltransferase |
| CDZ98483 | −1.722444299 | 0.02914553 | dutp pyrophosphatase |
| CED82387 | −1.7250923 | 0.01109532 | GST, gst |
| CED84167 | −1.738514851 | 0.01583624 | glutamate-trna ligase |
| CDZ98702 | −1.740168961 | 0.01799604 | mov34-domain-containing protein |
| CED82610 | −1.741145108 | 0.01389815 | mitochondrial nuclease |
| CDZ97968 | −1.747047833 | 0.04735782 | 1,4-benzoquinone reductase-like |
| CED85256 | −1.763029564 | 0.03716115 | thiamine biosynthetic bifunctional enzyme |
| CED83533 | −1.763463174 | 0.02889048 | Protein of unknown function DUF3602 |
| CDZ96990 | −1.765718629 | 0.01508991 | upf0041-domain-containing protein |
| CED83331 | −1.766842575 | 0.01575712 | 60s ribosomal protein I11 |
| CED83746 | −1.777546216 | 0.03227504 | hypothetical protein |
| CDZ97319 | −1.785289098 | 0.02212097 | Serine/threonine protein phosphatase 2A, regulatory subunit |
| CDZ98624 | −1.788285059 | 0.03416979 | argininosuccinate lyase |
| CED85213 | −1.790475985 | 0.00905229 | elongation factor 1 beta delta chain |
| CED83192 | −1.803912495 | 0.02988308 | bar-domain-containing protein |
| CED84181 | −1.815242741 | 0.01154058 | uridylate kinase |
| CDZ96394 | −1.816977653 | 0.04455459 | phosphatidylethanolamine n-methyltransferase |
| CDZ98091 | −1.818027401 | 0.01389815 | stomatin family protein |
| CED83762 | −1.820314128 | 0.03448029 | ubiquitin-conjugating enzyme |
| CED85505 | −1.834634216 | 0.01109532 | glycosyltransferase family 2 protein |
| CED84800 | −1.838524109 | 0.04128817 | hypothetical protein |
| CED84682 | −1.839194002 | 0.03631055 | Uncharacterized conserved protein |
| CED83350 | −1.852972209 | 0.0163988 | signal recognition particle protein |
| CED85299 | −1.854408376 | 0.0110087 | B-cell receptor-associated protein and related proteins |
| CED82175 | −1.859771924 | 0.01109532 | RNA-binding S4 domain |
| CDZ97972 | −1.872513626 | 0.03376189 | Drebrins and related actin binding proteins |
| CED82401 | −1.880909466 | 0.03376189 | small gtpase-binding protein |
| CDZ98059 | −1.883204159 | 0.02914553 | gtp cyclohydrolase i |
| CED84722 | −1.892048206 | 0.02649992 | ps16 protein |
| CED85186 | −1.895077938 | 0.03376189 | eukaryotic translation initiation factor 3 subunit 6 |
| CED84608 | −1.909008315 | 0.00730273 | hypothetical protein |
| CDZ97780 | −1.93325344 | 0.01276031 | hypothetical protein |
| CDZ96174 | −1.939004053 | 0.04792978 | Predicted hydrolase related to dienelactone hydrolase |
| CED84225 | −1.953742748 | 0.02748415 | Nuclear localization sequence binding protein |
| CED83904 | −1.954139811 | 0.02914553 | swi snf complex protein |
| CDZ96983 | −1.969755024 | 0.01462763 | hypothetical protein |
| CED84490 | −1.981429905 | 0.01164179 | gtp-binding protein ypt1 |
| CDZ96924 | −1.982246388 | 0.0423797 | ATPase, F0 complex, subunit H |
| CED82203 | −1.986159712 | 0.02649992 | metal resistance protein ycf1 |
| CED83393 | −2.006367081 | 0.02513695 | Outer membrane protein, MIM1/TOM13, mitochondrial |
| CDZ96807 | −2.019757778 | 0.04399915 | ubiquitin-protein ligase molybdopterin-converting factor |
| CDZ97740 | −2.025807045 | 0.01799604 | gtp-binding protein |
| CDZ96605 | −2.027729754 | 0.00229207 | Predicted mitochondrial carrier protein |
| CDZ97834 | −2.031082152 | 0.0185739 | rna-binding domain-containing protein |
| CED82245 | −2.038685375 | 0.03019913 | 28 kda golgi snare protein |
| CED83853 | −2.040204572 | 0.0070558 | dead-domain-containing protein |
| CED84219 | −2.042496249 | 0.01505725 | -trehalose-phosphate synthase (udp-forming) |
| CDZ96300 | −2.058119 | 0.02914553 | ran protein binding protein |
| CED82557 | −2.061553008 | 0.02748415 | pkinase-domain-containing protein |
| CED83678 | −2.063129603 | 0.03376189 | hypothetical protein |
| CDZ97373 | −2.067413471 | 0.0118088 | Ribosome recycling factor domain |
| CED82649 | −2.069249285 | 0.01109532 | phosphatase |
| CED85233 | −2.082511905 | 0.03019913 | 20s proteasome subunit |
| CDZ96426 | −2.089091053 | 0.02549825 | Nucleic acid-binding, OB-fold |
| CED84077 | −2.089257714 | 0.03043844 | atp-dependent rna helicase dbp5 |
| CDZ97849 | −2.094972329 | 0.01408931 | mRNA export protein (contains WD40 repeats) |
| CDZ97098 | −2.104764907 | 0.02264306 | Protein phosphatase 2A regulatory subunit A and related proteins |
| CDZ96939 | −2.109542723 | 0.01649499 | glutaminyl-trna synthetase |
| CED85158 | −2.11839784 | 0.02914553 | Prolactin regulatory element-binding protein/Protein transport protein SEC12p |
| CDZ97144 | −2.124633505 | 0.01508991 | Ribosome Assembly protein |
| CED82147 | −2.141163817 | 0.02107155 | C4-type Zn-finger protein |
| CED82043 | −2.145468246 | 0.00521227 | Exosomal 3′-5′ exoribonuclease complex subunit Rrp40 |
| CED84757 | −2.14801929 | 0.02513695 | Transcription regulator HTH, APSES-type DNA-binding domain |
| CED82578 | −2.169428299 | 0.01222391 | hypothetical protein |
| CED84478 | −2.18760405 | 0.02800499 | RIB7, arfC |
| CED83083 | −2.18959859 | 0.04028758 | 60s ribosomal protein I12 |
| CDZ98457 | −2.202848188 | 0.02878294 | guanylate kinase |
| CED85582 | −2.214308627 | 0.02344303 | Predicted membrane protein |
| CED82465 | −2.237750259 | 0.04122494 | glycerol-3-phosphate o-acyltransferase |
| CED85428 | −2.244873713 | 0.02203629 | Cactin |
| CED82211 | −2.259799008 | 0.01218618 | translation initiation factor eif3 subunit |
| CDZ97947 | −2.280864979 | 0.02064593 | hypothetical protein |
| CDZ96867 | −2.283479884 | 0.04861292 | Biotin holocarboxylase synthetase/biotin-protein ligase |
| CDZ97011 | −2.299863258 | 0.00164427 | 60s ribosomal protein I23 |
| CDZ96733 | −2.311515815 | 0.04054781 | Inositol monophosphatase |
| CED84213 | −2.315052185 | 0.00816695 | ras-domain-containing protein |
| CED83529 | −2.316671565 | 0.00208188 | Maltase glucoamylase and related hydrolases, glycosyl hydrolase family 31 |
| CED82724 | −2.319660064 | 0.02026839 | Ribosomal protein S24/S35, mitochondrial, conserved domain |
| CED83468 | −2.36448386 | 0.04092267 | Peptide methionine sulfoxide reductase |
| CDZ96813 | −2.365957431 | 0.0188681 | hypothetical protein |
| CDZ97212 | −2.366141588 | 0.02365796 | mitochondrial carrier |
| CED83014 | −2.380596735 | 0.01583624 | nad-dependent formate dehydrogenase |
| CDZ98614 | −2.387150324 | 0.0238592 | Molecular chaperone (DnaJ superfamily) |
| CDZ97075 | −2.394628831 | 0.03019913 | hypothetical protein |
| CED82399 | −2.402453576 | 0.02264306 | hypothetical protein |
| CDZ98618 | −2.404051464 | 0.02649992 | Immunoglobulin-like fold |
| CED84473 | −2.413270708 | 0.00905229 | Translational repressor Pumilio/PUF3 and related RNA-binding proteins (Puf superfamily) |
| CED82408 | −2.41927523 | 0.0195415 | urease accessory protein |
| CED84497 | −2.49808343 | 0.02856417 | modular protein with glycoside hydrolase family 13 and glycosyltransferase family 5 domains |
| CDZ98509 | −2.522541548 | 0.04122494 | orotidine-5-phosphate decarboxylase |
| CED85305 | −2.529111979 | 0.03376189 | Phosphoprotein/predicted coiled-coil protein |
| CED83414 | −2.530683213 | 0.02889048 | nucleosome remodeling subunit caf1 nurf55 msi1 |
| CDZ97207 | −2.557565145 | 0.04227026 | Zinc finger, RING/FYVE/PHD-type |
| CED83149 | −2.582726156 | 0.02212097 | Prefoldin subunit 6, KE2 family |
| CED83584 | −2.597234359 | 0.0238592 | hypothetical protein |
| CDZ98446 | −2.624539223 | 0.04976639 | thioredoxin h |
| CED83860 | −2.651386968 | 0.03649973 | adf-like domain-containing protein |
| CDZ98236 | −2.710676815 | 0.00361302 | Alcohol dehydrogenase, class V |
| CED84022 | −2.725408421 | 0.0296611 | 60s ribosomal protein I13 |
| CDZ97924 | −2.727453323 | 0.03021911 | hypothetical protein |
| CED83962 | −2.754374803 | 0.02513695 | glycoside hydrolase family 3 protein |
| CED84144 | −2.826532427 | 0.02060729 | Uncharacterized conserved protein |
| CED82710 | −2.848141147 | 0.02649992 | hypothetical protein |
| spiRT_peptides | −2.91938355 | 0.02549825 | |
| CED83656 | −2.929874549 | 0.02889048 | Delta 9 fatty acid desaturase |
| CDZ97129 | −2.950421262 | 0.01445079 | Predicted regulator of rRNA gene transcription (MYB-binding protein) |
| CDZ96235 | −2.965311288 | 0.03160153 | Regulator of ribosome synthesis |
| CDZ98212 | −2.984446161 | 0.00164427 | WD40 repeat-containing protein |
| CDZ96176 | −3.011422884 | 0.02221332 | hexose transport-related protein |
| CED83954 | −3.013895262 | 0.01541525 | hypothetical protein |
| CED82845 | −3.017036891 | 0.01649499 | protein-histidine kinase |
| CED83160 | −3.02768041 | 0.02344303 | dna-directed rna polymerase ii subunit i |
| CED85402 | −3.073843435 | 0.01168687 | inositol-3-phosphate synthase |
| CDZ98485 | −3.089642931 | 0.03416979 | protein transport protein sec22 |
| CED82033 | −3.191081754 | 0.04783144 | hypothetical protein |
| CDZ98496 | −3.283958645 | 0.01943629 | hypothetical protein |
| CED82966 | −3.393186712 | 0.0188681 | Taurine catabolism dioxygenase TauD/TfdA |
| CED82706 | −4.028618494 | 0.04727779 | ATPase inhibitor, IATP, mitochondria |
| CED84836 | −4.452914746 | 0.01439857 | hypothetical protein |
| CDZ96436 | −4.833255417 | 0.00066477 | alcohol |

TABLE 19

| Protein | log2FC | adj. pvalue | Protein name |
|---|---|---|---|
| CED82765 | 4.231508 | 0.0223966 | Quinonprotein alcohol dehydrogenase-like superfamily |
| CDZ96711 | 3.818548 | 0.0001057 | short-chain dehydrogenase |
| CDZ96246 | 3.561085 | 0.1088072 | NADH-ubiquinone oxidoreductase, 21 kDa subunit, N- terminal |
| CDZ96507 | 3.488467 | 0.0608974 | RmlC-like jelly roll fold |
| CDZ98452 | 3.28816 | 0.0026732 | hypothetical protein |
| CED82658 | 3.161995 | 0.0056835 | Deoxyribodipyrimidine photolyase/cryptochrome |
| CDZ96283 | 3.050237 | 0.0858571 | hypothetical protein |
| CDZ97053 | 2.989734 | 0.0771834 | 40s ribosomal protein s15 |
| CED82874 | 2.544518 | 0.0751553 | gdp-I-fucose synthetase |
| CED85319 | 2.31452 | 0.0859067 | cysteine proteinase |
| CDZ96948 | 2.310015 | 0.1080156 | Protein phosphatase 1, regulatory subunit, and related proteins |
| CED83221 | 2.288329 | 0.0494045 | acn9-domain-containing protein |
| CED85064 | 2.19761 | 0.0871441 | actin depolymerizing factor |
| CDZ98400 | 2.176685 | 0.0222833 | proline iminopeptidase |
| CDZ97081 | 2.10351 | 0.0433728 | cyclophilin family peptidyl-prolyl cis-trans isomerase cyp2 |
| CED83979 | 2.095009 | 0.042078 | Flavonol reductase/cinnamoyl-CoA reductase |
| CDZ98539 | 2.094727 | 0.0462864 | SNARE protein Syntaxin 1 and related proteins |
| CED82343 | 2.043645 | 0.1001054 | serine threonine-protein phosphatase pp1 |
| CDZ98291 | 1.972938 | 0.0126954 | carboxypeptidase s |
| CED85501 | 1.949842 | 0.0293803 | nucleosome assembly protein |
| CDZ96399 | 1.929302 | 0.0342256 | Manganese/iron superoxide dismutase, C-terminal |
| CDZ98540 | 1.883129 | 0.0146614 | glycine hydroxymethyltransferase |
| CDZ96534 | 1.875855 | 0.0313407 | dihydroorotase |
| CDZ97688 | 1.871465 | 0.0962559 | glutaredoxin-related protein |
| CED84517 | 1.856004 | 0.0514783 | Protein required for normal rRNA processing |
| CDZ98438 | 1.840714 | 0.1080156 | hit family protein 1 |
| CDZ97677 | 1.834903 | 0.0147147 | Mitochondrial F1F0-ATP synthase, subunit OSCP/ATP5 |
| CED82582 | 1.820626 | 0.067386 | 20s proteasome subunit beta 3 |
| CED82590 | 1.788278 | 0.0137624 | Thioredoxin-like protein |
| CDZ97777 | 1.77895 | 0.1232547 | hypothetical protein |
| CED82380 | 1.776832 | 0.17568 | Predicted metal-binding protein |
| CDZ97534 | 1.701239 | 0.0190789 | Predicted dehydrogenase |
| CDZ98470 | 1.682504 | 0.1568805 | short-chain dehydrogenase |
| CED85564 | 1.678797 | 0.0044979 | Carbon-nitrogen hydrolase |
| CED82723 | 1.676945 | 0.067386 | Armadillo/beta-catenin-like repeat-containing protein |
| CED82970 | 1.676565 | 0.0233499 | 40s ribosomal protein s22 |
| CDZ97699 | 1.63503 | 0.1706431 | hypothetical protein |
| CDZ96647 | 1.60157 | 0.1214901 | TPMT family |
| CED84186 | 1.583796 | 0.0284367 | dna-directed rna polymerases and iii kda polypeptide |
| CED82344 | 1.533073 | 0.0512013 | Glycosyl transferase, family 8-glycogenin |
| CDZ96748 | 1.510136 | 0.1080156 | short-chain dehydrogenase |
| CDZ97010 | 1.506639 | 0.1232547 | Coproporphyrinogen III oxidase CPO/HEM13 |
| CDZ96544 | 1.475695 | 0.1378419 | 40s ribosomal protein s19 |
| CED83819 | 1.457086 | 0.17568 | adp-ribosylation factor |
| CED85610 | 1.456115 | 0.0460038 | Salt-sensitive 3′-phosphoadenosine-5′-phosphatase HAL2/SAL1 |
| CED83449 | 1.448604 | 0.0419656 | phytoene-beta carotene synthase |
| CED83814 | 1.431916 | 0.1150853 | acyl-oxidase |
| CED83513 | 1.427821 | 0.0026732 | phytoene dehydrogenase |
| CED84484 | 1.41827 | 0.1309145 | Peripheral-type benzodiazepine receptor and related proteins |
| CED85105 | 1.417928 | 0.0552523 | cytochrome-c oxidase chain vi precursor |
| CDZ97542 | 1.417535 | 0.0560071 | 60s acidic ribosomal protein p0 |
| CED84758 | 1.387994 | 0.0175187 | ubc-like protein |
| CED82388 | 1.380273 | 0.0126954 | Cytochrome b5 |
| CDZ97342 | 1.320494 | 0.1706431 | Voltage-gated shaker-like K channel, subunit beta/KCNAB |
| CED83339 | 1.297949 | 0.1706431 | Phox/Bem1p |
| CED83687 | 1.280689 | 0.0561539 | mitochondrial protein |
| CED83477 | 1.267639 | 0.1001054 | Uncharacterized mRNA-associated protein RAP55 |
| CED82722 | 1.25782 | 0.0126954 | aspartyl aminopeptidase |
| CED85079 | 1.246104 | 0.0982665 | Cytokinin riboside 5′-monophosphate phosphoribohydrolase LOG |
| CDZ97430 | 1.235358 | 0.1175347 | phosphomevalonate kinase |
| CDZ97936 | 1.205686 | 0.1704925 | Histone deacetylase complex, SIN3 component |
| CDZ98639 | 1.203896 | 0.0503176 | Aromatic amino acid aminotransferase and related proteins |
| CED82942 | 1.194279 | 0.0876816 | G protein beta subunit-like protein |
| CED83940 | 1.151573 | 0.1305788 | astaxanthin synthase |
| CDZ96405 | 1.130725 | 0.1271256 | phospho protein phosphatase ppz |
| CED85454 | 1.126577 | 0.1740412 | Putative metallopeptidase |
| CED82502 | 1.126374 | 0.033781 | nascent polypeptide-associated complex subunit beta |
| CDZ96583 | 1.116411 | 0.0050139 | ferrochelatase |
| CDZ96773 | 1.090504 | 0.0297939 | Translocase of outer mitochondrial membrane complex, subunit TOM20 |
| CDZ96425 | 1.0814 | 0.0514783 | catalase 1 |
| CED83372 | 1.071293 | 0.106338 | ATPase, F0 complex, subunit J |
| CED85327 | 1.026518 | 0.0982665 | carboxypeptidase s |
| CDZ97990 | 1.014943 | 0.0763925 | cwf21-domain-containing protein |
| CED84048 | 1.014714 | 0.1715042 | dsRNA-activated protein kinase inhibitor P58, contains TPR and DnaJ domains |
| CDZ96728 | 0.981699 | 0.0962559 | Voltage-gated shaker-like K channel, subunit beta/KCNAB |
| CDZ97775 | 0.956662 | 0.147114 | serine carboxypeptidase |
| CDZ96256 | 0.936691 | 0.0962559 | EF-hand domain pair |
| CED82360 | 0.933276 | 0.1042988 | hypothetical protein |
| CDZ98787 | 0.909721 | 0.1042988 | Predicted transporter (major facilitator superfamily) |
| CED84688 | 0.906571 | 0.1378419 | Aldo/keto reductase family proteins |
| CED83668 | 0.886642 | 0.0994446 | 26S proteasome regulatory complex, subunit RPN12/PSMD8 |
| CDZ98576 | 0.88097 | 0.0947646 | isocitrate dehydrogenase |
| CED84981 | 0.870208 | 0.1309145 | Iron/ascorbate family oxidoreductases |
| CED82222 | 0.859981 | 0.026263 | udp-glucose 4-epimerase |
| CED83351 | 0.848954 | 0.0037331 | abc transporter |
| CED83536 | 0.799797 | 0.0152746 | N-terminal acetyltransferase |
| CED85376 | 0.797626 | 0.0376685 | glyceraldehyde-3-phosphate dehydrogenase |
| CED83362 | 0.79424 | 0.1348598 | enolase |
| CDZ97741 | 0.772249 | 0.0126954 | prtase-like protein |
| CDZ98574 | 0.770517 | 0.1709508 | Protein of unknown function DUF4336 |
| CDZ96706 | 0.754757 | 0.1158743 | SNARE protein SED5/Syntaxin 5 |
| CDZ97607 | 0.735133 | 0.0876816 | er-associated protein catabolism-related protein |
| CED85341 | 0.732743 | 0.1007998 | Armadillo-type fold |
| CED84995 | 0.728884 | 0.0270372 | nadh-ubiquinone oxidoreductase 304 kda subunit precursor |
| CED82933 | 0.727752 | 0.0137624 | cndp dipeptidase |
| CED83153 | 0.722774 | 0.0050139 | aaa atpase |
| CDZ98090 | 0.718506 | 0.1709508 | adenylosuccinate lyase |
| CED83950 | 0.717521 | 0.1437425 | Beta-tubulin folding cofactor A |
| CDZ96168 | 0.702449 | 0.0486467 | 26s proteasome subunit p45 |
| CDZ96582 | 0.698475 | 0.0126954 | 26s proteasome subunit p45 |
| CED82968 | 0.695251 | 0.0886062 | Protein of unknown function DUF4449 |
| CED82394 | 0.677589 | 0.1229557 | protein transporter sec23 |
| CDZ96849 | 0.673448 | 0.0126954 | udp-glucuronic acid decarboxylase uxs1p |
| CDZ97626 | 0.588913 | 0.1740412 | FOG: RCC1 domain |
| CDZ98437 | 0.553298 | 0.1295739 | 26s proteasome regulatory atpase rpt6 |
| CED85458 | 0.552718 | 0.147114 | methylenetetrahydrofolate dehydrogenase (nad) |
| CED85255 | 0.518057 | 0.1605827 | serine threonine-protein kinase |
| CDZ97299 | 0.50117 | 0.1214901 | prolyl oligopeptidase |
| CDZ98246 | 0.498631 | 0.1224769 | Nucleotide excision repair factor NEF2, RAD23 component |
| CED85160 | 0.482933 | 0.0920586 | prolyl-trna synthetase |
| CDZ97055 | 0.461666 | 0.1715042 | Predicted hydrolase related to dienelactone hydrolase |
| CED84052 | 0.426502 | 0.1295739 | snare protein ykt6 |
| CED83796 | 0.420471 | 0.0763925 | clathrin heavy chain |
| CDZ96488 | 0.315547 | 0.0876816 | sulfite reductase subunit beta |
| CDZ97115 | −0.28538 | 0.1309145 | adenylate kinase |
| CED84486 | −0.28928 | 0.067386 | Protein disulfide isomerase (prolyl 4-hydroxylase beta subunit) |
| CDZ96784 | −0.31858 | 0.1740412 | nop domain-containing protein |
| CED82089 | −0.32425 | 0.1740412 | fthfs-domain-containing protein |
| CED85467 | −0.32433 | 0.1194556 | pre-mrna-processing-splicing factor |
| CDZ98125 | −0.38528 | 0.1295739 | alanine-trna ligase |
| CDZ97113 | −0.40583 | 0.0039799 | elongation factor 3 |
| CDZ96742 | −0.44015 | 0.1362808 | ck1 ck1 ck1-d protein kinase |
| CDZ97730 | −0.44278 | 0.1363624 | WD repeat protein |
| CED84752 | −0.45235 | 0.147114 | acetylglutamate kinase arg6 |
| CED83281 | −0.4789 | 0.0993953 | succinate-semialdehyde dehydrogenase |
| CED83652 | −0.4896 | 0.1437425 | electron-transferring-flavoprotein dehydrogenase |
| CED83072 | −0.49434 | 0.1232547 | probable eukaryotic translation initiation factor eif-3 |
| CED83685 | −0.50318 | 0.0771834 | heat shock protein 70 |
| CED82409 | −0.50357 | 0.1214901 | Nuclear pore complex component (sc Seh1) |
| CED83447 | −0.50974 | 0.0871441 | 40s ribosomal protein s9 |
| CED85459 | −0.51688 | 0.1305788 | mrna export factor elf1 |
| CED84188 | −0.51802 | 0.1780931 | voltage-dependent ion-selective channel |
| CDZ96380 | −0.53846 | 0.0840022 | alpha-aminoadipate reductase lys1p |
| CDZ98458 | −0.55225 | 0.0833734 | hypothetical protein |
| CDZ97062 | −0.55468 | 0.0486384 | heat shock protein |
| CED85365 | −0.56215 | 0.1221611 | dna-directed rna polymerases i and iii 40 kda polypeptide |
| CDZ98494 | −0.56276 | 0.0678771 | eukaryotic translation initiation factor 3 subunit 8 |
| CDZ98088 | −0.57308 | 0.0771834 | p-loop containing nucleoside triphosphate hydrolase protein |
| CED84980 | −0.58057 | 0.0366021 | succinate-ligase (adp-forming) |
| CED83665 | −0.58523 | 0.1082151 | microtubule binding protein |
| CDZ98525 | −0.58767 | 0.1671066 | asparagine synthase (glutamine-hydrolyzing) |
| CED82622 | −0.59254 | 0.0561539 | aspartate aminotransferase |
| CDZ97426 | −0.59941 | 0.1442533 | eukaryotic translation initiation factor 3 subunit 6 |
| CED83056 | −0.6003 | 0.0453207 | nadh-ubiquinone oxidoreductase |
| CED82811 | −0.60717 | 0.1150853 | wd40 repeat-like protein |
| CED85357 | −0.61544 | 0.0453661 | glycosyltransferase family 35 protein |
| CED82178 | −0.61759 | 0.175572 | Predicted haloacid-halidohydrolase and related hydrolases |
| CED82614 | −0.61903 | 0.0270372 | pyruvate carboxylase |
| CDZ97815 | −0.62037 | 0.1214901 | arginyl-trna synthetase |
| CED83286 | −0.62139 | 0.0336204 | related to 2-hydroxy-3-oxopropionate reductase |
| CDZ97020 | −0.62766 | 0.0898908 | 60s ribosomal protein I13a |
| CDZ97800 | −0.6307 | 0.0876816 | Uncharacterized protein CLU1/cluA |
| CED82608 | −0.63681 | 0.1621596 | 20s proteasome subunit |
| CED84183 | −0.63746 | 0.0404174 | carbon-nitrogen hydrolase |
| CED83611 | −0.6446 | 0.1739511 | Alternative splicing factor SRp55/B52/SRp75 (RRM superfamily) |
| CDZ98039 | −0.64953 | 0.0560934 | eukaryotic translation initiation factor 5b |
| CED82220 | −0.65032 | 0.0636023 | coatomer protein subunit alpha |
| CDZ98017 | −0.67442 | 0.1739511 | oligosaccharyl transferase stt3 subunit |
| CDZ98852 | −0.67733 | 0.1359709 | vacuolar atp synthase subunit d |
| CED84347 | −0.68098 | 0.1436534 | agc pka protein kinase |
| CDZ98026 | −0.6936 | 0.147114 | ef-hand |
| CDZ96254 | −0.69919 | 0.1715042 | phospholipid-translocating atpase |
| CED82282 | −0.69928 | 0.0126954 | polyadenylate-binding protein |
| CED84522 | −0.70055 | 0.180053 | Splicing factor U2AF, large subunit (RRM superfamily) |
| CED85187 | −0.70282 | 0.1080156 | Cullins |
| CDZ96402 | −0.70365 | 0.067386 | hypothetical protein |
| CDZ97267 | −0.70539 | 0.0682198 | pre-mrna-processing protein 45 |
| CDZ97731 | −0.71288 | 0.008825 | Translocase of outer mitochondrial membrane complex, subunit TOM70/TOM72 |
| CED84243 | −0.71406 | 0.023715 | gmp synthase |
| CED84922 | −0.71629 | 0.0858571 | Acetyl CoA acyltransferase 2 |
| CDZ97556 | −0.71738 | 0.033781 | hypothetical protein |
| CED84878 | −0.72579 | 0.0771834 | Transcriptional coactivator p100 |
| CED82908 | −0.728 | 0.0514783 | Metallopeptidase |
| CED84394 | −0.73313 | 0.10398 | Protein of unknown function DUF938 |
| CED82377 | −0.73346 | 0.0695725 | phosphoglucomutase |
| CED83089 | −0.73572 | 0.1296054 | NADH-cytochrome b-5 reductase |
| CED82587 | −0.74374 | 0.1709508 | hypothetical protein |
| CED83181 | −0.75247 | 0.0851343 | eukaryotic translation initiation factor 2 subunit alpha |
| CED83463 | −0.75304 | 0.014415 | atp-dependent rna helicase dhx8 |
| CED82100 | −0.75699 | 0.1007998 | Pyridoxalphosphate-dependent enzyme/predicted threonine synthase |
| CED82249 | −0.76428 | 0.0614175 | Lysophospholipase |
| CED84107 | −0.77092 | 0.0561539 | dead-domain-containing protein |
| CED83380 | −0.78096 | 0.1080156 | Oligosaccharyltransferase, alpha subunit (ribophorin I) |
| CED84444 | −0.78774 | 0.0050139 | nadh dehydrogenase |
| CDZ97088 | −0.78881 | 0.0611706 | gtp binding protein |
| CED84659 | −0.79415 | 0.0830572 | pentafunctional protein |
| CDZ98670 | −0.79644 | 0.1359709 | glycoside hydrolase family 13 protein |
| CED85615 | −0.79864 | 0.1738004 | HMG box-containing protein |
| CED85600 | −0.81236 | 0.0851343 | Acyl-CoA synthetase |
| CED83469 | −0.81611 | 0.0692198 | t-complex protein 1 |
| CED84268 | −0.81772 | 0.1568805 | Vacuolar protein sorting-associated protein |
| CED83034 | −0.82036 | 0.0026732 | threonyl-trna synthetase |
| CED83688 | −0.82625 | 0.0075757 | acetate--ligase |
| CED82774 | −0.82864 | 0.056208 | 40s ribosomal protein s21 |
| CED85021 | −0.82999 | 0.014415 | pkinase-domain-containing protein |
| CDZ96352 | −0.83139 | 0.016916 | eukaryotic polypeptide chain release factor 3 |
| CDZ98212 | −0.84074 | 0.1739511 | WD40 repeat-containing protein |
| CED82307 | −0.84346 | 0.126792 | mevalonate kinase |
| CED84984 | −0.84578 | 0.1150853 | developmentally regulated gtp-binding protein |
| CED82186 | −0.85369 | 0.1657161 | Cell-cycle nuclear protein, contains WD-40 repeats |
| CED82250 | −0.8599 | 0.095967 | coatomer protein |
| CDZ97948 | −0.86811 | 0.1089294 | coatomer subunit delta |
| CDZ98402 | −0.87314 | 0.0979159 | RmlC-like jelly roll fold |
| CDZ98765 | −0.89458 | 0.0608974 | phenylalanyl-trna synthetase subunit beta |
| CED84877 | −0.90761 | 0.1733975 | Nuclear pore complex component (sc Nup85) |
| CED84055 | −0.91098 | 0.0026732 | Fatty acid synthase complex subunit beta |
| CED84731 | −0.91787 | 0.0982665 | cAMP-dependent protein kinase types I and II, regulatory subunit |
| CED84608 | −0.92458 | 0.1043385 | hypothetical protein |
| CDZ97164 | −0.94756 | 0.0957369 | Phosphomethylpyrimidine kinase |
| CDZ96172 | −0.95622 | 0.1229731 | translational regulator gcn20-like abc transporter |
| CDZ98173 | −0.95779 | 0.0692198 | methionyl-trna synthetase |
| CED85540 | −0.96249 | 0.0109769 | 60s ribosomal protein I20 |
| CDZ96447 | −0.96398 | 0.0374233 | related to ste23-metalloprotease involved in a- factor processing |
| CED85618 | −0.96416 | 0.1173322 | glutamate dehydrogenase (nadp ) |
| CDZ97095 | −0.96481 | 0.0222833 | Uncharacterized enzymes related to aldose 1- epimerase |
| CDZ97844 | −0.9676 | 0.0871441 | glycerol-3-phosphate dehydrogenase |
| CDZ96270 | −0.96864 | 0.0026273 | phosphoglycerate kinase |
| CDZ96943 | −0.96912 | 0.0495848 | Peptidyl-prolyl cis-trans isomerase |
| CED84004 | −0.97124 | 0.1715042 | arm repeat-containing protein |
| CED84854 | −0.97158 | 0.0062306 | heat shock protein |
| CED82490 | −0.97251 | 0.042078 | plasma membrane h( )-atpase 1 |
| CED84115 | −0.97573 | 0.0771834 | 2-hydroxyacyl-lyase |
| CDZ96746 | −0.97629 | 0.0751553 | dihydrolipoyllysine-residue acetyltransferase |
| CED84246 | −0.98073 | 0.0175187 | citrate synthase |
| CED84490 | −0.98102 | 0.1512838 | gtp-binding protein ypt1 |
| CED83658 | −0.98434 | 0.1491807 | Microtubule-associated protein |
| CDZ97241 | −0.98541 | 0.0167343 | mitochondrial nad-homo-isocitrate dehydrogenase |
| CED83932 | −0.98644 | 0.1080156 | Phosphatidylserine decarboxylase |
| CED85039 | −0.99117 | 0.067386 | C-24 methyl transferase |
| CDZ98702 | −1.00312 | 0.147114 | mov34-domain-containing protein |
| CED82008 | −1.00466 | 0.0699152 | Ca2-dependent lipid-binding protein CLB1/vesicle protein vp115 |
| CED84681 | −1.01627 | 0.0503176 | arm repeat-containing protein |
| CED84622 | −1.01707 | 0.1438478 | chromatin remodelling complex atpase chain |
| CDZ97595 | −1.01773 | 0.133613 | glycoside hydrolase family 32 protein |
| CDZ96916 | −1.018 | 0.033781 | imidazoleglycerol phosphate synthase |
| CDZ97922 | −1.02091 | 0.0560934 | histidyl-trna synthetase |
| CED82181 | −1.02603 | 0.010389 | nadh-cytochrome b5 reductase |
| CED85375 | −1.03089 | 0.1718815 | 3-deoxy-7-phosphoheptulonate synthase |
| CDZ98718 | −1.03454 | 0.0061469 | coatomer beta subunit |
| CDZ98706 | −1.03631 | 0.0420255 | Phosphatidylinositol transfer protein SEC14 and related proteins |
| CED83084 | −1.03953 | 0.1289963 | F1-ATP synthase assembly protein |
| CDZ97544 | −1.04039 | 0.1512838 | 40s ribosomal protein s20 |
| CED85505 | −1.04548 | 0.1017034 | glycosyltransferase family 2 protein |
| CED85306 | −1.05206 | 0.0561539 | Allantoicase |
| CED83834 | −1.0581 | 0.1080156 | mfs monosaccharide transporter |
| CED82858 | −1.06144 | 0.1232547 | hexokinase |
| CED85483 | −1.06172 | 0.0499431 | 40s ribosomal protein s6 |
| CED83589 | −1.06427 | 0.033781 | ATP-dependent RNA helicase pitchoune |
| CDZ97357 | −1.06568 | 0.1080156 | Ran GTPase-activating protein |
| CED84737 | −1.07129 | 0.0146614 | nad binding dehydrogenase |
| CED83001 | −1.07233 | 0.0026732 | heat shock protein 60 ame: full = 60 kda chaperonin |
| CED83179 | −1.07579 | 0.0137624 | Perilipin |
| CDZ97007 | −1.08006 | 0.0794147 | sugar transporter |
| CED82373 | −1.08484 | 0.0778048 | Microtubule-binding protein involved in cell cycle control |
| CED82356 | −1.08878 | 0.1232547 | GDP-mannose pyrophosphorylase |
| CED83350 | −1.09326 | 0.1295739 | signal recognition particle protein |
| CED83064 | −1.09776 | 0.0126954 | glutamate-5-semialdehyde dehydrogenase |
| CED83338 | −1.11182 | 0.1715042 | protein phosphatase |
| CED85589 | −1.11338 | 0.1017034 | Predicted proline-serine-threonine phosphatase- interacting protein (PSTPIP) |
| CED83853 | −1.11353 | 0.0735099 | dead-domain-containing protein |
| CDZ98315 | −1.11958 | 0.0490554 | Ribosomal protein S5 |
| CDZ96576 | −1.12389 | 0.008825 | sly1 vesicle trafficking sec1-like protein |
| CED83290 | −1.1313 | 0.0161918 | trehalose 6-phosphate phosphatase |
| CED82302 | −1.13258 | 0.1541232 | WD40 repeat-containing protein |
| CED84865 | −1.14211 | 0.1563611 | mitochondrial 50s ribosomal protein I3 |
| CED82772 | −1.14646 | 0.130641 | Histidine-specific methyltransferase, SAM- dependent |
| CED83357 | −1.14982 | 0.1568805 | 60s ribosomal protein I7 |
| CED84941 | −1.15648 | 0.0427497 | Predicted hydrolases or acyltransferases (alpha/beta hydrolase superfamily) |
| CED84219 | −1.15953 | 0.130641 | -trehalose-phosphate synthase (udp-forming) |
| CED84803 | −1.16039 | 0.0871441 | imp dehydrogenase |
| CED82043 | −1.17161 | 0.0643306 | Exosomal 3′-5′ exoribonuclease complex subunit Rrp40 |
| CDZ97030 | −1.17282 | 0.0026732 | succinate:fumarate antiporter |
| CDZ97070 | −1.1786 | 0.1706431 | glutathione peroxidase |
| CED84796 | −1.18436 | 0.0794704 | Delta 12 fatty acid desaturase |
| CED82849 | −1.19242 | 0.067386 | transaldolase |
| CED82649 | −1.19995 | 0.0993953 | phosphatase |
| CED84960 | −1.21113 | 0.0126954 | gtp binding protein 4 |
| CED82693 | −1.21672 | 0.1706431 | arm repeat-containing protein |
| CED83746 | −1.22831 | 0.1583372 | hypothetical protein |
| CDZ96477 | −1.23733 | 0.0037331 | ornithine carbamoyltransferase |
| CDZ96620 | −1.238 | 9.181E−05 | Fatty acid synthase complex subunit alpha |
| CED83014 | −1.24085 | 0.1715042 | nad-dependent formate dehydrogenase |
| CDZ96709 | −1.24506 | 0.0509018 | coatomer subunit gamma |
| CDZ97588 | −1.24644 | 0.0692198 | RP-S18, MRPS18, rpsR |
| CED83573 | −1.24929 | 0.0470041 | UDP-N-acetylglucosamine pyrophosphorylase |
| CDZ98425 | −1.25161 | 0.0147147 | aldehyde dehydrogenase |
| CDZ98564 | −1.25786 | 0.0289389 | pyruvate kinase |
| CED82578 | −1.26332 | 0.1079024 | hypothetical protein |
| CED84238 | −1.26644 | 0.0123918 | gtp-binding protein ypt3 |
| CED83765 | −1.27793 | 0.008825 | carbamoyl-phosphate synthase |
| CED84213 | −1.29049 | 0.0771834 | ras-domain-containing protein |
| CDZ98136 | −1.30498 | 0.1706431 | Vesicle trafficking protein Sec1 |
| CED82875 | −1.33021 | 0.0957369 | p-loop containing nucleoside triphosphate hydrolase protein |
| CDZ97947 | −1.34958 | 0.157889 | hypothetical protein |
| CED83361 | −1.35397 | 0.0139816 | dihydroxy-acid dehydratase |
| CDZ97373 | −1.36287 | 0.0751553 | Ribosome recycling factor domain |
| CDZ97245 | −1.37 | 0.0062306 | acetyl-hydrolase |
| CED84039 | −1.39997 | 0.0961632 | Glycosyl transferase, family 1 |
| CED84809 | −1.40948 | 0.0147147 | mago nashi |
| CDZ98813 | −1.41592 | 0.17568 | WD40/YVTN repeat-like-containing domain |
| CED83572 | −1.41975 | 0.0141757 | atp-citrate synthase |
| CED85129 | −1.44133 | 0.0554217 | isocitrate lyase |
| CED82387 | −1.44764 | 0.0294131 | GST, gst |
| CED82450 | −1.46422 | 0.0783197 | amidophosphoribosyltransferase |
| CDZ97923 | −1.47301 | 0.1097654 | d-arabinitol 2-dehydrogenase |
| CED84763 | −1.4734 | 0.0957766 | SPCS2, SPC2 |
| CDZ98236 | −1.47606 | 0.0499431 | Alcohol dehydrogenase, class V |
| CED84181 | −1.47713 | 0.0342256 | uridylate kinase |
| CED83904 | −1.48705 | 0.1150287 | swi snf complex protein |
| CED82339 | −1.52561 | 0.1709508 | Protein involved in Snf1 protein kinase complex assembly |
| CDZ97501 | −1.5258 | 0.087982 | p-loop containing nucleoside triphosphate hydrolase protein |
| CED85216 | −1.54086 | 0.0032648 | Aromatic amino acid aminotransferase and related proteins |
| CDZ96990 | −1.56918 | 0.0342256 | upf0041-domain-containing protein |
| CED83533 | −1.58921 | 0.0699152 | Protein of unknown function DUF3602 |
| CDZ97740 | −1.61523 | 0.0614175 | gtp-binding protein |
| CED83642 | −1.61929 | 0.1378419 | Uncharacterized conserved protein |
| CED83331 | −1.63302 | 0.0314857 | 60s ribosomal protein I11 |
| CED84705 | −1.63799 | 0.0270372 | arginine biosynthesis protein |
| CED82059 | −1.63961 | 0.0026732 | fk506-binding protein 2 |
| CED83630 | −1.64796 | 0.0037331 | glucose-6-phosphate isomerase |
| CDZ97129 | −1.67776 | 0.1289963 | Predicted regulator of rRNA gene transcription (MYB-binding protein) |
| CED83333 | −1.68454 | 0.0026273 | pyruvate decarboxylase |
| CED84473 | −1.68967 | 0.0457587 | Translational repressor Pumilio/PUF3 and related RNA-binding proteins (Puf superfamily) |
| CDZ97012 | −1.69367 | 0.0037331 | alcohol |
| CDZ98664 | −1.71814 | 0.0075757 | glycoside hydrolase family 13 protein |
| CED83236 | −1.73513 | 0.0026273 | epsilon dna polymerase |
| CDZ97011 | −1.73773 | 0.0050139 | 60s ribosomal protein I23 |
| CED83452 | −1.78054 | 0.0503176 | glycoside hydrolase family 13 protein |
| CED84972 | −1.79085 | 0.008062 | NADH-dehydrogenase (ubiquinone) |
| CDZ97924 | −1.81654 | 0.1672259 | hypothetical protein |
| CED84831 | −1.82825 | 0.1089294 | -like helicase 1 |
| CDZ97488 | −1.87594 | 0.0126954 | isocitrate dehydrogenase |
| CDZ98179 | −1.89763 | 0.0005055 | Acetyl CoA carboxylase |
| CED82102 | −1.90183 | 0.0274228 | tetrapyrrole biosynthesis porphobilinogen synthase |
| CED83672 | −1.91539 | 0.0751553 | hypothetical protein |
| CED84851 | −1.96978 | 0.0345283 | acetylornithine aminotransferase |
| CED84556 | −1.97107 | 0.0050139 | phosphoketolase |
| CDZ96541 | −1.97312 | 0.0993953 | atp phosphoribosyltransferase |
| CED84497 | −1.97839 | 0.0993953 | modular protein with glycoside hydrolase family 13 and glycosyltransferase family 5 domains |
| CED85401 | −2.09905 | 0.0122113 | |
| CDZ96394 | −2.10898 | 0.0503176 | phosphatidylethanolamine n-methyltransferase |
| CED83656 | −2.11939 | 0.1273922 | Delta 9 fatty acid desaturase |
| CED82203 | −2.24415 | 0.0289389 | metal resistance protein ycf1 |
| CED83962 | −2.41422 | 0.0666375 | glycoside hydrolase family 3 protein |
| CDZ96382 | −2.78513 | 0.008825 | glycoside hydrolase family 32 protein |
| CED82966 | −3.24281 | 0.0345283 | Taurine catabolismdioxygenase TauD/TfdA |
| CDZ96436 | −3.52954 | 0.0032648 | alcohol |
| CED83529 | −4.59152 | 6.361E−05 | Maltase glucoamylase and related hydrolases, glycosyl hydrolase family 31 |

TABLE 20

| CDS | SEQ | | |
|---|---|---|---|
| Accession | ID NO | Table(s) | Variation(s) |
| CDZ98521 | 14894 | Table 14 and Table 15 | Z₁; Z₂₁; V₁ |
| CED83134 | 16402 | Table 14 only | Z₂; Z₁₄ |
| CED80058 | 13437 | Table 14 and Table 15 | Z₃; Z₂₂; V₅; V₆; V₇ |
| CED80056 | 13605 | Table 14 and Table 15 | Z₄; V₁₀; V₁₁ |
| CDZ96150 | 15263 | Table 14 and Table 15 | Z₅; V₁₅; V₁₆; V₁₇; V₁₈ |
| CDZ96151 | 15929 | Table 14 and Table 15 | Z₆; Z₇; V₂₁; V₂₂; V₂₃; |
| | | | V₂₄; V₂₅ |
| CDZ96152 | 17082 | Table 14 and Table 15 | Z₈; V₁₂ |
| CDZ96153 | 12953 | Table 14 only | Z₉; Z₁₀ |
| CED80060 | 13445 | Table 14 only | Z₁₁ |
| CED80061 | 13989 | Table 14 and Table 15 | Z₁₂; Z₁₃; V₁₃; V₁₄; V₂₆ |
| CED83656 | 17215 | Table 14 only | Z₁₅ |
| CED83814 | 17373 | Table 14 only | Z₁₆ |
| CDZ96789 | 18649 | Table 14 only | Z₁₇ |
| CDZ97186 | 19046 | Table 14 and Table 15 | Z₁₈; V₂ |
| CDZ98193 | 13853 | Table 14 and Table 15 | Z₁₉; V₃ |
| CDZ98468 | 14841 | Table 14 only | Z₂₀ |
| CDZ96332 | 15265 | Table 14 and Table 15 | Z₂₃; V₄ |
| CED83975 | 17534 | Table 14 only | Z₂₄ |
| CDZ98804 | 15177 | Table 14 only | Z₂₅ |
| CDZ96154 | 13440 | Table 15 only | V₈; V₉ |
| CDZ96333 | 15928 | Table 15 only | V₁₉; V₂₀ |

The application's sequence listing, which the Patent Office published only in electronic form, follows.

SEQUENCE LISTING (3219 sequences)

SEQ ID NO: 1 - DNA, 2397 bp, Xanthophyllomyces dendrorhous
cgagaggctaccctcgcagatgggtatctaacgatgaagcttgcgctaacagtgagctgttacctttaaagcaactagcttatagaaagcaggtatttcgcctgtagtcggctcgtacccgacgttgcttttaggtaacagcgtctgctctctcccgagagtagcgttgttcggtccaggagagccagttcctgtctcagccctctaacgcttgcgattgggaggagagaataaacattactgccttacggcaatctggtggactctaaatgggtccactacaacgaacccattttgtgccacaggagaccttattatacttgtttattatgtttactaatgttttcagccctcgctggctcctgtccacaaatgcaaaggatatcggtaccctctaccttgcctttgcggtcatctccgggatgctcggtgctgccttttctatggcgatccgcgcagaacttgcctctcaagggatccaagtccttggcggtgatcaccaactatacaacgttgttgtttctgcccacgcgctccttatgatcttttatatggttatgccggcgctcgtgggtggctttgggaactacctcctccccgtccagattggagcggtggatatggcgttccctcgtctgaacaacatctcgttctggctactgcctccctctctgatgttgttgctcttgtcggctcttgtcgaacaaggagcaggtactggatgaactctgtacccgcccctctcgagcctccagtctcacagtggtgcttcggtagacctcgcaatcttcgcccttcatctcgctggtatcagctcgactctaggcgctattaacttcatcgttacactcgttaacctccgtgctccagggatcacgttcgaccgagttccactcttcacatgggccattgccatcacggccgtattgctactcttgagccttccggtcctagctgggggtattactatgcttctaacggaccgaaacttctcgactagcttctacgaccccgctggtggaggtgaccctgtgctgtaccagcaccttttctgattcttcggtcatcccgaggtttacatcctcgtgatccccgcctttggagcggtatcccacgtcgtaggtgccttctcatacaagtctgtattcggcaccctcggcatggtctacgctatgatgagcatcggcgtgctcggttttgtagtctggtcgcaccacatgtataccgttggtatggatgtggactcccgagcctacttcaccgctgcgacgatggttatcgctgtgccaaccggtattaagattttctcttggttggctacgctctatggtggcgcccttgaatacagcactgcattgttgttcgctcttggatttatcctgctcttcacgctcggaggcgtaactggggtagtattggccaacgcctctctcgacgttgcgatgcatgatacgtactatgtggtagctcacttccactatgtgctgtctatgggcgcagtgtttggtttgtttgcggccttctactattggttcccaaagctcacaggccgctctctttctgaattgctcgggaaggtacacttcggtctactctttgtgggagtaaaccttactttcttccctcagcacttccttgggctagctggtatgcctcgacggatccctgactatgctgacgcattcctcgggtggaatcgagtctcgtcattcggtagccttctgtctattgttgctacggttgtattcctagttcttctaggtcaggctctttctactgggcgtgtcgtcacagcggcatctccatggacaagccctgactttaatacttctgccgctgttcaagcagaccgggtttatggtgtcgaatgggctgtagcttctcctactcctcttcacgctttcgagcagcttcctgttgctacaactagctagctctaagctgtgaatagtcgtaatgatgttcgttgttacattttgttttagaatgtgaagctttatgctttatgcagtacaaggctaaatgtatttggtctatacctttaggtggtgtagtgaagggagcaggtggtgctccttttaatcctctttgctcggctgcttgcgtcgcaagaagtaaggctctgaaggtctcaaaggtctatggaaacatatgctcggagaagctctcggagaagtcgtcgaacctcgagaggctttcctcgtgaaaggactcatgtagaggggtaatggacccctatctggtggctttatagcatgaaagagtgtgaactctctctcttccagaggctaggtgagcctcgttagtagcgtagaaacttgaaattcccttaggagactatggggtctcgttcaaggggctatggagccctcttggtgaggagtagtggactcctct

SEQ ID NO: 2 - DNA, 1465 bp, Xanthophyllomyces dendrorhous
agtaacgtgaggggccctatgggctgtatgacgatcggtttggtcggtacagctcccctctagcgagctgagtacctccgaccccgatcgagcgtacaagagtacgcctgtgacgggagtcatcggagagaaagctcaaagaagacagctttctctgagtccctgtaccgattcctccctgtggggtctcgaggagaagattcactatgatctagtgttccactagaccaagagctcatcttatcttaaatgagtatactcgttagcactcgcatcctcgatcgcttagcgcaatggtagcgcaaaggcttgaagcgcctttggtggaggttcgattccttcagtgatcacgatcgacctgatcacctcggatcgactgaggatgccccctcccttactgcttcttgatccttgccttatggctgatcaagcagtcttgtgaggggctcgtcctctacgacagcggagggtataatccgccgaggcattggacgagttactgtagtaattaactcgtctatgcctcaactgacttatacttatttttgatttgttgaatttgctatggtcggagtcgcgcttggcgtctctattgtattgctcggagtatacgctcttccttcgctaaccgaagcacaactgatccgatggtcagttgctagcctcggtgtagctccgttcgtagctactcctctcgagcaattcaagagcacgcccctcctcctgcttgacgcaaattcatttatgctgcctctcacagtctccgggctgtatacaattctgcccgtcgtccttctcggcagcttcttctttttggtccgacctactgtcgtccctcatcgatgaagtgtcgcccaggagtctattggagcgacacttctttctcttgtacgagcgcagctcggaaacaagcacgaagtgatgtttcctctaatgactgcgctctttcttgttgtcctcgtccttaacgtactcggaaatgttccctacgggtttactgtaacctcctccctgtcggttactcttggtttgtccttgtcaatctggttctatactcttttgcttgggattgccaaggacggcttgggcttcctatcacacttcgttcctgatggaactccgttggtgctagcgcccctgctagttgtaatcgagacagtaagttactgtgctcgagccgtttctctcggtgtgcggctatttagcaacatgcttgcgggtcatacccttctagcaatccttagcggattcctaagcaagcttgttgtctcttcagccgcagttggaatcgcctgtatcattccttttggtttcttcgtagccctagtcggtctagagctcgctgtcagctttatccaggcctttgtcctggttgtcttgacagctagctatatccctcgttagccccgagaaacgaaaggctttctacagccgatggcttgtgtcttcttgactctacgagtct

SEQ ID NO: 3 - DNA, 2159 bp, Xanthophyllomyces dendrorhous
agccgacgatgagctatgaattaaggaacgaaagaacaagtccgataggatcaataacgattagcctagagggctcggggaggcgacaaaagctctacgctacagggcgtaaccaagaccaacgggattgagtgagtctgtaagcgtagatgttagaatcccgccgacaaacacggctaacaagagcccgaagaggcagtacatctctcgtcgagacaggtcagaggagaccttcagggaagggcttcatcgaccgtaggcgatacgagagtacaatcaaaccgagtagactgcgccaagcaggacactcgatcccgatagaaccgcgaggagcggatgtaagaggtacaaaccaacaacaacaagtacctctgaaatccagttcagagtggtagggatcgcgatgttggcgcaggaagcgaggaagaagaacgtggccgagagaggcataagcaaggtgaggccacgaaagtatcgaaacactcgagtgtgataccgctcgtaaagcacgccccctacaatgacaaagagggcgggcgaaacgagtccgtgagctaacgagagaagaaggccgccagaggctgctgtcggggacagggcgaagagaccaacggtcacgatagccatatgaccgacagaagacaaggcgataacagccttcacgtcagattgccgagttaccgagagacacgaaagaacgagggtaacagaggcaatcgcaaagacgaggggctgaaagcgcaaggaggcttcggggagaagttcgaggcagacccgcacgaagccgaatgttgctagcttcagcaccacaccagccagaagaactgacatggcgacaggagcctcagcatgagcgcgatagagccaaagatgaaaaggatagagaggggtcttcaccgcgaacgatagtgcgaatgcaaatcagagtcacgcttgcgttgacgaagcaaaatgagcactagcgagagagtcaaacgtgagagaccccagctctagccaaacaaagaggatggctaggagcatagcgagtgagccagccaaagtataaagaaagaagaggtaagctgctcgtagacgggcagcaccgcttcctcaaacaccgagggagatcactacggggacgagagacgcttcgaaggccacgtagaaagtcataagatctccggagagaaaaacaatcaacaaaattgactccagagccaggaggagggacgagtagctcgtttccattgagcgtccagtggagtatccactgagatgagcaataggaaacagagagctcgtcaggacgataagtcacgcggacaaggcatcgacgttcgcgttcacggtctggagtcaatgaccccagacaacaagtgttgccactattgtggtaatggcaacacctagggctaccccccgtgagaggtagccttggagacgagaagcgctagctgcgagacctaaggcaccgacgagcgggagggtagacaacaacacaagcatacaaacattaaagcttccttctcgaagctttaaggtttaagatcaaaaagggattcgaacccttgctgtccgaagacaactcgttttcaagacgagcgcattagaccgctctgccatttgatcggggctaaccccagaatgcaaaattgttgaccgaaggtcttatgattttgctctatcaacagcagcttcctgctgcgcatgggtagccccaaccaatctccattggcagagcatccatgtcttcttagggacatgagactcatacggtcttttgcttgccgtatgcagtcatctcatgctattccctagcactcattacaacacaatagacccttacaggtctactgtactgcacagcttcatcccccattgtacacgctatacatcttctttgcttactaatgcccttcttacaggatgtacggttcacccaaagaattgtgtgatgtatactttcctcatgcaggtactgctagctattcttcatcgcaactgcttttctcttcccctcctttcggcctatagaaactactaaccgcatccgtatttgtcgctcttacttagaggggcttatcccgagctctcatggactagctcagtcggagcataagtctagtccatatgtgagggctctcgctacacaccagttgctgcgaaggagcaggaga

SEQ ID NO: 4 - DNA, 1375 bp, Xanthophyllomyces dendrorhous
gatgtcgtctcttacgaaggctccataagcaatggatcttctctaggtttggcctgctgagagaagagacagttacaaaaggagccacagtaaagagagcgacggtgagagggagaagcccagttcacccgaacaccataagagaatcatatcggagtcgagggagtgtcccacgagctcagacgtagatataaacgaagagtgaggccttaagcccaaggagggctttgccgagcaacatatccgaggaggcgccccctaggaataagacacaggttactgtgcttatgagtacaagggcggcgtactcgctcaggaaaaacagaacgaagggcatcgaactgagttctgtcatatagcccgcaacgagctccgactcggcttccgggaggtcgaagggcacacgattcgtctccgcgagggcagagatatgaaacgcgaccaagactggcgctagaggaagaagcaatcagactgattgctgaacctcaacgacagtcgccaaagacatcgagcccgagatggcgacgactacaagcactgcggtgcccagagtgagctcgtaagagatcatctgtgcagcagcgcgtagtgcaccaacaaaagcaaagctatttgcagtcgaccaaccggcatacaagacgccgtagactgtcagcgtggagagcaagatcaatacgagaaccgagtaatcggtctcgtagatcgctagtccacgcccaaagggtactacggcgaaaccgaggagactgcaaatcaggctcaggaggggtgctagcatgacgaagatgcgcaaggcctgcgttggctgaacaaattctttagccataagcttaagcgcatctgcaaacggctgcagcaccccgtaggccccaacagtattggggccaacacggcgttgcatcgctgcgagacctttgcgctcagcaatggtagagaaagcgacacccaagagcataggcagaataaggaaagcattaacgagagcaaccatagttggtcgagtcactaaccgaattcggcctatgcaaacaggaaatgatacccgtaaagggtggggagggggcacacaagcctgggagaggttctcacaggcaactcgtagccaaaggttcatatgctttggctactcaccgctagtgcttctgagacaagctcagctgtaactgagcttatcctcgttaatagtctcctagactatcgaggatgtctagtcagtagcacaagtgctcctttcgacgatcctgcaacgtgatcgacaggagagtcgaactcctgtctcaagcgcgaagagcttgtgtcttgaccactatacgagtcgatcgggtgtgtactcccgagatagacgagtatcatttgaaggcaacgaggacct

SEQ ID NO: 5 - DNA, 1010 bp, Xanthophyllomyces dendrorhous
ggggcggaatgagacgcgcagcttactcctgagcaagcagccaggccatgtactcagatgggctgaggacgtttaccacaataggcataaagccgtggtatacgccgcaaagctctgagcattggccgtagaagctgccaggacgttctgcaagcgtcgaagtctggttgagacgtccagggatagcgtcgagcttgatcccgagagacggcacagctcatgagtgaattacatcagtagatgtaatcacgaaacgagcgtgcgtatctacggggatagctacggcgttatcaacctcgagtaggcgcagagcgccatcctcgaggctggccgaatcaaccatataagaatcaaagacaacgccatcgttgtcaccaatctcactgtcggagtactcgtaagaccagtaccactggtgtccgagtaccttcacagtgagtgaaggcgcaatcacctcgtccatcaagtaaagaagacggaacgaggggaatgcgatagcaatcaaaatgaaagcaggagacacggtccacactagctcgagcagtgtgccgtgattcaggtacttggcggctgaaggccgaccagcactgaatcgcaggcaaatagcgaagagcatgtagactgtggcgacaacaatagcaacaacaaagaagagggccgagttgtgcaactcttggatcccctcgaaagctacagaggcagagtcttggaaagacaactgccaagcttcgggggagtcaagagaaactgaagagacgaggccatcgagagaccaggtcccaaagaacccaacagaaagggagtccgaggacaagcccaaaattgaccacaaagaagtataaatagcaaacattggtcaataaagggcgtacgaggaattgaaccccggtcgggctattaagagtggccagctttgccactaagctatacgcccgcgatggggttatactggctccctttcgggactggtcctctctttgttgaagaatctttgaaggcaacgaggacct

SEQ ID NO: 6 - DNA, 499 bp, Xanthophyllomyces dendrorhous
ctccggttaggagtccgcaagcggagctgaggaacaaggggattataaggggaatgttccccttatatatagggactacgtagtccccttaaattttggtgaggcgcagaagagcctgtgagcggtaacatgacccttctccaggcgatttcaaggctcatgtcttatacaacttccttatcgtaaacttccttttgtgaggaaagctcctcgacgtccgacagcctttccgagagcttttagagccccatgacctctacgatcctttcctcctgccgctactgcagtgtcggctgcagtcccccttagaaagctcccgagctttctcctctccagggagtctactactcccttttccacagcagtggcgcctgctgttttatgatttcttctaaagactctcttgacgtcacatgtcctttccaagaggtctttagctctacgatctccttcttagcacaggagttctagactcctttcggctgtagtatcggctaca

SEQ ID NO: 7 - DNA, 2881 bp, Xanthophyllomyces dendrorhous
tagtatcggctacagctcccttagaggctctcctagcctccggagatctaccctcagagagcgcagcgacaagaggaggagatcgggccctctccgggaggagtccgcaagcggagctgaggaataggggttgtaaggggagagtccccttactacagggagcaccgtactcccccaaatttcccttgtttacagctaggctccagcctacctagctctctacactaacctgagagtgtagaccaagtctcatgagcacaacacatataaagagttctctagtctagattctaaagacaagcacaaaggaagtagaaaagagaagtcctctatacaaaagctataagactcatagcccatacgagggaggcaaagggttctaagaccaccatcttagggaatctacgcagccataagtgcgtagaccaaaatagcaaaactaagttacatctaggaagcctgcctcgtgttaaggttatatagaacctagaggcagagatgagtagagttgcgctagcaaaagtcctattgaagaaacaaagggctagcaggtttgcaggtaagctaactaataagaagactacaacatctggcacagagcctctaaagaaatatagctagagaggcgatgtaaacaacaacaagaaagagtgaggcaccgaagtaagctgcgatgccgaaccccagagtggctcctgcggtcaaaagcacaagacggctaatgcccggaccagaaacgcctaggcgtgaatgggcgagggcaagcaagcttgtgctaagaccaaaaggaccaacaagctcaaagagtcctcgatcaagagttttataagaaatataggcagcagagaggcctgtgcgagaaacaccttgagcaaggaaggagtcggtaccccactttgtctggctaagaatgccagccaagtaagaaagacgacgactgcgcttaaggtctacaggcacagagactcctgtggtgcctacaaacagaccaagggccgaagccactaggggcaaggtcacgaataatgctgaagtagaatattcagtgtcgagaggcgaggaagtcgaagggtactcagcgagacccaagactcctgcattcggcacgaatacttcactgaggcagtacccagccacgatcgaaagcacccccagaagagtcaaaatgactcgcactgttggggttgtaggatcgtgaagtcccgagaccatagcagaggtggcacgaggaagtccttcaaaagcaagataatgtagacgacctgaatagtatagcgtaagcgccgcacctaccagggcgagtattcaggtgacattatgaaggaccataaagccaccgagctgtgtctcgataataatatctttagaaaagtctcccgaggtgtaaggagcagctccaagcgctgccattgccataagcatgattgtagccgtaaagggaaggaatcgagagagtccccccattaggcgaagatcttgcagaccggcaagggcatgaatgactgctcctgcaccgagaaagagcacggctttatacagcgcgtgcaatatgagaagcgagaacgcagctgtatactgcccagtgctacaacccaaaaccatatacgctacctgggaacaggtactaaaggcaataacgcgcttaaggtctgtctgccgtagagctgtgataccagcatagacggcagtacaggaaccgagaagcgctactcctgccatagtagaccccgaggaggcttcgagtagagggctgcaacgaataagtagaagggcacctgcggttactagagttgcagcgtgaatcagagccgagacaggggtcggggcttccatcgcattgggaagtcaggcctgtagacctagttgggctgacttgcctgcagcagcgcaggcgacgaggaaaccgagaggaacgagggttgactccgagagcgagctagaggcttcgcctaagatggatcagcttagcgatccagctccagcgaaggccatagcaagcacgagagtaagcgctgtatcacccatccggttaagcaggaatgcctgcacaccggattgcacagcattggctcgtgtataccacaaagagataagtagatacgagacaatgccaataccttctcaaccaacaaacatgatggcgaggcctgtcgacatagagagcacgagcatgagggctgtaaaagcaccgatatacagcatgtatcgagacaagtgggggtcaccctcgagataccagcccgagtagaagtgcactccacaggataccgtcatcactgtttgtaccataccggcagcagttgagtcaagaacgagggttcattgaactcgttgggaatcaacgaggaatcagtccccgagagagaggctcactgatgacgagcatcaccaaacttcataaagagaggcggtagcgtatagcaaaccgactcccatagatgaggtcgagaggaggagaactccttgagtaccgattcaccgagtaaacaagctagcgaaagctgcaaatactggacttagtaatacggccagtagcattacagctgagctagcgagccccgcatccgaaacacgcccacaacgagggccaagccgatagcgctttcagctcctgcgatactaatcgcaaggagagataagacgcttgaggctgagtccacgtagcgggttgaggctacaagaaagaataagctagcggctaggagcatcagctcaaggcaaaagagtatacgtagtacactctttcccgcaagagcaaatgcgattaagccgataacaaataagatcatagcaagtagcatcgatgtgaaacgagatgcaaatattgccctacactctagtgttaaaatgcttccatactatgcgagggtagcctctcgta

SEQ ID NO: 8 - DNA, 2285 bp, Xanthophyllomyces dendrorhous
ctggagactgctagcagtactcgatttgaggaaagcattggtcattcaaccctttgggcgaacattacatcccgtatggggcatcagtaagcaaaggggaccaatggcgtgtacaaaagagggatgaagctgtgtggatcctagtcccgcaaggggttaggtgatataaatgtgtgccagggataagacatgagatagtagtacggctcggcaaaagatcgtatagccctcatcaccttgaaaagacttatgccattgggaggctgtggagcctctagagaagcgtaagccaacggtttaccgttgttcttgtgccgtcaacgatcacagtagaatgagatcgctgtcggatcattacggagccccgagtttatggtgtaacggtagcacacaggcttgataggcctgttgcctaggttcaattcctagtgaactcacttgcgggggtgttgaaatggtagccaagcaatgtttaggacattgtgactgtatagtcgtatgggttcgagtcccatctcccgcaaaacttcgtaatgctccgattgctaaaggcgaaccccgttcttgggctagccaattcgtacctcgtcgactcagctcagccgtcctctctgtcatatctctggaacctcggcagcctgcttgcagcctgtctcgtggtccagattgtgacaggagtccttctggcgatgcactatactccgagcgccgaattggcttttgcctctgtagagcacattatgcgtgacgtctcctacggatgacttacgcgttatgcacacgcaaacacagcttcgctattctttgcgtttgcttatgttcacgtggctcgcggtctcttctacggttcctaccgctcaccacgggttctaccctggtcagtggggactatcctgctagtggctatgattcttaccgccttcctaggctactgtttggtctacggccaaatgagcctatggggcgctactgtaatcactagcatgatgtctgcccttccctgggtagggggtgatctagtggagcttatctgaggcggtttctccgtatctaacgctactctgaaccgcttctttgcgctccactacttgtttcctttcattctcgcggctctcgctgccgtgcacatgctaactctgcacgagcacggctctggaaacccgctcggtctggactcgaacgtcgaccggctacctatgtcaccttatttcctatttaaggatgcggtgacaatggtgcctttcgcccttgtcctcgtcttgctagtttcttttgctccgaatgtcctaggacacagtgacaactatatcgaagcgaatcctctggtgactcccgcttctattgtccctgagtggtacttgttgccattctacgcaattctgcggtctattccagacaagctcctaggtgtccttgctatgctagcagccctcctagttctcttgattcttccattgaccgatactgctcgaacccgaggcgctcgcttccggcctttggcacgcttcgctttctggtccttcgttgttgttttcattttcctcttgtacctcggagcctgccacgtggcatctccttggatcgaggttggtcaagtgttgacggttctctacttcggctacttccttgtcgctgtacctgctacgggtgttatcgataacacccttgctgatatcagcgtctcggagtctcctcggtagagcccgacaagttcttcggtgaaccgctatttgggctgaatcgtttgagtgattcagtagactaggagaggttggagcctagtccctctgcactgcgcctttgcggcttgtactcttagcaggacaggctctaagcctctctgtctgggatcactcttgtggcccaaatggggttcgtttaggcccctccccctctttgtgctacagcctgctgtagcctttgctctcttgtagaagctatagcagcagtccactggtgttcgatcctgctgcttaatttgcctgcggcactcttttgtgcttagctcggcttatttgctgtgagcctcgtctcagcccttttgggtctgattaacctctagtggagattcttcggaacttagagaagtcttcaatcggctttgcttcggcatgtcctgcgtaccttagaccgcctctcttcgcctttagtttagttttacttttcttaagtccgtgaagagggtctttgtatcgcctgtctgcggctataagctaaagctggttcgagtttggtctacacctgttaggtagtgtagaagaatagacaggaggtgtttgtcttgt

SEQ ID NO: 9 - DNA, 2165 bp, Xanthophyllomyces dendrorhous
acggcgagcaaaagaccgtatagctctcacaccctcaaaagacacgggtgtcgtcgcaatggagattgtggtgcctccccgtgcacgttacgcaagtaacgggtcgtcactagagatcataggcttggagaagaattcatctgggaggaagtgctcatttagtacattggtagtacacctctcttgtaaagaggagaagtaggttcaattcctgcaatgagcacggtgatgccgctataggcgaggcagagcttttgctagaagcttggactttatgttcttaggggttcgacacccctcatcactcttctttccccaaatgcttataatttccttaattgcttgtgtagcggcgtgaactgcgtcttcgatcgatgctcgatctttctcgcagtccgccatttgcgcactcgcaattgcggaatgactcctctttgagtcgtttgcatttgggggatgggctccgatcgctattgttgctatcggagctgtcttcttgggcgcgtggccatcgctgcgtgtcggacaagcgattgttcgaacaggatcgctgtcccttgcgatgctcctctttctactggctataatggccagcggatgtatacttctttcagctctcgattctgcgatcttctacttgactctcgagcttcaatcgtactcagctgtccttatagccagtgcttttttggagtctgagcgatcagcaagcgcctcccttctttactttttggtaggaggctttgcttcgtccctcatcctcttgggtctcggtctcacttacgctgcgacgggttgtcttgccctgagcgttcccgagacagtagaaagctcgtatggcttgagccttctcgctttaggtttattgatcaaactcggggcagccccagtccactcgtgagcccctatcgtctatgatgatgttccatcaatcatagccttggtgctcgcttcgttgcctaagctcccccttttgtttgctctttatctctgggcagctgccgcgccttctcttatcctggtctcggccttagcttcgcttgtcctcggatccctcttaggactctcgcaatctcgtgtcaagcgactactagcgctatcttcggtaagccatactggctttatcctcatagctatagtcgtgcttgacctcggtagcttgagcctctatgcgggacagtacgtcctcgctactatttgagccttcggcctcgttcttgcctttggctatacttcgccccgtcttcgtggagacttcggttacctagccgaattccagggaatagggctagctaatcctgcgcttgcgacgggtctcgttttagttcttttgaatctcggtggcgtaccacccctcctaggcttcttcgctaaggctatagtgcttctcgtttccctcgaaaagggagccttagctctagccgggttggcttgcctaacctcggtttgatcgatggctttctacttgcggttcatttcgcatttgctatttgtgtcaccgcaatcaagcgccatctttacagggactcctgtgcgcgggctttctcttgaactcagtctcgcaatggcaactctcaccgttggtgcttcgtgctacggtttgctcgtccttgttcaagatgcgctccgcttattgagatgtctatactagtttatgttttcttggtacctgctcttggtgttatccttctcttagccaactggcttttagctccgtctgtttcttacgctcaaaaagccagtgcttacgagtgtggatttacacctctcgcaggtcaaactcgagcccccttctcggtcgctttctaccttgtaggtcttttgtttcttatctttgatctcgaagtgcttctgcttatgcctttcgcacaatctcgatcgttgatagacccatttggtctggctattgctatgatttttgtcttagtgctggttgttggattcgcctttgaggttagctcgggagctatcaagttcaccgaatccaagagtcggtagccctaagactttaaggctttgtgccatagcctggagctagagaaaggtgcagctagtttgctggaagtttttagcaattaagcagcaattgcttggtctacacctgttaggtggtgtagaaggatagacaggaggtgtttgtcttaccccctcgtgctccccgtaag

SEQ ID NO: 10 - DNA, 1382 bp, Xanthophyllomyces dendrorhous
tatgacgatcggattggtcggtataggctccctatagaaagagcctatccctctagacccgatctagcgtacaagagtacgctggaggaggactctctagaggagagctcatgaacgcaggatctctggagtctatcctgcgaccaatagtcgtgtattcttgtttaataagcgttgcttattgtcgttcccttggaactcccattctaccgtgcgaagtagccgttgctactaacgcccgggcttacttggcgtagcctagaagtaagctctgggcttagctaagcgtctacgaccctttagcttaatggtaaagcccagaactgttacttctgtgactacggttcaattccgtgaagagtctttgcaggagtggcctaatggtaaggcactctgtttcggccggagtcatggtggttcgactccgtcctcctgcaaacactcggtagcatagtggtagtgtgcgtcttttgggtagacgcgattcaggttcgattcctgaccgagtgctcggcactaggccactcattattaaacatgttttacttactcgcttcgctcgccgtagccttcggcattggttttgcctcatctccctccccggtcgtctcggtgttctatcttgtttgtgcgtttgccgcagtctctctatatctgcttaccctcggaatcgagttcctcggtctcgcatatatagttgtttactgcggtgcaatcgcactcttgtttgtttttgttgttatgcttctcgatcttcgagtgctcgagtctcgagaagcttcaatcgggctaagctcccgattgcccttggctctcctgcttggtatcattgctgccgggtcagcaatgctcttcttgcaggagagctgaggggcaacgttcgttagcccgtttctgtcgtcctcgacgattctttcgcttcaagacacgagtgtcttttcgctcgactcctgtcgaggactctcaatgaccctctacggctcatcttcattagccctacttgcaatgagtgctctgctactcattgctatagtaggcccaattacgattagccttctaaggtcattggcccccctcccccgttttcttctgctgtgactatcacagacgtcttgtcagcgtagctaagctacgcctcctcggcgtctcctcctgccccagcaggttgttcgcagctatcactgcgtttgttagcttttgttgccactgggccttctaggctaatcgtaatttaacctagaaggcttgttctttagctccttacttttgctcatcgtcggctgatcctaatcgtcagctagttacactaggcttcctcatctgcctcctattcgccttccggtgtctagaatcggcgcttggggataatgcgaagggcacgc

SEQ ID NO: 11 - DNA, 384 bp, Xanthophyllomyces dendrorhous
acgcctcttcagagccacctagtgtaattagcaacgcttagcgttggcatataaaactcgctagaaaatagagttgacctctactaggacattggtcctctattttcgtaagcatcgttgacgataagagtacatttagtccttgtcatgcactcattctccgctgcctaacagcgtcgatgggagtccaaagcagacaaggagccactaaatgtacgggccgagaccacaccaataaggtggtgtggatacgcaggcaggaggtgcctattcgtccccgtttatcggaaggccccactggggtgagggacgtctctaaaaatggcggaagacagacagggtctgtcggattccgcctaaaagccggagacgtactcgtggaga

SEQ ID NO: 12 - DNA, 1722 bp, Xanthophyllomyces dendrorhous
gagacaggtgatcgggcatctaggggatggcccatcgcggtctcgtacggttctacacacttagcaagccctaaggggcaagacaggtgatcgggcgcctgagacggcgaagggggcgtagtcgtcgacgccgcttacaggttctacagagtagagagccctggcgggtccaaggactagcagtcaaacaaagctagaagactagagggtccagagaggaaatctctctttatatccactctggacacttaattaccgggaggcgaagaagtggcagacgaggaagtctagtgcaactagctgacgtacgaggctagcctacgatgagcaaaagtaaggaacaaaagagaaggctctgcaggatcaataacgattagccaacaggcccgggagggacaggaaagaagcagtgggaggtaccgctcgacactttacggagacttgatgcgaagcttactgagcagagagacgatgtatctgtcgagtctactagccttagaacaagggctagagagagcctcaccaatacactacggcatataggaagagtcatacgacatcgaccatatgccagtagaggattgagctctcaaagcccttgtgatgagagctagtaagatggtatcgatagatacgccatcctcctactgcaataaagaggctgccgacgatcacgtggaacccgtgagtgccggtagccatataaaaagtagaaccgaaaacaccgtcgctcagagtaaacgaggtatctgcatactctactgcttggaaatatgtaaacacaactgcaagcagtagagtaatgaagagaccgaagagaacgtcgcttcgggagagtcctacgagcgcgtggtgcgcgtaagtaatggctgcacccgaagagagaagcaagacggtgttgaggaaaggaagagcgtaagcgtctactggcactagcccaacagggggccaggcagatgcgagctcgactacaggcgacagagcgctgtggaaatacgctcagaagagcgataggaacacgagaagctctgttacgaggaacaggagcataccgagacctagtccattctggacgtcgagagtgtgatctccgaggaacgtagcctcgagagttacatcgcggaaccacagcgccatagtgacgcctgtaacgaagagcccgagagcaagagtgagacctgctcctgagacgccgtggaaatacccggcggcagagagagcagtgttgaacattgcgaacgaaatagttaggggccatggagatagcgtaacgagatgagacgagtgaagcattgacaaggcacctagaattgaaatataaatcaacagagcctaagctccggatggtaattcaggttcggcagaagcaggagtcgaacctacaatacggagctttggaggctcgcgtgataccggtttcaccattctgccgggtgctaaacacccataagaacccaactagggttcgcaataacaatagcacccgagagcaagtcccagtagggctaaacgaaataacacagcatagtggaacactatgccataatgaatcctttcctcggtactcccattgaggaaagtactggtacacagactcagagaaagctggtttcttgaggctttctctctagtggcctcctttcaagcgtactcttgtacgcacgatcggagctagaggtacaggtctctttctataagggagctgtaccgaccaatccgatc

SEQ ID NO: 13 - DNA, 665 bp, Xanthophyllomyces dendrorhous
tctgcactctgcactctgcactcagcggtgtccattctgcactctgcactcacctcagatggtccggcagctgctgcacccagttgttcagactcgagtcgatctcggccacgatgctgagctgtgcttcgagcgagtggaagtctttgatgaccttggacttgttgatcgcatactgtgtttgcacaggccgtcgtcagacaagtagcacatcagacacagcacactacacacactacacacactacacacactacacacactacacacactacacacactacacacactacacacactacacacactacacagaacagacactcacaatcgtccgcagacagtacccatggatctgcgccagcttcagcagctggatgaaccccccgatcttcgacggcttgccctccggctgccggaacgccagccccggctcctcctcgttctcccagtactcgtcgtccacatcgatcgggtagtcgacatcgatgtcctcgtcgtggatcgccagcggccggcccgtgctcccacagagctcccggtcggccaggtagagcgcccagaacgcccgcttcagcatctcgccctccgcctttggcttggaccgaacgacatgcttcctgtggacgcccatgtcgacggccgtgcggatgcccatgccgata

SEQ ID NO: 14 - DNA, 569 bp, Xanthophyllomyces dendrorhous
agagagagacgagagagagagacaagagaggagtgacttctctgtgttcgctctcgctctcaccctgctcctctctctctctccctctccctctctcttttacaatgacagtaagaacagtaagaacagcaagcaaagaggacggcaagagcagcgaggacgcgtcgttccttctcctcgtgctctgtctgcagccagaaccaggacgactgaccgctcagctctgttcctgaagcatcaacacgaacaggatgcgcatctctttggccggactgaccgcctgctctttgttcttgtgcttttcctaacgtgtctccctcctcgtctccctcctcgtctccctcctcgtctccctcggtctgacctcatgctgcagcttgaccgacctatcctgttcttcctcgccttccaagcccttctgctcttctaccacgtccgagagagcttccggaacagacgagtcggcatcactggcagtcgccaaaacggcttgtcgaccctgacgctccccagacggagccatgtggtcatgcccagaaggatggcgcttagctgatggccgtccgtcc

SEQ ID NO: 15 - DNA, 320 bp, Xanthophyllomyces dendrorhous
tcatcgtctctctgccgccggcggtatcgtccgcccctccctagaagagtccttccggtaacataaccttctgaagactcttctagcctcatgtctctatgacctttctccttacaggggatcttttatcccctttcataattccttttcttcttgccgagctgcccaggccgaattagggctccgggtccctgattcatacgggcaggagagaggcgctagtagggcccccgctagagctgatttcctcacgcaagggagagccgctcgctgtgagcaactgcgatacagagcgaaggctcggggcctctccggttagg

SEQ ID NO: 16 - DNA, 1859 bp, Xanthophyllomyces dendrorhous
ccccttacgttgtgtccaaatgtttctttcacgagatgaacgatctgtcaaattcaaacgatatcgagactacgggtccgaacgtttgctaccaaacacctgggttgatgcgtacccggtttgagagacagaaaaggaatcagaaatatgagcagaagacttgtaaaagttcatccgagggaacaaaactatcaacatttccacagaaccgataggaatccgacagctttcattgtgttcatcactgatagaatcacgtctaagcctctaccaaacatccagcccgtatagctaagtggttatagcgcatcgcttgtaacgatgaggtccgtggttcaaatccgcgttcgggctctttttttcctctctgctcatttgtcttttctctctatcacttcctttttgcgatccaaatttattcgcggtgtgagctgtatctgctcgtgtagtagttcttgatgctactcatgtccgatagatcttgtttttgttaggtctttctcgtcatgtttctatgcgtaatgggaactctcgaacgtgttggaaccctccgcagtcagggactaagcagaagaagaatgataatacatgagacaagccgttcaccttcgactctcgatagccgttcttggtcgacactatcgctttcgcagccttgaaaacgctgttgaaagctgacagtttaaataatgttccagttgcaatagatcggtgatcttgcagaggcaacatctggagatgatgcacgggaattaaacattatctttttacggtagctattcttttccattttctttttctcttctctctgtatcgtcctgcgataggtatattggaacatctgggtagtgatcattccggcttgaaaacaaaaccagaagctaggttagagacgagattatggatgaagaacgagcaaagaaggtctggtagaaaaactcaatcacattcatctgtctatctgaaatatactttagtcactgaaggtacctggtgaatcaatcggagaagccgaagaggaagaacggaaaatggactggctagaaggaaatcgttggagggaaggagccttgggttgccaaacatctttacgaatgcttctttctgtcatgatctggcccaggtcgaccagtacttttgagaggttcatggcttgttgctacaaaccgaacgacatggtttcctatctacaataaagcaagtaagctatcggtgaccgatgaggaaataggcagagtacggaaacagatagggactaacctcagtgaccaaatagttcttggagaaagctgagaaaagagaaagagaaaaggaaagaaagcgttgggcggagagatatatatgtcgaagaacacgaggcaaaacacgaatgccgagatgagaagaaagataaacgagaagatatgaagatacgagaatgagaaggaaggtaagaggagtaaggccaaaaggacaccaagactaacagccacgatggagaaaaatgtctgttcagatgttgaatgaaacagactgaggcgaagatgaaacaggatgattctaagaaatcaccccaacacaatcaaccccaacagatgattccaacactcccactcatcgttgctgtttatacaaagatgtgagtcattgagaaaagacagattgtcatgatcaaatccgggttgactatcacagggctactttgcgcaacgtggattattcttgacacagcgtcggttgaagtgcagaacgtaacaaaaagctacagatgaacagacagaaaagctccgagaagtggaagtagaagtagagatagaagaaggagatagagagaagaactaggaacacacctcagtggaccagaatggggttctggtgat

SEQ ID NO: 17 - DNA, 346 bp, Xanthophyllomyces dendrorhous
gcgctgcgcgccgccctctcgctcgctcgcctcctcgcgctcgccccgcctcggcccccgcgctcgcacatgcccccgcccgccccctcaggccgaggctctcgccacagacccaagacaggcgcacgcacgcacgcgcagctcacaccgcgcagcattcgcttttctagttaccagtctctcgctttctccacagcgacgacgtgcaactttcgctggttcccacggtgcaagtgccgaaaaaacaaaccgagccgagtagtgttcagagtggtccacacagcagtgcacacgtggacaggcagaagcaagtgcaaaaaagagatgcaagtgcaaaaaaaaaaaa

SEQ ID NO: 18 - DNA, 375 bp, Xanthophyllomyces dendrorhous
agagtagaagagaccactcttctactcttcctcccagttcctgtcgccccattttgcaaatgggggggagaaaacgacaggaaggggaggaagagtagaagtggccgggagctcaacagggtctcctgttgacccaagcgagagtctctttcgtcggctacgcctcctctttcggactctcttttgggtcgagaccctggctgagccccattgaccgtccctcctttaggcgctgcctctatcctctctcctgcgggagaggagaggccgctgcctcaggagcgccgctcactgggccggccatggctcttcttgccccggacctcacttcgtggctcggggggcccgtttctggcctctgtctctccttactac

SEQ ID NO: 19 - DNA, 510 bp, Xanthophyllomyces dendrorhous
atccctgctgggtccactttttgccgtccggtcggaagcatgctgaccggcggccacccgctcacagcctaccgcacgacggagcaggctgcacacgactgcgcacgactgcagacgactgcagacgactcgaccgattcggcgtgcttgtactagtcctcattggtcaaacggtttacgatatcagcttttcacgctgaggacccgggttcgactcccggatggggaacgatcctttttgttttctccccgggctgcctcgtctgagggccagcttgtcggcaggcatggtcccggtgtcgcacgatcgggctgatgggccggccgaccgatggacacacagcggcgggcgggcagacggcggagcgagcggtgcctggtcgatgagtaggatactgggcagagaccggcagtcatcagagttgcatggtgtaacggttatcacttgagtctaacacactcacgaccccagttcgactctgggtgcgactactctttttgttctttttg

SEQ ID NO: 20 - DNA, 1201 bp, Xanthophyllomyces dendrorhous
gctgtctgtgctgtctgtgctgtctgtgctgtctgtgctgtctgtgctgtctgtgctgtctgtgctgtctgtgctgtctgtgctgacgatgcgctctctctgctcttgctcttgcgtagtaacaagcttcctctcgtcggaggacacgaaggaacaggctatgtcgctgcgatcgccgacaacacgagcacccagctcaaggtgggcgatgcggtcggagtgaagtggctggcggactcgtgcctggagtgcacggagtgccgacggggatacgagtcgtgctgccagaaggcgctgaaccacgggttctctgtcgatggctctttccagcagtgggcggtctcttacgccaaggttagtattatttggtgtctatagtgtgcttcagagtactttagtatgatacgcctcgctgaccttggatcatgcctgccttattcagcacttgactcctatcccttctgcgctgtccctcgactttgctgctcctatctgctgcgctggagtgagttctcttcctcccctttgttttcttcttttcgccatacacggactgaccgagcttgctgtctttctatccctctctccctctctctgcctatctctgcccttaggtcactgtctacaaggctctcaagcagatcggcggtgccccaggagagagtgttgtcgtcactggagctggtgagttatgttatcagacgtgctgcttgcatcgcacctgcaggcccagctgacatagttgcccactacaggtggaggactcggccatctcgctgtgcagtacgcaaaggccatgggctacaaggtcatcggtatcgactctggagacgccaagaggaagctcgtcgagggctacggtgccgaggtgtttatcgactaccagaaggaggacgtcgtcgcggcgatcaagaaggtgactgacggcggggcgcacgctgcggtgtgtgtagcgagcggtgctgctgcgtacaaccaggcgctgtcgtacctccgaccacatggctcgctcatctgtgtgggtctgccgaaggaggcgtacgtgaacgcgaacatcttctttacggtgctgaacgagcaccgggtgatcggatcgtatgtgggcaaccgacaggatgcgatcgagtcgcttgatctggctgctcggggtgctgtgtctacgcactttgaggtacagccgatggagaatctgaagaagatc

SEQ ID NO: 21 - DNA, 372 bp, Xanthophyllomyces dendrorhous
gcagaaaagaagaacaccgaaggaaaggtcatcagaaggaaagtccgttttgttgcgcaagggttcagtcagcgacctggcgtcgactttgacgagacctacgcacccgtcgtcaagtttgctacccttcgtttactttttgcgaaagcagccgaacacgactgggacatccaccagatggatgtcgagaccgcgttcctctatggggacctgaaagaagaggtgtatatgcggcagccacctggcttcgaagaaaagggaaaggaagactatgtatgtaagcttcacaaaggactatatggcctgaaacaggcagcgcgagaatggaataacaagctccatacctctcttgcttccataggcttcgtccga

SEQ ID NO: 22 - DNA, 410 bp, Xanthophyllomyces dendrorhous
taaagatacagttatcagcttcgatcggggtaagtccaattgtttgcagaaacactgccatccggtcatagaacgctttcggagactgacgcagaccatagattgcattcgtcacatagcacagctcgtcattcgctgctgcatatcccggaggaggcgtcatccagatcggttcatccagcttggcgtataggaatgcagtcttgacgtcaccttgtcggatagtgaggtcttcgttcgcgatgatggaaagaaaaatgcgccgggatgtgccgtcagcaacgggtgagtacgtgtctccgaacgtgccttcgcgctgcttgaacccccgggcgacccatctggccttgaacttggcctcgtgactgatggccgtcgatgaacaagtgaagtcccatcgaccagacacg

SEQ ID NO: 23 - DNA, 543 bp, Xanthophyllomyces dendrorhous
  misc_feature (474)..(483): n is a, c, g, or t
aacagtcttttgccagtcgactcaagacagtcgaggacaggctagaggctcggctgtgtcagtcccagacgtgcgcttctcagccggaagcaatgaaggtctctgacttgtcgcttgacctagagaggcagtcggagcaggttgagcaggttctgggcaaacgtgctagaaacacggtcgacatgtctgcgcctgtgtcttctaccttgaccggtggtaggtcttatcctgacaggcaagcttcaactcccacttcgtccggtttgtctgatcctgcactcccgactcccatcccctcttccgcggccttctccatgcctttctccacagcccgcatggatgcaaccggcctggatgatcaccggcagaaacggtcgagggtcgtcagcctggcagtcagcgagatggaggcgggcgatatcgaggatctgttggaagacgtatctggcgagcctagtgcggctagtgcggctnnnnnnnnnngatgaggatgacgggcggccccttgcatctactaacgattcattgatcaagtctcccatc

SEQ ID NO: 24 - DNA, 372 bp, Xanthophyllomyces dendrorhous
atgtcccatccgtctgtgaacgagatcgatctcgatctccgtcttgcagggcaccaccgaagcagccaatgccggcggccgagccgtcacatcgagcgaccacaggctttgcaagtgtggtgaagcggtgagaaagatgccgttcttgtctctgaacacgatccgatccatgtcgccgctgaaagtgatgcctttgatccggcaaagctggctgagagacgagagatacaagcatgtcggacgacatccccagcacatggaacacatcggtcagtgtgagtccgcactgttcgtcacctgtcgctggcttgctgagcaagctgatctggcctcgaccgacgactttcatcggctggccgttggctacgtgaa

SEQ ID NO: 25 - DNA, 37170 bp, Xanthophyllomyces dendrorhous
  misc_feature (19727)..(19736): n is a, c, g, or t
ggagaaagcaaagagatagagaagtgaaccaactcgcatcactttacggttgatgtctagactgctatatccaatactcactggtttcccaaaccatatacacaccacccaggtgtttcagtaaaatggattgagaaaccaggaaacagaaggaaacccgctagaaaatttatagctcttcggagagagagccttgggactccgcgcaaacggaagtcggaaggtgatgcctcaagaatagataaaaaattacagatggaattatatcaagactgctgaaactccaaaaatcaaactgacaacgacaagatactataaatgttgacactattcaattcatcgcagatcgtatagtatagtggttagtacttccgcttgtggttcaacttgtggaacacaactacgcggacgacgggtgttcaattcaccctacggtcaactgtacatagtttttcaactatctcttctctgaggattttcctttttgacgaagatgttcatggtcgaaccacttgagtgtttttgagaaaccattgaaacaatatagacggtatatttgattagggcagatatgattagaacttcaatggttgtgaatgaagagtttgtcttttcgtttttctgtcgtaacatgatgatgagcaatgcagtcgataccactcaacccgtttctcaacaaaaaaaatcatacaagtagacatcttgaacggactgcgagagacatggataacattaatacagatcagagaggtgatcgaggcggttgagaaaaaagatatgggaaatgtaacgaaacatagctatcttcttaaggacaaagatagttagaaaaattattataaaagtccagatttaaggggtccacaaaagcccaagtgacgagaagagaaggataaccgggatgctatctcctctttgagttggcgttgtcgttgacctttctcttggaagctgctccgcctcctcccatgtcgcccatgatttctctctccaactcgtccaaatccatatcgtcatcctcctcctcctcttccgcctcatccttggaatttccagctccgctgctagagctccactgctgctctttggcagacttaccatcctggctcgtcctcatcttcgtggccaatattcttttccgctccaactcttcttgatggtgggcttcgagctctcgctccaactcgtcatcctcttcctgggctaatcgtttctccaacatcggcacagactcttcgcccttgacgaacgatcgtctattggatcggccctcttcggcattcttggcttcatcgtcattgttattgaccggttggtactctgctggaggatgaggaggtttgatcgctttgaaatatgcgtagagtgccgagccggtcacgatgaatgtcagagaaatcgctcgaggtctgtcagttgaggtcacaaaaatcggccgcaaaagacaagatgatggaaagtaaacgataattagtacagagcctctcagatgccttcgaaagaaaatcagcgggtttgagaaaacaaaaaaccaaaaggacaatgacaagacttacacagtgagcacatcaccaaagacagcgatacccaagatggcttgcagaacggatcggacagcctgttgtattgaatacagaaggaaagaatttagatgcactagaagatgaattcacaatcggaaggaagacaagaaatccatacggacggaagagaacatgtgtgtaacaggactggtgatggtgatggagagtaagccagccatgcagatgaagaaaccgaacacgctgtgagaacaaaagtgataagagagaaatttgattgagtatcacctcgaagctagctcatcaattccaatagatattctgtctcacccggtaacaaaagatccaatcaagaacgtgcccaagctaccgtcggtattgttgatgaggtctttccagagccaaatctcaccattgagaatctagaataggcaattaaaatacaacaggtctgaatacgtgtatggttcgacagctacagacaataacaacaataataacagcaacaacaaacacgtacaaggatagggaataataatgcggccgacagaaggtttgtgaggtaggcaagacttccgaatggcaaatatcacatggcaagaagacttgtttagataagcagcaaaagaagtggcatgtgaacaaccagacttactttgtgacaacgccagcgttcatatccttgatgtcgacatgacgcatactccatttgacaaggatagcgtggatggcaatcatgagcgcggagacaaagccataaaggatgccgaggtgggtattggtatcttcatttgtaggtgaggcagccgagggagtgattccgtagaagaaaccaatggaaacgagcacgcaacagaaagttgtcatgtgtggcggtagttgtcggagaagtgctgaggaaagggcgatggtcaatggtagaaccatgcctctagcaatctaagggatgggaaagatcagtatgaaaacatcagcacatcattccagaataaacatgacgaagcgaactgtgactaaaatgcatattggagggcctacttggaaataactagcatcgacgagcttgagacagagtgtgttgaagatcagaccagcgatgttgacgacgacaatggcagcgattgacttgagaagtttgctgtcggtcgaaggtaatgtcagccatccaaagagacagcacatttgaataagaaacaccgcgatcaaaagttggaccagaagaaatgtcaatgggagagacgatgcattcaggacctgtgttgggatataaaccaacgcgttagacacgtaggacggatactggtacaacggccagaaggatcttacccatttgttgctttgtagtcgaacggcatcaaagacgacaaattcacggcgagcaagacagaagaggcagagcagattaatattctcttgttgtgaatgagcaaggtcgtgttcaatagatttgaatagcgagagaaaagaccggctaaaggcttacacaaggaccatcaccaacgctgctatcatgtagaacgtgacgacggcaaacacctgaagcctagtagcttgatgttttgagttttccatgagtgactagatagacgatggatgatgggatgtgctgtatggatggctttaggagtatcgacacacaagtggccaggtgtaacgatcggtgttgatggaagcgaaagaagcaagaggaaaaactctatcgggttttttcagacacacgcccagcgatcttcggcctcgaccgagtaaacagttatgatcattcgatgagactcactacaatcctctgtagtgcatgccagatttttctctattgttttggatctcgcgaatcaatacaaaaccggccggatgatcgtaatatgtctaatagacagacttcttattcgtggcccacaataagcatttcttaattgtatactacgatgtgtcgtatacattaggcatggtctgcactgcttcaatcttttcttgaatcacgtgatggaaaagtgggttctgttcctgttcccctctttcgctttctctcatgtctttcgtcatcttgcgaaaaacatcggaaagcatcataggcgtcgagttgcaatcttcaggtttacatccatacctacatacctgtgctccctcaatctccatgtccaagtctctgtcgaatatcgtttacccaaagatccgctttccggaacacacctctagatcgtttccccctcatctgcctcctccgcatattccgcttgagatgtttccggactttcgtccagagcaggtgcgttctctctttccgctattcgcaacattttttcttcatcctgatgccggtcactgattccttcttaacctttcttaggccttcttgcgatcgatcaagccatttctcaacccgagaggtccaaatgagccatcggccaaagcagacgcaaacccgttcaaagcggtagactggcatgacgaaactctcgagatcaactggaagggactctctgtattaacactcaagtatcaggtttgttctggcccgctcttcctttactatatttgaacgacttttctcgtctccttcaacctgcttctttccggccatctaacgcggtcatctgttctatcgctcgtacgttaatgcaggtcatccaaccgtacgtggtcggtatcgccacctactttgctggcttgctcatcgcctctttcagagcttctttaaactctctcttcgtggatgcgtccagatctgtggcgaaagcgctccgttaaggggaagagaatagatgttcttttttaaataaaaaaaaaatcttggtgtctcattcaaattcaagccgtacttggaatcctaactgcacgcgccaaacacagaaatactcatccgttgaacagacaatgtagactagagacattgaagaaagaaaattatcttccgaaccctctttcaagaaacctttgtcccttcttctttctatccttcttcgcttgacaattctttcattgttcttctggatccggctcacgcgtcatcatctttgatctcttccaccgttgccccagcatacgtcttcctcgttcctccaaccttctcaccatcggcggcaacaatggacgaaggcgtggatccagaagaagcgacggccgaagcaaacgatttcttttccttcttggacgaccttgttcccttggaggatgacttcttctttggtggaatgtcccaaccccacaccggcgtccaggagtccatctgtagattgggagacaaggattctttagccttttagaacgcactcgcaacagatgtaacatatgcaagatagttgagaactcacaaagctgacgtcctcaaacaagcgagggaagatccagattccaggacgggcgacgaccaacgtgatcacataaaagatcaatcggaagattgccagtacaaagaacgcagcgagcagcatgaggattccaattgatagataccacacgcccagccgcatcgtgtacggccatagcgggtacagtacagctgccaacatacaggcgacctgtgaatctcaaacttagttctacgttcgaccaagcctgagagtaaaaaaagatacgaggggcgcaccatgccgaaagccgcgatcatcgtccaaagctggcttccttcatagaaccaggcgtaatactcggatccatcaggagaaaaggcctgttgagggttgatttggatgactctgggagagccttcggccgatcggttgactcggagaaagaacgcgctttaaacaacgtgtcaagatggcagatgatggtaccgaagagggaaataatggggagtttagggaggaaaaaaagatgagcagaaacaaccgtacgagaagctatcagttgaaagtaaacaagtcgctggacgaagaaaatgcctggtcgcgtgagtaagaacgtaccatggaatgatggagtgcagcaacttgacggcctcttcctcggtcgtcactttgggcacgttcttctgttttgcgtacagaggtgaaagtagggctttgatagcattcttgcctggaggaggaccatgagatacaaatgcaaggaaaaagtcatcagcttatcaagtataaaaggtgggtctgttcagagcctacgcgaacctttgaaatagtcggttcgctttccattgagcaatccatttctagatttcacaccgttcttgcttcgtaagaaattaacaacgttacgctgctccgcggtggccttaagatcaaagttacaaaaagtgagttcaaagtttgatccggctcatcggaaaaaggagggaaagtcacgagaaatagagaaaaaggaatactcacttgttttctagtaagaatgacagcaatgaggaatgatgtagcatcggtcagatctggaatcagtctctttaaagaagcaaagaccataagaggaaagagaacctcactgttgttcttccatcattttgtcgacacaacagaagaaatcctgaaagagaacgaataagggtataagaaaacgagaaacagaaagaagtctagatgaacgatcgtcaataattcaagatgaattggagaaggcgaaagacgccgacgtgtctgattcctttaaccctaatcaaagaaacagttcacgtttgcgcgtatctgcatcgtcatccagctgtttcaacttgaccaatttccttgcttactcctttcttccatctacagacaatgcagttgacctgatgaaccaagaatttgttgcaaagagcagcttgatagatctgaaaacatgaaaggaggcactctcatcttcagctagcggatacaacatatacatatatctaaggcagatagtctcttcctaaagcgattcgcttgaggtcgacttcgacttctccagccagacctctaaccgtcagatcctcatccgttgctctcacataaccaacgaccctcgccacactcttccaaatgtttgtttctaccgtctgatcgtcttcgttaatgtccgctcggattgctgccgaaaggaaatataatgcagatcgacgcagaaccggatgttttgggtttgacagtacaggggagatgtcggggattgattcctccggaatcagatcaggcgagccttcttcatcctcctctccgcctctattttcttccacttccgcttcagaactagacttggaagctgataggggtcgaaccatagcaacggtttcaatttgtagaagatctgtacatgccaaaaccagatcgactaggaaaggcttcgctgtcaaaggtgaggtctttaccacaagcgacaatatggccaggctggaagaccgaagagctgtcgggagatcggacgcgcggaacacaagtaacaaacgtggaacgaggacagaaccttgaagataaattgagcggtatcagaaagagaatgatcagctcgattgtcttgatagatgtgttgaacaacaacaataacaacgataacaacaaaagcatactcactatagatgctcagactttcatctgatctctcgatgactccacacagagcctcgcctactcttaaccttaggtccaattctaccctctccatctctacatggccatttcgttcagaacctacacctctgcgcttgcttccaaaatctaacgtcccttcccatccatcatttcccacccctttcgcgtacacaccaaccattcttccgagtacctccttcccccatccgtctactaaaccagctagtcctttgacggcgttcaaataaacatatgagtccgagtcctggatgctttggaggaagacatccaagattcctggaatgagcgcagggggtaaagatgcctctggatttggcgtgccatgcgttggacgctctttcttctgtcgagatggaggaaggacaagctgccggagcatgatcaggccgtgtgcccgaacgggtaccaaaggatccgagacaagtttcaaagcgtctctatacgtctgaagcgccttttccatctcaggggaatctgcagaagacgaagaggatcttgaagagcgaaatgaggttgttgcttctcgtacagaaatgatgagtaaagcttctttggcaagatgacggacggcggggagattagagttgatgtgacgttcgagcgaggccttgatgataagaagcagaggagcagatttaaaggagagagtttcgtttcctgttataagtggtacagatcagcacggttgaacccaatgtcatcttgggagaagcagaggtttgataaaatcacgatttaaaaaacgaaccttgcaacacggccactaggagtccaatcgcagtacctacgattccaagtttaccctgaccaacttctccatcctcgttttcggcctgttcaccgctttctaccactggtttcgattcagaaaggccaaagacgccagcttcaggatcgtcttccaaatcaggcagatcgacttcatcgtcactatctaaatcatcatcctcgtcatcgtcaactcttgctcctggaaccagtatttcgtcatcaacaatttttaaatcagacagagtcaatccccctaagccgaacttctgacgggctgtgatcggaggcggaggatgttgagtcgggacaccattttctaggacaaagctgatgaaactcaaaatccgactctcctcccctttgacgaggtcttcccccatagcttccaccatctgtacaaccatctggcttagaagaaggagtgtcttgggatcctcatcctctcgggaagtcgtggacgatagatgggtcgatcggatattgtccagaatgtgtatgaagaagttcccggcaaccgctggtcggttcagtgatttgaggaaggaggtgaatagattggggggagggtgaggagagataagagagagagtttcagattccaaagaaactgatccagggtcagccgacggaggaggaagtatgggctgaggcctgaggtgatacaagtataacgcaaattggaatttacatgcttcagtgaaaaaccctcgacacaatagcaacgatagtcttaagaaagacacaggtagactcacactccccaagttactctcaaatcttcgcctccaccttcccagaaccattcgccttcatcagtttcacttcctggcaggactcctggctgcccttcccagcccctgcccgctcgaagtacaacttcaaggcccctaccaacgtcggcctcggagaggaccttagcccagcttttcaacatcgcgccaacttcctctttgagtactacatccgctgttttgttctgcagtaaatgccagtatagtccgaacacttgaccgatgatcggtctaagcagcatagatttctgagttgatgtggaaggcggcgagagaagaatgagtgggatcatcgaaagaacagattggagaggggcttgagtgaaaaggttttgactgggctgaagaagtggggcatgtaaggaaggaaaaatcctagaggattgcgcgggaatcagacggattatagtggtcgaaagtggcctgagataagtagtgggcgtattcgacgagatcaagagagacatcagacgaggaataacttttgagaagtaggcctcggaggtttgaccggcaggaaccgaagtcaagattctggcaaatgattctgattttttggtcaagatatctccaccctcctcagaagaaccggcagaagcgttggaggtctctgaggctgatgactcggaagatgcaccaaacaacgactggagaaggccctcaattccacctggacgaaggagcgaccgagtcatcaggctacctgcagtaagtcgaagatgcttgagtgatggcagcgtctcggttgaattcgaggtgagaggggacaaaagcgacaacgtcatctgaggagagtatctttgagaaccggtcagtggtagtagtagtgatgattaccaagtcaacacgtggctcgatcgattagcaataataaccaaagcttatggaagcggaagtcggaaggaacatacgagtccagcgctttaatcacgagccccttcagctcattactgtcgatcaagtgtgagtgatcccaacctaagctgacggccatttttagtatccctctgacgatgcctccatccctaatcagctttccaatatccgttggaggtttactgagcgccaggtagaataatcttatgagaagttgggtgagttgatgccccgcctgctgccgaatagatggcaaatcagatgatgataacaatgatggggagttcgagctactagatgtttttgaagagcgctctagtgtttcggtgccactccccacagaaggcatcgtatcgtgaggatacgctgttcggaagagcggggaaagaacctgggtcatggtatgagacaacatggtcagtaccatggcgggtgtggagacaggtagaagaggtggttctgtgggagattagtgaacatcgcgattagtgacttgcgctggtctgcgagcgaaaacggaggagaacgaacttgctaggtctaccgtgtttcctagatgctcacgagcaattttatccagcaattcaactgcccatactgccaataagcccagctgccatctgatgtgtgcttgatctgaattaaggtccgggtagaaggcttgttgaaaagaatagttttggaacgcgtcatgttgagctgaaggaaaggaatcatagaaagaatcgagcgtggactgagtgattttcggcaaccgagccaatttcttatttggcacaggataaagagctttcaaaccggtcagcaacggaagaagtgagggcaactccatccagatccaaccagtaagcgtgcgttatagcaaacaaggcggttgtggatgatgcaacagcggtgagaagtggaagttagtaagacgagaaatatagactacaattttttctaatgaatttcccaaaccggtttcgtttattgcagtgacgatatacgagtccgcgcgaggcaaggtgtaaaccgacaccatcaacacatacagaatcggcagaatacaattggatctgctctttcaacagctcatggctcacttatatttggtagatactcagactgatgctctggatcttctttgtgagttcttatagtttcatagaggccggcgtcatgaggtgttgcattcgcgtggttgctcatcaattgtttttgtgatcgtgcatacatccgtatgggtcttcaattttatgacatcttgcctagcgaggagtgagttctcgaatgattgcataccagcatgtaatgagatatcctctcatcgttcactcataaattcctttcaatcactatgacaacaacagctagagcggcaagtgatccgacatatgctcatgatatcattctctcatactgttcccgaaagatcgttcgaggcagatccagatacgaaacaggctacaagctgcatcttttggtccgatcgtgctcctcgaatcttttcttcactcttgatgaagcctccttgactgaagaaggcctattatcaccttctgtttcattcaaactattaaaacatcaactttttaggaatgggagctagtcttccgaaaagttagtttttgtattccgatatcgaaaaggacgtatcttctctcttgatcacttcaactaacactattcatctcctctgttcctcacgattgaactcagtatcctattcctgaccttggcaatcagtaagtacgacaagaatgcgcttcattcggatgaatcttggcgtcggccaaaatttatggagctcgttcatcataaatcatttatgtcaccttgattactctttctcaccacttctagagtccttgaggtccgggaaacactaggcctcccagaatctcatatcttccggcgatcatcaaatccctcccaagcggcattaaaccacgagtctatacgcttttcttcggctagtattgatagacgccgggccagtgacgcccaaatacctattcatcgcccaaataacttctctagagcgaccactcctgcctccacctccattgcccgcccgcctcggccacccgtagttcgagcctcggaccgtggggatggagcaacaactcctcctccagcttacgaacgaacggatcccaacccagactctgatctagcttccgctatcatcgccagtctgtcagtcgagcagtcctcatcgggtctcagaccaagttacaatcctccttccggaccgccaccttcatcgtctacagaccctggtttcatctcccggaggaacgtaggaggacggtcgttggaagacccgttgctacttctgtcaacgtaccatacttattttctgttggatgattcgacttccatgcaaaaggacgatcggtgggcagatatggtcaaagccatctcttctgtcgtgccactcgctgccaatttcgatccggagggcgtcgaacttcattttgttaactcgaaagagggaagaaaaggcgtcagaacggaggaagaggtcgaagatgtattcgcgcgagtaatcagacccgagggccatacacgtatgagcctgaaactggacaccctcttaagaaactatattgataggctagaaagtttagaagcaggccttcgaccattaaatctagtgcgtcctttgtttctccattcttacggatgttgggaatgtgcgtgctgagatgtaagatgcttcttctgtgtcacgctgtttgtcgtctagatcgttatgacagatgggttcgtgaagatcttgtacctgctcaatggcttcagtctttcttacatatatcagctgttcttctcaatttacctcggttgctcttcttgacgaaaagtgcatctttgcgggcttcgtcgtcaaacaccaatccattcgtacaatcggagagtcctgaggcaagtatcctttccctctccgctcagatcctcatatttactcgaatcatcctctaatcatgatgaacctattcaacgctcctcagtctattattgcagctgccgctaaacggttggatcatgggaactatccctctaaccagcttggtatatttttcctacagatcggcgtgcgttgcttgtcttctatcctcacagatgactccatacgatgctcgatacaattgataaactgatgcgtttgtatctcatggaattgcaggatgacgcagaggctagggagttcctacaagacatggacgactctcttccatcccggcataatgttcgagtaagcgatcgtttatatacgtatccgcctcaatttcagcctcgaaaggataggcatgtcctgacgatattctttttatgtatctggtgttgtttaggacctggttgacacaatctcattcaatgggcttacctccgaactcaacgcaaatgacattgaaatcgtgcgaaagattttgcttggcggtgtggacaagtaagtcctaagtctgatttcttgaccacctgatttattcgtgataagctaaatacaagtcatcaacgactgctcatcttggcaatttatttttctcctcttttcatcctccctatcgcttagacgaatcgaccgagaactatgattcttttcggatgtctgaattacaagcaaagcttcgtaggcttccaatgcctttctctcaatactcaatatgaactttgaatccgtatatgaaactcgatcgattcattcctgtgcctgttttgccttgtgcgttataattatttatctgattttgctcgcgtatcttatatgtacctatgcaacacgtctttataccctacgatttcatagtctcagtctaccgatcatgtgcgctcgttagacatgctatgaaacgtacttggccccgatgtgtttaggatacgttattcgttcacaggcaactttctggccttttcgccaacgtaattcaattcatcgatacaccgagagaaaacgacactctctctagctcatcagctgaagatgatctaacatctggagcattccaaaacaggaccacaaaggaaagcaaaaagaaaacaagaaaagtattggaaaagaactcgtcccccactcaagcaaacacattcgactcctacctagtcgctcctgtattgcctcccacgacaccttcgagtatgcgaacgacgcccatttttcttttaacgacccatcattctcgccctatctgggttgacggccatgccgacgccagcggacggaggagcagccggtgccggagagcctccaccgatccccggaggaggcatgaacggtggtcgttgcggaagtccaccttggctcaatgtaggcggaggtaagccgttgccggtcatcatgagtggaggcatactctgaccgggtgggggcataccctgaccagggggagggtagaagggttgctgctgctgttgctgaggtgggtagccttgttgaggaaagccttgcggcgggggtcgaaaaggctggcccatgtttgaaggaggatagggcgatggagagggttgattgtaagaatacgggccagggctggggaaagaagaaccctggggtcgatattgtggttgcatctgatgaggagctgcagacgggtaagcaggcgatggattgagaaagccaggtcccatcctgccggagagttgttcgtatcatacaccgttgacatgacaaataagaatcaatgatgaggagggaaacagaagacaacgaagaattgataaaaataaaataaaaaagacaaacctcatagcaggtgctccgcccatcattcctccaccaggcggtccattagcatgggaattgataatctgatcaattaggtcctgggctttatcgtgtcctagagctgtgatcgttccatatcgtaagacagattgcgaatagttcagcagaattcacatatcaagaacgactgttcgaatgctggcatcgaaagcttacaggcatagtagtctcgaacgttttgcaggtggtttcgaccagcattatgagccttccgaactgcgagggcaaaatatggacaacaagcgtgtcagtacatgctacgcgtccgtcgagggcaaagtatagtggagatgacttacctgatgcagaatcatgtgttctgtgttgattcgaatagaaagaatagacagaaaaaggaaaagaatggtgaacaattctatgatgttcaaaggccacatatatttctagatgagcacacgtacaaaaacacatcacaatactgtatgatgtaagtcaaaggcgatattagtatgaaaatgacgctgagtttcaccctaatattgacatgagacagactcacatcacagtagtacttgggcatcctgtcgacaaacagcgaacgctatagatggatggatggatggatggtgtacgacggatgagaatggatggaaagagaaaggcgggggtttgaaaattccctggactttgtttgttaggctttttcttcggaattcctaatgaccgactacagcacttttctattgtgtttctgacgatcaccacatcctccaatccaaccttcacccattctatcacatcatgtctcaactcatcggcaatccagctctgggatcagctcgagtctggcatcacgtctcggcagagaacagaactctcggtatgtttgataaaacatatctcttgatattgggagattgtagaagaaatggtactgacggccaaattgagtaatccttcgatttggttctcatccgcttcgttctatcaggtaaactcgccacaagaatcgctcaggtgcttatgggaaaacacaagccagtgttcgatagaggtagtgcgtagtgatctctttgacgaactcccggtttctaatctcgaattgcatcaattaaaccagtagtatccaaagatatgaagtcttcaggctgacaattgcttgccaaacttggccataccacttggcacctatcttttcgttggatctgactctgctcggtactcgtctcaacgatgttagacgatgttggggattatgtcgtggtcaccaactgtgaaaagttgtatctgtcgggtaacaaatccaaacaaaagacgttcgttccttctctcctcccgtctttttcactcttactgcatatcgtagcgaaggccactctttacatgagtagaatcagaaccaactgacattggacggcaatttgtacaattaaaaataaaagatacttcaaacagtccactttcccgggaagatcgaggcacatccaatacaaaaatgtctatgaaaagcgcccagaagacgtgcgttatcctcatcatatatctatcctctctataccgttctctatagctcaacagactgactatctccttctgtaacgtctgctttttcttactctttctcttctctcttggaattgatatagatcttagctcatgcggtctctggaatgttacctaaaaacgatcatcgtttctcgcggctggcccgacttaaagtcttccagggagatttgaacccgtaccagcaaaacattctcaagcgatacgacctttcgcctgaaggaacgtggtcgggtaaaggagagatccctcaagggcctggaaaggcaagtactgcattcgaacgtgtcaagaagatggaaaggtggtagtcttgatctgtcaaagtgaacgacagaagaagacagtccgagatccatataaaaaacaaatatctatatcatcatgttctataaagtgatcgattgcaaggtatcttatgaacaatacagaccaagttcacttaaaacattcttgaaaagagtaatatggtgacaattatcaaagaagaaagcatcagcctcactcggtatcactgtctctcatgtcaaacacatccgagtttgcgctttcagtccctgttatatctccctcctcggcggtggctccctctttacttgttccttccggccggctctcacccccatccgaatgagagaatgaaggaggagaagaagactgagttggttctggggttggcgaaagtgctgattgaaaggggctgtacgatcgagtgaggacctgatgtcggacatgttcttctagcaggatgcctagagtattgccaaacatgacatccagaagacaagttcagcatacccagtgcggcatattgaagtaacggacaaaaggaaaagagaacaaaccaagagcgattaggctatctccatccagcgatttgtgcatatctaacttggagaccgctctccaccttgtccgtcgtttcttgttctttttggggccagcagagtctctcagaacgacctttttcattccgctcgccagccgaggcttctttccgcgcgttccgctcatccgtggatcacagtcatcagtgtcaatggatttcggtagggtacgaggtgttccttttgttttggttgaggctcttgatggtgggcgagacagatcgctggtggaatctgggcaagattttgaagtctcggcaacggtagattgagatctggttcgtcgaagggccttagaagtttgtgttaagcgggacgaaaaggaagaaccagacgaggacagggttgatgaagaagcgctggatgaggagtatgactcggaggacgaagacgaagaagacgaagagctgcctccatcttcttcatcctgaccatcttgtccaaaattaccaccaccttgtgcaaactgttttcttctcagtcgacgccgtctcctagtttgcttattggcatgtcgtgctagacgggccatatgggcaagatattggttgtatcctagttcatccagaagagggggggattgagaagtgtagtagtgtgtggccgaatggagaattgtcttcagaagctcctggaaagttcacagccatgacattatcataagatgttgtttcaggtgcggatggatataacacgtaagtgcaagacagaagatgagacgtacagaattaggtaggtcataataacgcgctatttggagggaacaaacgggttgaaaaaaaaagaagcctatcagttgagcatcatggaataccaatggtctcaagtaaaagcagaagggacgaacgatcgggatttcgtagaaagtccagggtttgagcctttaactgttctctgtacgactttttggcagacgcccttcttgcaacgtctcgttcgaaccattcctcttcctcatcctcgtcctcaccctccgactgatccccagaataatattcatcatctatttgacgttcctttcccttagctgttattgaatgactgctcctggctttcctgatctgcctgggcacttcgtcatccatcgctccgtttgttcttctctcggtgtttgtcaatcgctggctcggtttccgagacgattgatcgcctacggtgtcccatcctaaggcattcgagaaccatggctgagcatgctgatcaagtgtgagccggttattcaaatggagctgggcgtttctcctcggtggttgcaagagggatgaaattacgtaggccgatgttgttttcgaaggtggaccagtgttggcaatcggatgctcaaaattttttcccgaaagattcaactgaggaatttcgatgggcatctttccctgccgttgttgtcaatactgccttgagataactgatgagactgactgagaacaacgggtgatatggtggattgatttaacatttctaatttacaaaattcaaacattttgtaatgtttacattatcggccgtttccgccagagctgactcttccttctgcacaaacaatcatcttgtccatacgatcatcagaactatcaagtcgttatatcatcctacttaccgtatacaacacttaaattatgcacctcgtatcaatccttgcatctttctctttggtttcctttacagccctagctcaaaacccgtccttcaaacaaccctcaggaggatttgatggaacggtacgttaatttcctcggtgtacttcccctcagcttcttatgaggctgcggagttgttcagggaattttctgctttcgaaaagagttttatgatcaggaaacttacagattgatcaaattggaggttccataggccggaggcgattgtactgttgaatgggttgccggcaactggacaagtaggttttctgtttgggttcaagtctctcttgttccagtccagtagccataatcaacgcctatccggatccgatgttgaacaattttgtcttgtttaccttgcgccatgtctgaatgaagatgcacaactcgatggtatatatgttttccttcctgctctagattctctaagttatgagtctaactagtcagttataatcctgtcctctacatctgaactggaatgctcagttgtatcgggctgtgacaacatgcccagattcttggcaggtaagtcaacctccaagattactcatattcgtttttgagcaggaccctataatcttactctacccaatgttgtatcggtcactttctctgccattcatacagctgtgcggaccaactttgatgcttcgtcaagtaggttcttgtcagaggctgttctgtcggcgttacccggattcatgacctgctcaaatattgacgtgttatattgtgctggtgtattcttctcttgttcgaagctacatcaatcacttacgactgtcctagttcgttccttcttctttaatctgctctccgcgagcataatacggatacctcggtggaccatactctgagaatcttgtgcctttgcattcaaaaatatagatgtcgacacgtcctctaccatatacttctaccggatgactgatatcaactcgacaatcacccccatctacaccgaacgtttctgcgtacgtgactgtaactttctctcgtctcttacttctgcatatcaatgtcacttcgactcttatcggctttatggttgtattacgatgtgtttgtcctcaaaagatcaaggcgaacagcagtgccacctgtggaactcctgcgcatagtacccagccctcgggaactggtgacgcatggggaacaggatacattcaaaacagtcggttagtatcagacgatgccaaatctgtgaaggtggaacgagggtgtatgactgaatcgtttgtcacggatgataatttgacgtttataggctgtctctctacaatcaagaaggcaattccgcctttgatgattaataatcccccccccccttagatgtcctttcttccatatacaaaactgctcttagggtgatcctaaaacctcctgtctttttttttcttttcttttcttgtcttgtcttatcttgtcttnnnnnnnnnngatccttcctctgcttggatacacttttttatacgccttggacgttatcattgaacaggatttgtttaacctagatagtttatcgatttgtttgctattcatgtaaatgtctacacatctatcaacgagaaagttgttcgagaagctacagtaaattgtaaggctaatttgatatccgtcgatcctgtgaaaagagataccttttgataaacttgaaggccaacttcataaaccatcaacctaactattcgcgcgaacaacaaaagacattacttctagcctttgcaaaattaagtggccagactcgatgtctttgtatcttgagatcgttttcttgcatgctctcagcgtataaccactatgatggtatcctttcgttcgctcttatcgtttcgccaagtctatcctacacgggtggatgaagtacgaaggatggacgaatgaataagctcgatatcacataagtaattcatttataatatttgattttcaacctccacgctacccaaccatcatctcataccatccttcttttctcgcctgaatctcgaactctcttctctcacacatcgatcgctttctctctctttctcttgtactctcgttctctctcatataaccccaaccatgtccgatccctcatccagcactcctctcctttcgcatcaagatcagtccaactcggtgcctccaacagagccatcaccggcagcagcatcctctgatgccgctcttcctgactcagcccccactccggtggaggaggactggagtgatattcctgatgacgtgatgaactccagcccagaggagatcaaactccaggcaaggttgattgaaaatgatatcaaggtgtgtggcaaattcaatgagcaagaaattacaaactgtcgttgatgaattggcagcatccaacgtggctcaaatctgttcttacatcaatctgtcttgatgctgactctctcttgagtgatgttttctctgtcttcatcgatttggtgatcaggtgatgcgctctgaaaatatgaggctacagcacgaaaagtccaacgtgagtaatacgagccaacgtcttgacttactgtactagctagactgctaatttaggaagaattggatgatacctcagatgctcgagaagatcacggacaataagcaaaaaatcaaacagaataaagtcttgccctatctagttgggaacgtagttgaggttcgtctattttgttctgagatgattcaggccatcatccatcttctgaaacaaacctaacatccgattttgaattagatcttggatgtggatgcagagaatgacgaagatggagccacagtaaacgaagataacaagcgatcaggcaagagtgcagttatcaaaacgacgactcgacaggtaggcaatacgattattgtttccgaatttaactacagcattgtaactgacttgtaaacccgcaaacgtagactatcttcctccctctggtgggactcgtaccatcagagaatctcaagccgggtgatctcatcggagtgaataaggattcatatctcatcctcgatacgttgccagctggttcgtccatctctgttacaactgatagttggtcgtatactgaactgtgtataacaaatccttcccgatgtagaatatgattcgagggtgaaggctatggaagtggaagagcgaccgacaggaacgtacacagatattggtggattggataaacaaatcgaggaactcgttgaagccatgtgcgtattttgtttagatcttgcgtcaaagcaaatatctgatctttatgtcgtacaatatctcaccctgctcggatggacaattggtagtgtgttacccatgcagcaggcagacaagttcaagacgttgggtatcaagcctcccaagggtgctttgatgtatggcccccctggtatgtctcatctttctcagcgcgatcatggtcgagcgtcagctaatctatttgacttgaattggcatcttctctcctaactctaggaacgggaaagacactgttagctagagtctgcgcagctcagacaaacgcttgctacctgaagctagctgggccttcccttgttcaggtaaggactttctgtcccctgatgcagactctcaggttttcaattttgatctcagtccgaccaaatctctaattcgactttcgatattacagatgtttatcggagacggcgccaaacttgttcgagacgcgttcgagcttgccaaagagaaggcgcccgcaatcatttttatcgatgagttagatgccattggaaccaaacgtttcgattctgacaagtcaggagacagggaggttcagagaacgatgctcgaattgctcaaccagctagatggatttggaagtgacgaaaggattaaggtgcgctatcacaatattctcgcttaagcaatatgatatgttatagatctcttagatcagcgctaatatctatcatcctcatgtgttcttattgttgtcatgctcttgtccatccattttgtctcaatcattcgtacaggtcattgcggcaaccaaccggattgatatccttgatccagctttgcttcgatcgggtcgattagatagaaagattgagttcccattgcctaaagaagacgcacgggcacggatcatggagattcattctagaaagatgaacgtcagcccgaacgtcaacttcgaagagcttgcagcttcgaccgagtacgttttaatttttatcatatagcgatatgtcgcatgaatagatgaaagatgtatcaagagacagaaacccaatagcgctaacgaactaatttgggtttcatgatgtgattgttgtgtcgattgtgcagcgagttcaatggagctcagctcaaagcagtctgcgtcgaagccggtacgtctttttcaacttggtctcgcaactcttcagggttttttccttcgatttttgagacgtctgtatttttgttgcattgtgttcatctgtacaggtatgtttgctcttcgatcgggaagctcggtgctcgaccatgagcacttctaccagggtattctggaaggttcgtttatcatgttcatatacagtctcgagtcaagatttcaaagactaggtcgactgatctggaaattcaacctgtcactttcctgacttcagtccaatctaaaaagaagaacgatcagtttgtgagtatcttccactcttgcatggtgtcaacgtgcgatttcctgatcaactttcttttcatccatgacatctatagtactttgcctagagagctaccacatcctttttcaatcataccacataccctctctcgctttgtccgtctcatagtcatgaatcaacacatcagcactcctctttcacgatcgcctactacattctttccttcattatatgtttttttcttcgtccatcatgtgttcactcttgctacttagagggctggaagagaaaaaaaagggattatgctctgttcgctctttcaatggcttgtctgatgtgtactaatccaaatggtgataagttatatagatagtttcctcccttggtcatgacgggcaaattgagagtgtacatgcaagaatgaatcccaagccataggaacctaagatctttaaatagtcagccaccttttgaggacatgttttgcctcgagcggggcgcccactgtgttgtacactagggagagattgtacgcggtttctcttacgagcgatccagcctgtcacgaccatagtgacaaagtgcgtttgaccgagaaatgagccgcatgaggtgaaacacgaggatgatcataaaaacaataagcaattgcgcaatagaaacatcaatgagcatgacttacgtcgtagatagattcagggtctcgactttctgcgtgtacgagtattcgcttgaagtgctttatagctaagggaaatagacctgtggtaacaatcacgaagatagtacaaaaagagggagacatcaggttgcgaattcaatctgagagagatagttattgttgtgcggttcttaccgagtctgtgaaaaagtgtcccgaaattgtactctacttcgtcgcattctggtcctcctggatgtagctttcggtatcgatcgaggaactctaaaccctaaaaatattgacagaacaaacccaatttgcgaagttagttcaatccacagccttcgacattcatggtttattcagaaaaaaaaaagtatctaacctgaatgataaaatagtttcgattatccgcttgtcgctgaaaagcacgaccgcagtatgatactgcgagtaggagacagataagcggatcttgcgggttcatgtcatatgctcgtaccaaataatctgatggtcagatgtgatatacgaaacattaaggaaccgtagaaattgttagagaagtcaaagatcggaggcacgcaagataagacacgtacatattgaactttgataacttcgcgccatcatcagcatgcacccataataagcgttcagtattggatttggttttgttggaatcttgatgatgggtcttccctcctgtacgatctctgccagtctagccgccgcgcctgatgacacaccctctcttatggtgggattttgtatcgcatgatctgaatctccatcaccatcggcttcgtcatcatcgtcatcgtcctcctcctgtcctgcaggttgctttcctatgctcgaactcttccggttcttggagggcaggtgccatctgaaccgactaggattccaaactaatcccggtccttcatgaagcggtctatcccatagtcgaagctctcgagccattgccttctgctgattataattcgaaaacgcctcggccgcttcaattccagagccgatggcaaacgtagcgatatggaagccgaggttggagaattgttgatacagtagtagagctcgtgcagcatcggatgtgttgagcgcattgttggttgccatagtacaggctacatgccgcgtacagcgaaatgatgttcaatcagattatggttatgcagcagtgactaccaaaggtcttcaaagatggacttaccaatcacgacgattcggagggactcttgtctttgtcgaggaatttggaatagagttgaccgagtgagatgctctgccacctctacggctagttctgcctcgtcgttcttcgccaacaggcagcagtactgtcaaaacaaagatatcccaatcaaattgcttagcatgttgagaaaattcaacaatatacaaaacgatgatctacctttatagctgtcacatgccatatgtcgacactgatcccgcggaagaactctgtttcggtaatcgtttctggaggcgcctcgccgtcatctaaatgaaccggttcgatcatgaacaggtgagtggatttttccttttaaatgaggatatgctatgcaagatatagatcagacggaccaagctccctctgaagacgttcagacatttcgccaacctgagcctcgatgctgacttttgctgctttagctcggcggttgaagtgtagatactgttttcaaaatataaaccaaggatgacaggggttaatataagaacagcgattttgttgatcagatactatattgataaagatgcaccctatcggaggggaagatggatcttgtttgtctaaacccttcgatgagttgcccagccaaatctatccactctttgactgattctgctcgtccagactcaacatcgtcctccagctcagataatcgctgaaagcttgtcttgactcgatgattccacgcctcctctcgttgcagccgatcacgtttagcctcagaccgcttggcctgtcggtcctgatgtttggatgttcgaaccgtctcgtcgaagaacgatccagtcgggtcattggtggacgtatcaactgcaggaatagatgtaagaatattatctcgagatgtagtatttttcggttcagaagggtcattgagaactgtatgagatatacagatgggatcaatggtcagattatgatcaagagaacgctccgacccgtttagatatgttgtgggtgatgctccgatcgtgagagtgcatgaaattagaccaaccactattaacgacctccaaagcctccctgagcatcccttttgactcatagacgccggccaatttcatcttgatgtcgagtaacgccggatcccccgtctcgtatgattcaacgactgtgagatgtgatatcaattaaagcatttgacttttgatcatcagaagataaaatatacggatctctgtcgcaagtgaatgacgcttaccgaaagcatacgattcaatagccccgtcgggatcgccgagggcgcgcaaacagtctcctctgccttcgacatgggatggatcgctctgtgaatttgttgtttaataagacaaagcatttcaaacgcattcgtaaattgcctgtttgcgtcagaaaggaagactagagttgaagacaagtacgtactgtaacttcggaaagtcgttcaaaaaactgtaaggcatcctcaaaaagtccgcgcttcagaaatgcttcacccgcttctccccagaagacatgatagacctcaggattgaggtcatgtataaatttaaaatgaatctgtgtattgagaatgaggaagataaggacatacaaaggcgatagagacaaatatgagattagagcagcgcaatctctaatcggggacaagggaacgtaccctggcttcactcaactcttccatctctagcctagcaagccctagtcgatgtctcagattgacatctagtacattacctccctcggaaacgagtcctccttctcttacaaagtcctctgggtcaaactctctatcatctccatatcgatcccaatgacgctcatcagctcttccatcaagccatctatatccctgtttgatttccctaacggcttcggcgtattcccctgtggaaaacatcaggtcgaataggatgatgagaagagagagagggaatatagtgtcatccgactcatgaagtgcagagctagaatctggatccgggtagaggcgctgttggtggtgcagtgcagagagtataagagtcttgccgagggagatctgatttgcttccacaaaagacggcgccatttcaagaattacgttcacatcatttggagaatgttgaagtatagattgaaacccctcaatcgcctattgacagagcaacaggtggttggagcatcagtgaaattaacttgatatatagaagaagaaactagacaaactttggcatgatttccagtttcacgaagtagatacgatctatcccagatggcatccacatccttcgggtcaacttccaccgcttttcgatagcagtacatggcttgctgagtggctcctacactcctgttgtgtcccggaagttgaaaattgtgagtgaaacgaactatgagcttcttgttgggtgcttaggtcacccgatttcgacatgacgaggaagctacgaacctactcttcttccccaattctttccatgtttcggccgccggcctcagatgagctgctacaacgtcacattgtaagctcttctcctcatttcccagttcttgatgacagagtgcaagcgaagcccaggctgcgtaagtggctggttcttggtgaataatatcttgatacacttgaatagcaggtatgtattcagacgagacataatgcatattcgcttgtcccagtaggcgttgaatctctggtgtaggctcaaggattcttgggccatggcgctaagagcagggtggaatgtcaaggttcccagatagatcaaaatcgagaacatctattacaataaaaatgggacaaacagcttactttacctgtcccctttttggactttccaatcccggaagcagctcttaagccggctcgatattcttcttcggcatcatccatagcagtgtcccagtcctgagtaagtaatgaggcattgttgctcagttctgatccggtcttcatggtctttactagaaggctgcatcaaacaaggccgttatactcgtcagctaagcgtaacgtagccagagcatagagaacgcgaggcttacttgaacttttcagcacctctgtcttctaaatcatcgtctccatcatcgtattctccagaaggttggttagatctactggtttcttgttcccttgcatattcgctctcgtcctcttcctcttcatctgtgtattctgattgctcagagtcatcctcactcgagtagtctgaattcgaccaaatcaatagttcaaacgtcataaaaccatacaaccatgcaacccgaagaacccaaagtacataccttgatcctccgggaacaagtccatgaaatcagcccgtatggatgtatgctgactgtcgttatccttccgattgatgtgtgctgcttgatatatacactgtcctcccctcgttcgaggtaatgttagttggcggtgaagggaatgagatattgagatgcacagccgtcgatgacatgtgcaagctgtcgccacatgcactcatgaagctctgaatcattcttccttgctcatctccagcatcatcaccatcttcttcaaatcctcataaggcgctcttcttacatctgctctgttcaggacagaggcatatcacaagaactgaagttgtttccgcacagattttgagctcaagagtttcaacatatcaatttctcatatcggtcgctcaaacaccatcattcaaatccctccaacattgcttcttcccaactgtcgatttctgatctcagaatgaatttttcttttgacgacatccagggagatttcgatgactttcaggctactcagacaggtcctcaaacacagactcagtctcaatctcagtctttgaccatgactcaagagggtatcgtggattattgtgcgtaatcttcgtgtttctcggacagtcatgccgctcatttattttcaagactaacgcgtttcggcacctcgcgctttcttctgcttccttcctttctctttgcttcacaagggggctcacttctgcttatgtcgagagcagcttcatctcagacctcaactggatttcagcaaggtctcctcagactttacaacacgaaacgcgtctacaaagttggaaggcatcatggatgtgatattcagttcgacgagtcgcgtatcagtgagtgacacgcatatttcaacaacaatagacaaattcccaagctgaacagagcgctcaattcccccttctttttctttgtaggtaacagccacctgacatttacgctgaatgattcagacccatcgggcatcatagtaatcatcgaggatcttcggttggtatagctggtgtttcgtttgaatacaatcatctcgtacctaattaacttaattgatgtcattttccgccataatcagctcgtccaatggtacttatgttaacagtacgttttattctctacctgtttctagcgagcatggctcatgatgcgtttgtttgtaatgtatagaccaacgtctacctccgaaacaaaagcgcgtcctcaaacatggagacgaaatcttcatcgggcagcgtacaggtcatacggctggtggtggagtcaaattactctatttgagtgtacaagctgagaaacaaggagaggtcagtgatagcagcgttctcatcgcgctctgaagctgatcgattaattacattcttgtttatgtattgtacagtgcgaagtcttcaatcgctgtgagaacactttcttagttcctaacatatgttttgttcctttactcatatgatgtgcattcatttcgtcttccaatcagatcacttcatgtgagttgcaatatgtttgaacgatatcagctatatgggaatactgacgaaagattgcggttatgacatctacttcttagcgaaaagattggctcgggaacctttgctgatgtgaaaagagccatcgctctcgatacaaacgaaaccgtcgctgtcaaaggtttatccagttcttccccagatgaggacatgtgtaccatccattctatattgaggctgacgagatttcgactgttttccggcttgttttgggacaactccaccatcctaatcgtatctgaaacaattgcagaaattcaaaagcacaagttcctgtcaaatccaaagacgctacagctatttgaacgggagataggaattttagaaaagcttcagcacgttcgtgtattccgacatgtatctgaggtatactatagccgacgcgtcgccactcacactaacgataatgcatcgttgttctctatcttcccattcgtcgtgcttttttttatttttaggaaaacatctgtcgttatgtcgagtatttcgaagactcgcggataatctacttgatactcgaggtgagtagtttatcaaggttccaatgaaatcatccgtgttcatgtcagttcgatatatctgacatctatcatagtatgtggatggagggaatctattggaatacatcatggatattccaggagaagctgggctctgtaagttctcatttcgcgttcccctcaagacgaacgctagttgaatcaacttttctcctgttgctcttggtgcatcagcggaggaagaagcgataggcttgaccagacagatctgcgcggcgatggcatacactcataagcaaggagtcacccatagagatttgaaaccagaagtacgtcgtcaagcacctctgttctgccgttctttgacttctcactcatgactgtttttttttaataaaaaaaactatctttctgtgactaaatgattacctttttgcaaaaagaatgtgcttctccaaaatacaaatccgaagatggtgaaggtaagtcatacagatttggactggtcttgttcaacgaacttaattttatcaatacttgcgctctgacttaatcgccattcagattgcagacttcggattggctaagatgattgacaatagcggaacgttgtaagtcttcgtttcctaatggacgcaacaagtgtcatgagctgagtggacggtatcgatatgttgcatgaagtttgaaaagcatggttgggaccccacaatacttagcacccgaggtaagctttttttgcctcatcagaatggtatctcacgaacatggtcactctaacactcctcattcaatcgactcaggttgtactacatacccagggggtgggatacgatcaggctgttgattcttggtcggtgggtatcatagtgtatgcaatgctgaccaaatgtaagtctgctttctatgatttgataaatcaatgtctttggtatcaacttcgaggattaacatgacattcatcctgttcaacgttcagtactgcctttctcggaaacctcggatgacccgatcgaggtcaaactgaagcggcgcaagctagaactcgttgatttttcaccgttcgaggatttcggcatctctgacattggtaagtctcataataactctttgacaaagatgccttctctaacagatgaacaagcacctacatacggatattagccaaagattttgtgaacagattacttagtaaagaaccccacacgaggttgtcacttgaagcagcgctcaatcatccttggcttcgctcgtcgtccgaggctgaacgccatgcaaatggaagttccgctatggccgcatcaaattcctttgtgaccaacacttctgttgatggtcatatgactacaaaagatcagcctgatgatctcagcgaacagccgagagatacatcaccaaatacgacacgtgttgacaacgaaatcgaagaggaggatgaaggtgaaatcgaagcctctcagcagttcagtcagctccgtattaaacagtcccccatacgatccgagctgctcgtagaaagcaaggtgcaagatactggagtaatctctcaaatcatagatgagactatgcttcctcctcagagtctctcgcgaccgatatcattctccaaatctcttccgacgattcccccaactccacgaaggatagttgctcatccatccgtagcaccgaagaatcctcgtcctcgagccaagcatccatcctctttcgtcatatccccttctcctcctcccccagctgttcagcattctccatcatccgcttccatagagaactctgcccctgctgcttctctccctaccactccacaggccgcgtccccgccacgtgctaggatctccacttccaaaaagatcttagttcgatcttctccaacgccttcttccaaaccgacacctcagaaacgtaaactaccaccgtcgccaccaagcccatgtgactcatacgtttcttcttcttcctccgaactgtcttctccacctccgtcttcatcccaagggatgcaacgttcatccgagccgacaaatcctttcactctgagagagagggcgccacctcaatctacaacgactaaggcaactcctgttcgatcaagtgctcggattcgagaaagggccaatggtacgcctggaaatacgttagacagggctacatctacggttgagaaggatgagggggatagaaggagaacaagacgaaagacgacgagtccatcgaaagtttaacgatgagaaaaattcattcctttcgtcttagagacgaaaagttgtgcaatcatggacatattgacgtgcagaatagatatgtattagtttaccagcaagtatcgatatagaaagaaaagatgagaattctaaagagaacgaatatcgccgtagaactccagtatttgtatctaaatggcaattgatccctgctcagactatacatctgagcaggccatgatacctagttcctagtcaacatctggtcagaggaatttgaattatcaaagtatcaagaaggattgaaacagagaaggattctacgaaacgtctggatacgatatcgatgaggattaccagtacgcgtcgatagaccggtttcgtagtactcgttgctcataattcccttctacaacgtatattttgacacaatagtagaggtcagtccataaagttctggcctatctctgtagagacagtggagttgcattgatgagtacagaagctggtgatagaaagaagtttaaaaggtatcgtccaaaagtaaacaaacatgactgttttgtggttgaacagcgaatctacagatctagattggcatttacctgttgaccgcctacctcgtttgatattctgttgttgttcccacaggtctccctctttcttccctttctagaggacaagatggacattcaaatgccagaagatccatattccgatcaagacgccataggggagcttgaggaggaagatgacgagtacgacacgtatgacgggatgtacaacggcgacatccatcggcctacctcactggtagagagtttcatcgatccagtttgtcctcaacaagctcattatcaagacagaatcttttcttgtaacttactgaatgatctgggtatgttgtttgttaaaagtcgttacgcgatcctcctatagatcagccggagaaagctctacattccgttgaggaacctgctactggcttcccagcggtcgaccccgacttccatttgggttttcatgatcaagcattggttcaagagtcaacaacacctctctctatcctatcaaacgagcatctatccgagcaatacccatccgagtaccctgcttctgttgcttctcccgctaccgatgtgtccaatgaggatgtatcttcatcatcaactcaccatcgaccaaaaagatcaacatcagttctcaacggtacttacatcatccccaaagccctcccgaaaggaaaagagaaaatggttgagaaaccgttgctcaaacagaccactgcttcttcgtctgcatcgatcaagaagaagtcgacaggctccgattttggatcaggtgtgagctccagggattcttccatcgttcgaattaacgctggtgatgcaaaagtcgagagaatcagaaagccgccgataccgaaagccatacccgacatcgactgctcgttctgtggaggagatgaccagatgaataaggctggtattccggaggatatgatatcgtgtcatctgtgcggtcgatcgggacatttatcatgcctaaggatggagaacaaggagctcatcgacacggtcagacgctatgagtggatgtgcatcgagtgcaaaagttgcgagatatgcggggtcaagggagatgatgtaggtttttaataagtacgtttgctaacagtgccattcatatcctgacacttgtctgtttcttcgaactctttttgcagtcaaagatcttgttctgtgataaatgcgatagagggtaccattgcgactgcctcacgccggtacgttaatctatcgatgttgtgtcatctgagtcataaaccaaaagcagcttgctcacgttgttacttaactttgtgttttgtccggaatagcccctgaaaaggcctcctaaaggtcagtcttgctatcagttctctcagtagtaaccttgtcgactgacccagtccgttcttgtcaatacacagatgattgggtctgccctccttgtcgaccaaaaaagaaacatcataagatagtcaacgaagacacaccagctcgatccatcattcttcacacttcgggttctacccctagcacatcgactaatacccctaccggccctcgaccacggggccgaccccgactgaatactacaaacacgactactccaccaccacccacaatcttgagactcaatctgggtgccgtgtctagagcaagtggagcggcgctccggttgacattcaaacgtccaaatgacgaaggactggatgatgacgatagggagaacggagagagtgagagcgaagaggatgaagaggaggacgaagcagagttgtattcattcgggtcgatactgagtgaggcagaggccgaatcaagttggtcgataccagataagtgggaccgagaactgttcaccagtattgagtctagacttaaggtagtgtttcggttttcctattttcttacggcttttcgccatcaaatgcataatctaactatgaatcttccaactatcggctttttgttgggtaaaaggcgagatccagagcagccttgagcatcagccatgtggattcgggcgcgtctgtctcaaacaacactccttcatcgtataaccaatatcttcatcgttcttttagagaccgagcgatggcggcgtctcagcctctgaatatgccctccactagttgggtttctggcaatggtttgagtgcagaagatactgtgccactggaacgagtaaaaaagatgcgattcggaccctacgagctagacacttggtatgatccgccgtatccagaagaatacaccatggttccggagggcagattattcatctgcgagttttgtctgcagtatatgggagacaagagagtatgggaataccatcgagttcgtaacttctgtattcttgccccatccctatctgcttttgcgaggtgtttggtcgtaggttatgatcaacaaagtcgcctgatacttttctccaatgtccattcatcaaaccgactaggcacgctgtcatacgtaccacccaccaggtgaagagatttaccgggatggtccagtgtctgtttttgaggtagatggacgaaagagcaaggtaggttttagttgttgatttgcattatcatctaaagccgcgctttggattcggtgttgactttggtttttccttgtctaaaagctctactgccaaaatctctgcatgatggctaagatgtttatcgatcacaagacattgtattatgatgtcgagccctttttgttctatgttctaacaacgaagaatagaggtgtttctcgatttgtcggatacttctcaaaggagaaaagcagtccgctaaatttcaacgtcagttgcatcttgactttgccgtttcatcagcggaatggatgggggaatttccttatagacttcagtgagtctttccattctttctttctttctttgtagctatgtgtgttatatgcgattctgatccctcgaagcgtgttcttaggctatctgctatctaaaaaagagggtcgcgtgggatcgcctgaaaagccattatcagatctaggactgctcagctatacgagatattggaccatatctgtatttaacttcttacgcacagcccaaaaaccactctctatacggagtaagtcgacgctcctggaggctcagtcactcactacccacctaaacttgatactgaccactttgccttacaaaaaaatcagccataagccgagcaacttctctcaccccagaagacatcatttatgttcttaaggcttacaacatgatcaccatccatatagatgcctcatcgggtgaagcttcacaccacatgcgcgttaaactccctcaacgtcaaatcgaccgatctcatcttggccttcacggccaactttctgacgctatcaaagagaaccaggccctctctattccatatgattacgatatttcgtgggatcctgaagtcgtcgaacgatatctgaacgatatcgaaaggaaacgatgggctacgatacaaccttcgtgtctcagatggacgccatttatcccagaaagaggaagacgtaagaggaaaaagaaggctggtcccccaccaccatccgatgctatcgagctcagcccgagaaaggcgagtaatggcgcgccgaccgaaaagaatgaactgaacggcgtttcgaataacatcactcgttcactcgctctcgcaacccattctggctatcatactcacccttccgcctcactccagacggttccgactcaggtcgttcttagtgattccttggcgatcaacccgacggaacacccaacatctatccgggcatcgacttgagctccttctcatctaaacggtgtcgcatatttcatcggcttcaactcctccatgactctgagatagggatgtcgactgggtgaactttataagaaatattcgcatcatctcgttgaggagtgataagggggaagagttgatctccttattaggcttagggttgtaaatctagatatatgtgttaatcatctaatttcacctctcttgcttgttgtagattacttgtcttataataataattcattccatcaaatattgcagctgatgttgaattgtcctacgttcaacaaggatgatacaagtgatgtcggtgttcgcttaaggcttgtctttaatgttcttgacgatcaaactgaaaaaagagaaacgaaaagaacagagtcagccttagtaggtagagatcagtaaaggcaaggcatcaaatagactggactcacctcttgtatgcgctaacatctccgtagaactgttgatcaggaagagaaagaaagatcagcatgcccacccactgacaatacaccctctttgttcatataaatatatatatatccatttg

SEQ ID NO: 26 - DNA, 11107 bp, Xanthophyllomyces dendrorhous
aatatatatatatccatttgcgtaccttctggacagttccgtctgcacaaacccagagctccttggcgactatagtgattccgatgtaaaagagcatcagtctctgatcttcggcgctctcgttatatctcttgaggcgcgacgcaaagatgtacgcgcagatagattgaaaaactctgaacgaaccagtagtaatgaatcgggtgtcgtgcgaaattaggatgactcctccgttccacttctgaatagcagccatcaaagcgtcgataccctgcaaaacatcattggccgagactagattagtcaaacgctatcttcattgataatgatggaggaaaaaaagatcaacgtacttcgatatccaaatgattggaaggctaaacgagaccattgtttgatttattgattggttgatgatggaagattagtgttcgtgttacgccggcgttagagaacagacaaaagacagacctcatcgagcaagatgatgtgtggcctctgcatactgagcacagcgaacgccactcgactcttctgacctcctgacaaggtcgcgatcttctgcagaccagtcaaaccagtgattccgaacgctccaaggtgctacaagagaacaaaagaagacaaggtcagcttagctttgtttgcttgcttgcttgtatttgtttgagaagaaggggatacagaatagaaggatatagacaaacctgtcggtactcttgttccgattgaccagggaattgagcggcaaggaaggcgacaggcgaggcagttaggtctaatgagtcgacgtgctatccgatttacatggtgaaagcagtgaccagaagtcatgaacaacgtaaggctctgaaaatatctcgctcatgatacctcagcaatatagggacgtacgtgctgagcaaagaacgcaattcgtaatcgaccgtttcgaacggccgttccttgcattgcttctaagtctccaacaagaagtttgatcctatttgaacccgcattatcagtcccgactgtcttcccgaaggaagtgatatgagtgataaatactactcacagagtagatttaccagctccgttaggaccgataacggcgattctcgagtcaagtccaacatcaatattcacattcttcaggatgattttttctttagtataaccgaatgtgacgtcgtctagctgaagcaacggtggcgaaatcttttcagtctccgggaacctgttcataatttgttcatatgatcagaaccagtcagtatcttgagcgtttctaaacaaaacgcttcgaatgatttctaaaacaaaacgagtaaagacatacttgaatgtttccgaatcatcctcctcaggtggctccaactcgggaagcttctccaagatcttgatcttcgactgagcctgggcggctgtagtggagaaaagaaatgagttatcgccatcaagtcagccaactcgtctgactattagacagacaaacacagagcatggagagagagaaaggggtacagacctcggttcgcgttgtatctccatcggtcaatgaaagcctggagatgttgcctgtacgccagctgggtctcgtattccttcttctgagtcttgagtcggtcggtctttgtcgcatagaactgggtaaagttacccttgtaataatcgagtcgttcagagtgttgccaaattatactattgtgccgaaacagaatggagaatctcagcaatgtcggtgtaacccaggtttgataaaacaaagagaagacgtactcagtagcgacagcgtcgaggaatgatcgatcgtgggaaacaaccaagagagtcgactcccaagtttgcaagtagtcttcgagccaggcaatctgtcaagagatataatttggcactgttaatttcgcgcttgacaaataccaaaagtgtgagagtactagtgtgaagaatcgaggaaacgaacggcattgagatccaacatattcgaaggctcatccagcatgagcagatcgggtttgacgaacaaggctcgtgccaacgctaatctcattctgtaatcataaacgcgatgcattcagatttgattgacatgaatatgatcggttagaaaagcccaaaaattttgaagaaccgtgaatcagaaagagaagaaagacaaacctccatcctcctgagaaagctcttgttggcttctgctgatctgccacctcgaatcccaaaccaaccaaaagctgggcagctctcgacggtccggtctcggcttcgatctcgatcaactttgcctggacctcgcctagacgcttggtcagaccctcggcatcatcgtccgacaaggtggtagaattgagttgagtcgtaagagtagcttcctccgtgagaaggtggtgtcgccagacatctgcttgtaagacggattgaagagccgtagtgtcgtctcccacgatctaagttagcaacataggaacaagtaagagactgtcagcaagagaaggactaagagtcacaaaaacggatagaaggcatggaacgactaacttcttgctcgacgtaaagcactgagatatgttgtgggatggcaacttccctgagcgccatgtttcgaagcaatgtagactttccaattccgtttcgaccgatgagaccgtaccgtcgtccgtgagcgagagtaagagtagctcccgaactgttgggtttgaatatccaaatacggggatgagtttgtggatacgaaagttgccgtcgcagcagaaagatattagagaactcacagaatacggttggatccaaaggagacatcgatgttggacaagtggatatctttggattttcccttgctggaagacatatccaacgggttgacctgatcaagccggacgagaatcatgaagtaagcgggcgtacttgaaggagcagaaagaatgaaagctcttatgacgcaccttcatgaacatctcctcgtaagactcctgttgagaagcgttggtcgtgatgtgtgacacagaaatataaaggataagtcacaaatcttttggactactaagagaaacgaagagagcaggataagaatcggacgaacctgtttcttctggatgtccataagtttggaaccttcgtatagggcgtgtcggtttcgtttctcaagctttgcctagagggaatagtagaatatggccggactcaagtcaatcgacagaccagagtgagtatattgataaatctagcacgttcataccttaatcttggcctctgctttctcaagcttcttcaagtcaactcgactggcctgtaaattcgagagaaacacgcgaaggtatacatataaatctttgaatgaccgagggagaaaacagacagagaacgacatacctgaccctttccgtggtgctcaagatcgacctggccgttcagtccgagtgtagagctgagagcggctcctgctcgcttcatgtcgatcacctggtccaacgccttgacagacgactttgtctttggtttctgccgggtcgtcgaggcttgaaggaactcggccatctgggcgatgctattgaatttcccatcaacgaggcgtacagacatcagccatacattgacacattgttggaagccaagagagaaagaagaagaagaagaggaagacgaacagtcggtcgagctctgctaactttgcgtctccatcgggtccaccttcgagcatacctctcgacatggacaagatctctgcctcttcttcctcttcgtcctcaagaagaccgacgatgtatgacacaacggtctcgtctgtataaggcagagttgtcctgatatcttcagctagttctgccatcgatgtgtatgtatgtgtgtgtgtgtaggtgtgttgtaagtttgggcggtggtggctgtaagagaaggaaggcagaggtgagccaaaaaagaccggggcagacggaattttcgccttcactttctatcgaccatcgtcttccctctttccatcaaccttcaaggtttcccttcctcggccctctctttcgcccacgatgctccgtcatctctcccttatgtctctcggccggacggctcctgtggcgtctagctcaggaattgttagaagttttcacctctcggctcctacgtttgaatccaagttcaagcgaaagattagagaaaaccgaaagcgacttgaagcctctaaggagagggtcaagcgcgattggttgaacagccagcctgaccctttccttggagttcctctcgtggtacgttttcttttcctactgtaggagagagtgttggggacttttctctcttctttctctttgaaggaagggtgaaaagggagcggtatgacctggtcggatgatgtttgagtttcgtgcatggactaaacttggtcatggcttcctctttctttccttctttgccttcttcctctcggttttcattagtacaaggatggtgtggccgagcacgagaaacaatggagacagacaaagatagcgtcggctatacttgacccgcaagcactctggatgacgggtctgaacaagccaaagaacgtgtttacctcactgtcttcttcaccagcaccgacagtgaccattccgaatgaagaagatgtagacatcattgaatctgaacaaccgccctcggatgctactgccgatgtcactactggggctacgatctatacaccgtcgaacccgattgagtctttccggttgccggtgtatatggcacaccacctgtcgaacgaggagaaggagtttttgttctctaccctgccatactttactacggatgtcaaatcgttgacgacctcgccgacggatacgttgactgctgaggaacaggccaggcagaacgttcaagcgagagagtcgatgaaggctgaggaacaatcgctcgaggcgatgggtcggatcttgagcttgaggaacgcgagtgcaaaggtgattttgaaggagaacatgaagagggtgatcaaagctttcgaagcaccagaataccagtccttccagcagaatgctccccgatcgagaaaagggacggacactggatccccagaagttcaaggtatatccttctttgcattctcctttgcttcttcctttgctctgcttgcattgcaaacccctcgctcaccccatcgccctttgcaatataagccgcgatatacacgctccgaatccgagcgcttcgagcacacctgatggtccaccaccaagacacagccaacacgacgaaactccgacatatggcccacaagcgaaaacgggtgttggaatacctaaagacgctcgatcgggtgaggtacgacaaatgtctgatggagcttgggatcgacaagcgagcggtcgaaggtcaacttgtcatccacaagttctggtacgtcgctttctttgctctcgactgtcgtcctcctactcttttcttcgtcagcctcttaactttctttgttgacaaacatcactgcttcactctgttaaaaaaacgcacgaacgatgactgaacaaaaggcgacaaatccctcaaacgcaaaacaaggctcagaaagatgttaaatatatcggtcaggtcggcaaacgaggatcgatctctcaacgaaaacgacggggaatgcagggcaagcggatgtgggagaagaacccggaggctcactactagatgtgtctcaaatgaatcaacaacaacaaaaaagaatccgatcagagactcgaatggatttgtagcagaagccagacagaagaggaacgggttctatttatgtgtctttttgtttaaaccgcccatcatctgttcttgcaaatatagacagaaggcagacgttttttttctccttcctctccctatgtttggaagtttgtgccagaccgatgaaacaggtctgaggcatgacgatggaatgaatcagtgacggatcgagtgaggtcatcagattacaattgatatcaactacgtaagacagaggagcacgggatgataaagaagacggagaaatagaagcactactcaaagacaagcgaacaaacaggtgtacaaaatgcagagtataaagaggcctagggctggaggaagaaatccgaaggagcctgaatcttaaagcaccttgtcaaggaactctaaagcatctttgaacgcatcctccttggtctttaactcgtggtcatccgttagatcacctctgacggcgaatccatggacagccttatgataaagcttgaggtcgagtccttcggaatggtttgtttccttccgttcttgaataatctgtttgatctgttcgacctgagacataggcaccatatcgtcctcctatgtggattggaagtataagaagagtcatcagaggcgttgggagtggtcaggatggcatctaaagtacgggtgggtgtgccgtataagtggaagaaatgctcacatctccgaccgcgatgaatgtgggtttcatgatcgcgttgatttcggaggggacggaaacttgggactagggtggaccaaaaaaaaaagtgtaagtacaaaaggaagcactcagcattcaatgttagcaagttgactatacaaaacttcagactcactggatggtaggcgacagcggcactgtaagaatatcacaaacagaatgatccgtcagtcaaacccaaaagagtctcattgcaaagtctgcactggtacgcactcgatcacaccgtccttatcggcggcaaggatggcgtgtctacctccgaaacagaatccgacggcgacgatcttcttgacctctggatctgcccggacggctttgaggtaatcgttgatgatgggcagaatgacggagtcccgatgagtgaacgtccacggaccgaatgtggcgcccaactttacggtatcgatcgctttatcggccagcgtctttttttctcggtctcgaaggttgggaatagttgtctgatgaggaggcaatgggcatgtacagaggcatgtgaacatggacataagaaaacgtgagcatgcgagcatgtggaagaaagataggaataagatcaagatcgaaacgacaagctgatacgtaccaacaaatcgagagggactgagtcaccggcaaagatatctggaataagcgttctatagcccttggcggcccactcgtctgctacgagtctgatgttggttgtctcccatccaaagatatccctgatagaatctcgagatgagttattttccgaccgaggcgtccgaagagtgggagactgctataatttagacgtgagaacaagatgatactcacgggataatcatcacggtcttttcttttgatcctccttttggatttgcgatataagtgggaagtccatagaccgtggtagcctgtccaccgggtgttccgctatggatgtctagatgcgagcaagcgaaagatcagagggagagagaaaggcatctgaattgagtggaacacagttcgacgcgaaccagacgcaagcaagtgatgtaatactaacggccagaaacgcagcattctttgagttctccagacatgacaagtataagtatggctgatggtatgagtgttgctacaaatgctatcacggacgtggacgtttaatgttcccaagatggtgatggaaacctggacagggcaacttctgaagccgattaagatgccctgatgtcctgatgccctgatggtcagtaaccctaataatacgtcatcggagaacacgtgtgggtaggtgtgaccacgattgggaaacgtattacataatccaactggcgtgcccttcgatgccgaattcggccgagcgtgccgagagccggacggaaggctcgctttgtggggaaagatacttgattgctttatgaatcacggtgaattccatttatgatccttaaacaaccataattagatctattacatgctctttcttttcaccgttccccccggaaagagtccacttggctgttggtcttcttggctctataatggcatggatgggacggatctctggatgctcaagtgttctcttggcctctcgggtcgtcatgttggaaaatggttcgaaaatgatatctgactcggccgccttaagtctgtgctgtaggagacaccaccaagaaggcttaggctctataggctgtccaaagaccgccttctttacacagcgaatatgcttgccggtcttggaataaagacacggccgagaacaatagatagagcatagagtattctgagcacaacgagaggagtgagcgacataaccgacatacatcttcactcagtcatcctctcttcctttggcaaaagaaggtaagaaaagacaagacaagacaagaagaaagcataatccggggatgcaaatcatagttcttaccccaaggcggggctagatttgacatgccgaccggccccggctatacagaaccaaatcccttccgccctccagaggggcctcagctgggacgtcgatcgttcttctcgaggggaccaaccagaggaatacgggctaatgtagtcggggggaagggaaattatcttgggctctccgcacaagctgtccccactatccccagtggagcccagtggtgtagaggtaaatctttttcttttagattctcgctttgtgggactcctgatgcgcatccgcttcccaaacgtccgcttcccttccctttccgtccgtcctgctttgccgtgtcttgcccggatgatccttcgtttccttgtctggtcctccgcgttttttctccatcccgaagatgttggaccccctggaaagagttgggcctccgttgccgattctattaaagggcccaccccatgattgccttctctcttttttctctttcccctcttctccattctccatccaaacttttcattcatcctacaatcccaacacatatattacagtccttcctctaggttatccttaaccacaaccacaacagccctttccctgtagtactcaatcgaggcattcaaccatgggaaaaaactttacccttactctatgcttcttccagtctcttgctggtctcctcttcggatgggagcagtctgtcatttccggagtaagctttttccttctttgcgctcgtttctctctttgtctgcgcgtttctttctttgcgcccatgttgatcgcttgtcgttctctctccagctcatgctcatgcccgacttcaaagagaggttcggaacatgtaccgataatggcacttgcgccgttgcctcccagcgacagagtgtcattactggtatcttctctgtcggtcagtaatttttctttaacctttgtctgaactttactcgatgcgatttctggttctaaccttttctttcctgtttttccttctgctgcaggttgcttcattggagctcttatttctggagccttggcgtaagtcacaagggtttcaatttttcttgatggacaaaatgacgcgctcgacaggaaaaagtcctcagttcttttagttccggatctgacccgtttcaccttcaccttctcttcttgccttcctttactttctcttgccttctcgtctgtcttcttcctgccctcacagtggaaagatcggactccgaaatgccaacttgttcagtttgatcctcttcatggccggtatcgccatcgaggttagtccccatattgtttttctctcccgtgctcttcccgtttccattccgttactaattgcctccgatttatccgacttttaccagacctctgcccagaacacctacgcccagctcgtcgttggtcgagtgttgaccggatactctgtcggttgcctttccggtttggttcctactttccaggccgaggcttgcccgccaaaatggcgaggagtcgtcaccggttctttccagggttgcgttactctcggtattttccttgccaacgtcgtcaacaagggtatgaacacctacaaaggagcgacctcctggcgagtccctatcgctatccagcttgccttcggtcttctcctcttcatcggtttcgtcttctcccccgagtcccccacgtactttgccaagcgaggtgagaccgagaagtgccgagccgccattgccagacttcgaggaactgatcttgactctgctgagaccgaggagttcttccagaacatccaggtccgacagcagcaggaggccgccctcggagattccacctaccgagagtgcttctcccccaacggacgaatccttttccgaactgccatcggctgcatcatccagatcggacagcaggtcactggtatcaacttcttcttctcgtacggtgcccagttcttccagaacgccggactttctgatcccttccttgtccagatcatcctctctgctgtcaacttggccatgactttccctggaatgtacgtcatgtacgccgtcggtcgacgaaacgtcatgatctggggagcggtcgtcatgttcatcggtcagatcatcgtcggtttcatcggtcacttcctggctggagagtccgtcgccggtaaggtcctcatcgccttctcctgtgtcttcatcgccgcctttgcatgcacctggggtcctgtcgcttgggtcgttaccggagagaccttcccgaccaggttggctgccaagtgtgtcaccatcgccaccgcctccaactggggaatgaacaccatcattgccttcgtcgtccctatcgtcactcaggaggacggagccaacctcggaccgatgatctgctgggtctgggctggattcatcctcgccatcggtgtcttcaccttcttcttcgtccctgagaccaagggtcttagtatcgagagcatcgacgacctttaccacgcccgaatccccgcctggaagtctgcatcctggaacgcccagcgaagggccgagcaggacgccggcgctcacgacgagtccgtccacgcccacaagctcaagaacatggtcgaccagccagtcaagatcgaccacaagcacttgcccgattccggccatgctaccccgttgcacaacctttcccctaccaactctatctgagcggtggtgatagtcttttctgtgtgatttcgggttctgtcttgcttttctttctgtcttgcttttctttctttctttaatactttcgaacctacataccaaaaaaaggagcgatcgctcctgaccttttactcttttcttcggtgg

SEQ ID NO: 27 - DNA, 20131 bp, Xanthophyllomyces dendrorhous
ctccccttcccttctgcccaaacttcaattcatctacgcatccttgcatcgcatcgcatcgcatcctttctgtattatttcgtcttctcttttattccaaaccaagaaatcgcatggctttcttttaatcaaacaaccaagaacgacacatatacacgcacacgcacaagctagaacaagtctacagtaccaaccgctcaactgatacagaaaatttgtcgtcttaagctgcacgtgatcgccatgttggaagccagaacttgtactcacattcgcgtcgtccagacgttgctctatcttttttgaattttggaaaaatagtcctcttccttctttctacgttgctcatcccagctttagaacctcaacaggaggctcatgtacaaccgagttctatcattctacagattacgacccgtccggacattaacgtttctctccacccgctcgtttcatagatcacctcttctcttttctgctcttgatcaacctaccaaagacaaccagtccgccgccgagtctgaaagtcgacccaagaccgaacatcgttccatacaaccacccaggattcacagaccgcgaacaatgttcaacacttccattcgaccggcaattcccaagttcccgggaatgacaaccctcgacaaggaggcgttcaatatacagataccagtcgtgagagcaaaagtgccaacaagtgctatgaggcaaatcaatcggaaccctcttttcaaaatgcaagtccttcttccttttgatttcttcttctctgatttctatatatattctttgtcctgttcgcgtgttccctggcttgatctgatacctccgtcttcttcatgggtcttcctcttttcttcctagcaggactaaacaatctggagtgacaggtaaagggttggccgtagtgactgacgagaaggatagcgatatgaggtggattcctctacctgctcatactaagggtgagtcttgttatactatgctgcgtctacctcagctgcctttgcaagaggaaacgctttttctgaatctgactatgcctcttgttcctactgctaaacgactgatcggatcaaacagccgacctgcctcaggagacgcttgatgcgctattagagttagccgggtttgtcgaggtcgaggattcatccgtcacccttggttggaactactggaccgtccgtgagtgttctcttctctctttgggcctctttcttcccttggcattctttcttgtcggtcgaagattggctgccgaggatacatcaaacgaagaaaggacgaaacggaaagaagacggctgatgaataaatctgatggttcgcttcgtccacccccgcagaggaaatcatctcggccatccttcctgaagatgcagatatgcaggatggaatcccttcgagtttcaccatgaccggccatgttggtgcgtctattcttctctctattcggaaggtgctagtaaaggtggtcgttccggagctgatatggatagaaaacgtcctgttttccctcgctttgctgcttcactatttctcgtcctaactttcctcttctattggacagcccacttgaacttgaaaaagtcaatgctgccgtacagattcttgattggccagatcttgctcgacaaagcacagacaatcgaaacggttgtcaacaagttggatacgatcgaggaccagttccgagtgttcaagatggagttgctcgctggaaaggacgactatcttgtttcccaggctcgttcttctcttctttccctttcttgcttttgttccatctgaaaatgtttccctctcggttcgactgacaatctcgggtttgcgccgctctagatcgagcaagaatgcaaattcacgttcgacttttcccaagtatactggaactcgagactaacgaacgagcatcgaagactcgttaatctgttcaacccgggtgatctcgtggtcgatgtgatggcaggtgttggcccgttcgtcgttccggccgcgaagaagggatgttatgtgctcggaaatgatttgaaccctcatagttacaagtacatgcgactcaacaccgaacaaaacaaggtacgtcttgttctggtccacagcacatggcggatctactcagcgcacttcgacggctaagcccttgattacttaccgtaccctctctctttcctctcaaggttgtggataacgttcgactgtttaacgacgatggccgaaatttcattcaaacgatcgctttcgaggcatacatgttcccgttcctggaaccctccctcgagagacaacttctttgtcgaccagacataccgaacatcggcaagattcccggcagcatgggcttccagtcttcgaacgaaacacacccgccggtagactcagcatcgcgccagactgaacatcactcctcccatacctttcctgaccttgccatccttcattcagatagtcgttcagcagtttctccttcagatcctacctccacaaccacaaccacaaccactaccactactcccaacactacagtacaacatcccaatcccgatgtagccggtcgatctcgcaggagggtcaaagcacctaagccgatctacgaaccaactctgttcatcaaacattttgtgatgaaccttccagattcagcgctcgagttcttggatgcctacagaggctgttacagacctttggtggacgatgccggactgtcggaacacaagatcgagatgccgatgattcacgtgcattgcttcgctccatctattgcggagggtgctcataaagagatcttccaggttagccctttttttttctttttttcttttttcttttagtcaagtttctatgaaagaagaggtttagtgagaagaacacgaaactaaacatgcctttgtttctgggcttttcctatttccttcccatgcacgcttctcagcgagcgagcgaacgactaggatacaccatcgatccggctaacgacccaacggtttacatcgagcaggttcgtttggtcgctcccaagaaatggatgtactgtctagggtttactcttcccagggaggtcgctttcgcatgcaagggatctgtcggaacccaaaaagaagaggagaagaaagaggccgtggaaaagggagagaatgattctactcaggacctatgaggatggatgaaacgaagttagagatcaagatcaagttatatttcccccccccttcggagacctggttcggtcctcatgggatatgctcgaaggcagatcacataaatatcctcgtataagaaatctcaaagctagaatacatacgaaagaaaactacaaactcagaccacgagacatacaaaaataaacattaggcatacttaagatataaaaaaaaataagaaataaaagagagaccgaaagcatgtccaaggaggattagacggcagttacaattgagaaaagaccttgtatcgagttttgtaacctacggcccaaccgagccatcgggctatttagtcgtgcgatatcagatggggtttgagaaagttagcagaaaacaaaagaaaaagaggaaaagacagattagacccgactgaccaccgacgttcagagcacgagcgataacggttggaagatctccgagtacgacatcagcctattttcatccaaactccgatcagttacgatagaccttatcttgatcttaggatctctagtcgttcttcatcgggacgattgagacgggaaacaagatcaaagggggtgagagaacgacgtacagaatcaagcatcatgaatatctggaccgggtttggttcgacgttttctgcgatgcaggaagaaacgtacccaaagaacgaattcagaaagtattcatcaaatccacctgctgatgtgctgatctcgacgtctaggtcatcgtcaacagaggtatctggccagaactattgtgaaaaagaagatgcgaacaaagacgttggacagatatccagaattgaagaagttagaagacggacgatagaagagacggagggataagatcggtggacagacggtatgaacttgtcgaggcaggatcaagatctcttccccagggttgactgaaccctgctttccatcacgaatgtagagcatccttcctttcaactgaaaccagtctccgcgttcgattcatagcacataaacatgctgatgagcactcgagctgtaggattaaagatttgagcgaaacagatcagactcacacaccgaaacctttctttctgatacaggtggtaatgtaaaggaggcgtggccttcgcctccctcgagttagtccagagtgacgatcgactgatgatctgacgaatcatcgtgctctcttctccgtcgatcgtcgtattaatcgaaggaaatgagactactccgccttcaaagaacagaagcgcgcctggatgggtaggggacggttctggagcatgcagggtctgatccacgaagatggatcaaacagtcagttctcgtcacaaagctcggggttggtacgagacagggaaagactcaaacagtttttgggaagaatatatccagcatagtgcaacagaaatcaaaaaatgtaggtaacaaagtatgagatgatgaaaagaaagtttgagggttcaatgtatgaatggttgatcttgtctaatacgtgtgctctgaatcaccgtctatcgcgccaaccgcaattaacgcatggcagtatccttctcttaacatgttgtacatcaatgcttccccttccagccaagccagccgacaaactttccaccagcgccgtcaccgtcgccccaatcaaatctgttgacgatccagtgaactttgtttccgtccgacttcccattttgcaaccaagtctcgagaaactctccgacgacatcctcagctcgaacctccatcactatacaaatgaccgttctgccttcctctgcctggctgtcgaatgtctggacgagtccttttatcacattagggttataaacgcaatccaagcaaaggatcaaatcgtatgcttcggtaggaggaggcgtagagtgaagccaatcgacttcggcaatctcgatatttgtcttgtttgatgggtcaagcgaagatacgttctgagagatcaatttgaggcagtcaagtctagcgcggacgaagaagagatatcagactagtgaataaccttaatcaggtgctcacttgtcatgagacaagtaaccgtcaaagacagagacttactggtctgaacagacccatcgtctgacgaatttcgccaagaaagtagcaacgagacccgtacccgaccctaactcgagcacgttcgcttgttgaagtgcttctacgttaaatagcggagggtatagtgaaggcatagaagagaagtataactgaggaagcagatattccaagaaataaagactgacaaaacagaaggtttgattcctaagtgcattcagtcggctaccacgacaaagagaaaatcgcaaatgctcacctcgttctccagacaacacaacccgtcccgccagcatggcccttcaatcgtttcatatcctgtttgacctctacctcgagttctacatcctttggtcttcttccctctttcctgactttacctcttgacggccttttccttctctctgctgttgatatcgacgtcaaggactctacatgacctgaagcctgtgtgatgtccacgtccgataactttggaggagaaatgacgagccgaacggacatccgatcctcgcggtcgttcaaaattcccagatgagactcttggctgtcagatgaatacctggaagaaatcgctcggttggttataacctcaaaggcctttgtttcaagaaatgaacgaaaatagacatagtaaatatgttaccagacaagaagaagaagaatgttttagtaaaacacatagtcagtttcagcagattcggaaagagcgaacttcttgatcggcatctgtcactgaagttagtatacttgaacgatgcacaaggttgggtatcatttctgtcatcgccatcccggatgagcagcgatgggtgtaaacactttgggcttaatggtagtgcggagtgaggactgataaaattgatgagctaaccctaacagtcatcctgacggttgaaacttcagcaagccattctcccacacagccaatcccatcaaaccctttcttttcattccctcatataccagatagatctgttgatagagccagcagaggttcgattcctcatccagaagccaaatccaagataagtgagtgtgtgtgtgtttatctttttgaagtctctcgatcgggtaaagtcgtcgagacacttgctccctttggaggaattctttcatttagtcaaaatgttttctaagaactgtatgactcggattcttcctgctgcttcttacattggtcattgtctcatccgtaatattcttcgctattaaactggtgctgagctctgactttcatctgttgctcctttgttttgctctgtttgctctccctccttcctcctcgctctcttatgaatcagttgaaaggcaatccgacgcgtcgttctcgttctccttcatttcgactttctctttgccctgagcgacctctagactcgattttaacgccagaaatgcattctggaatgtccgagccgagtggatcgaatttcaagaaacgtaagaagaccaatgatgatgatgacgacgagagatcaggcacgagcaccaacggcggcggtggaagtcggagaggtagcgcagtgctaatgccgatgacgaaagcagagaaagagagagaaaaagagaaggaaaagaagaaaggcttcagttgtagcgagtgccataggcgaaaggtttggtatgttttccgtcttctgatttctcatctctgcgtctacttttcgatagaggagatcatcaactgacctttactcactacaaattctcagttaatgttcatgcttatggtctttggaccctccgaacacgagagaaactcataggctgatatgatcgagaacattgtgtggtttggactgaaatccgtctagcaaaaatgcaaccgagaaactccctgtcgtacgtgtgccctcgtatatctttttgtttgatatatgagcgaatgcaaaaattgacctataatatacgcttcgtcgcgtggcgcttcaacgtctatcctttggactttggggctcaccagatcattgcgtggctcgaaaagtaccagataggtgtcatcctttcagtaaggctttctgtcttgttcaacctactcgtactcttctaactccatctatccctcacttctacatagctccgggcaagcctgaggatgagcttctcgcacgattactccggacagaaaaaatcttatcgcttcagtttccacagtataattcctcagacgcccttcccgactatccactcccgacaaaccatccgttcgtaacccaatctggcggacgatcgaaaggcagcgaagaggagagtgaggatgaagagttgaaggaggaggataaagacaggggtagaggacgactcacaaaagggaaatggtttggcgtggttcgtataccttcttttctgatatctgcttaatagcatctcaagagatagcttagaacacgtctgatgttcaattggatttcggtccacacagagcgctgtccagtccatgtcggaggcacctcttctagacaaagtacgcccttgtcatccaaccaggtccttctttcttcctaagcgcaaaggaaactcatctgtgttgatatctttcaattcatagctacgagcagagaatacgacgatgaacttattacaagcagaacacgtcgcgattgaactgcagttagaagataattcatcaccgggttagtcaccataattctccttaggatgttccttgtttcatttcatttcatttcgttttttttttctttcatatttcattcaactaacgatgaatttgatcactgcgaattgtcatgctacattgatctggttgaaaacgtctagctgaaaacctacaggtatgttctgcctgctctgttttaaattcgaaggagagttagttgaatattcatcatgcttgttgaaccttctctttctattaccagcgcctgattaccgagtgtggagtgtcgcctacaaaagtagcagaactcgtacaagagctccctcctaaggactttgcaaacatatgtatgtcttggcactctgttcctctatctttttgccaatattcgactttccgaccgttggagatgctgaatgtgttgcgaggaaacagtggtggactggttctttggtaagctgtccaaacaatctcttgtccaatactctcaatgctattctgcctgttgctcaaattgtgaacacatcatttcgcagccaagataaatttcacgagataccctatccatgagggcatgttcagaggtgcgctttattacttagtttgtttctaccataatttgcatcggcactaaactttcatttggtcaatataaaattctgtcaacagtttgtaagtcgtgagagctcacatacaaccgggccgtcagctgggcccttacattctgtcttgtcttctcgctcgtcaaacgttcttacacgacgcgtatagcctacgaggcgttatacgcaaacggactgaagacagatccatcaaacgttcggtcgttacctctcgtattcataattcttgccaccgttcgttccttcttccctctttctcaactatagaaatccactgacacgtgcccatgacgcgtcaatatatattttccccaatcaacaccgacatgtggcatgactccacttaggctgtccgactctcaccggaacatattggaggtgatgaccggacgcggagattgacttccctccgatattactggtccagtcggcgaagtattttaattgccacagccatccaaagtgagagtctcgagctcgtgatcacgagactattgagctcgcggtatctaataatggttcacgacagacgacttacagtacgctacctgaccttcccttgttttcgctgatgtacaatatgaagaagcaagtcatgaaaacaagacagaaagctaatcagtcagcggtcattttttttcttctataggaatgctggagtcaacttggagccagtctgcgaaccgctcaggcgattggtctgcatcgggatggtacgaagcttggattggagttagtgtccgttatgttttggtcatattgttttctttgtaaactgatcgtttttgtctttttttcttctgcgtatctcctctttcacaaagcgcgttccaaacggaatatcgccgtcgaatctggagttatctatatcacgccgatcgaacatattctttgatccttggccgcccacctgcaatctctgatgtctacaccgacacattacctccctcaaatatcgaagattctgagcttgttcctggtgttgctcccgaaccgaggccattaagcgagccgacgccagtctcatactcagtattaaggcatagtttaagtaggatcatcggaaaaatcacacattacttccaacaattggcagagccaagtcattatagtgatgtcttgaagttggacgatgaactgaatatgtttgttacgggtttgccggctcattttgagtaagtatagttccagttgcccatctatctcaatctttcaaggatatacgcgcttcggtgacgatcaacagttgactcttccatttttttgctggttgggtagtatggagaatccggacaagtctctagatgggtaagaaatctagtttcgtgttactcgcatatgcttacaaactcaccaaaatatttatatgggatatttgtttcttcgttcaacagtgtatattccgcgttcttgcctatgcgtatgttccctcagacatctcaatatttgatatcttatgttaaagacgatcgagctaacttctctcctgactctgtcctttcagatcgattcttcctacataccgaaatcctttttgtcagaatcactctgcatgtacgtctgacctcacttgtactttcgtctgctgatccttagagaagcttatactccccgatgacttttttccatccagcgaccttggctgttacgaaagttaaagtcggataagttcttggtctcccgaaatgcgtaagtacatggagtctttcgcttgtctgttggccatgtgttctctataccatgagtgtttgagagctaacatatctgagttgatacagctgttttgagtcggccaaacgagattttgtcatcgttagtatcggatctctattctttgtaaagccaaattcacgtaggaacttaattttgactctattcaaccaacagagacaagctttcaaaaaagaatcttcggttgatgtctcggccgtcatgggtggacgtgagttgtgtcctgtatctctagctctttgtgttatattggagcactgattttgtaataatattgtcgatgtttcccgatgcagagttccgagagtttaacgctgctatgattgctggttggttgtttttaccatttccttatcgatcgtcctcgtatatagttttaacccacctttggtttcttgaaacaggcataagcgcgattgtcgatccacacggatctgaaggtccagatatgagaggtatcctagctacgttcttggatgaccacccgccggcatccgctatcgatcctaccaccaagaaagaacgaaacatcgtgggttgccttctcttgacgtctcaatcatttttctttgtccacaacttttcaatcagaatcaactctgatgtgtcttgctctacctccttgcatgtcagatcgaaaccctcttccatcgatctgtgcaattacttaacaaagaaaatgatccgcaagttgatccagcacgtactttactcgacccaggggtcgaaaaagagaaccacgctcgaacactactcaatctttccggccatcaagctaccaaagcctcaccaacagcttccgccgctgcagctgctcattacctatcgaggccaccgctaggcggtggaccttcggcatctgcttccggttcgaaccagacgggcagtaccagaacgggtcacggcgggatggatccagattcgaccttctctcccggaggaaacggggctgcccaatgggtgatgcatagagattcaccacaaagtagttcaaggatgggagacacgccgcctagcattgaagacgagagcgcgcaaaacttacttgataaattttggcaggaagtatgtcttccgttaccttcttctagatagggcatcccatgctgagtgagaaggctaatcctttgtcatcatctattcctttcagaacttagttttggatactgtacgtctaacggatttgagtgtttctaaaactctctgctcacctttatcggaataaattttgatcaacagatgggaaatcacgaacaaatatttccttccaacttacaatcaacgtcagtcctgctttaacttaatttatgcttcctttatgtctataatactgatcttctcatgagttaatctgtcggtgacatcgaatagggctacagcttctcttgagtttccggggtcgggcgcgaatggtaattatgcgagtgggacgtcaatggccggcccgtcaaatgacccgctagattttgattcgggcgttcagccggcgacacctggtgatctcaattactggaattcgctgatcgtacgtttcgttgctcgacatctgattcgtgatgactgctcatagatactgatgactttctctttcccctcctctcagaactcgattttgacacaaggtggagataccaaatcgaatcccatgcttacgggagagaacggcagtcgctgagagccaaaaggcgactatcaatcatctaccaacaactccttatgtgttccaactcctctcgtttagttctcatccatctgtcggctatctatgtttgaagctattgtcgatgatatgtactcactcctacttttcgacaatttccctcaccaatagttccattatgaactcagttgtcttatatatttaataggagttttctttcttatagagacgtttatgcatttttatctcattcttcgttctcaactgtcgccaagttcatatgttgtctgctgtgtcagtctgctctaaaattgaggtcaaatcataatatcgataaatcggccaagtggtctcatgttctgtatgtacaatctcaggagagtagggcttagtcaagtcatcagatgatggcgaagaaagtttagagatttgttcgacctacaagacgtcttccaagcttccgtcgctgcctgccggccttgatcaaacccgtgacctgcgagattgaaaaagcgaaagataccccagaaggctctgcatgattagtacaaatagatctgagtctgtacaaatactacacgggatgtgacctaccccattcccatgcgaattcaccagagcctcgttgagcgatgtgttcttcgaatcgtctaccagccaaagtattagctaccaagcagcatgttctgcctaacttcaaaacatggatacaagaaccgcgctgtagaatcatgtgaactcaccgaactttccattgcccgcctgctgcaggtatctctgctgccggtccgtttccgtacacagtacccgagctcaagaaatgtagggcatcctcccagcctgtcgtataacctgactggaaccggtcatgttccatgggtcgacggactgccttatcccaatattgactatgtgcatctgttgattttattcaatgagatagtaagagttcattcatgcttatccattgagttggaacagaaaggctacaagaaagaggcaacaagaggaaagcgtactggttgcgaattgtcgtctctgactcagaagatcaggggaaatctgaacattacccttgtgcttgggcccaaggaagacaggaatgatttctgctcgacaagcatctttgaagctccctatttatccaacggcagtaccaatcaaagcgattaggtttggacccgaccagcagaaagtaaacagtgcagtcgaatacataaaaagccgattggatagcatgggttgacggggaaaaaatgagtgatggaagaaaagagaacgaacagccagcatcccatccatcttgctttcgataggtccaaaaaaagtatccgctggtcttgccctcgaatacctgttactcagagtcaacgattctcacaaactgagtacttggggaagggataaatagactatgcgagttgcaagaaagaaacacacttcgagctgagcgcgcacaaaatttcgtcgcttggcatcttgttctccaccttgagaaccattaagagatccacttaagatcccagaacgcgttgcaaaaagtaagtagatcgagcgcgggctgatgaacatcgactgtctaatacgtacggattcagcgctccactccactctccgacgattactcttcctcccccactttctgacttctgcacgaggtccgtacccaaacgacccgatagatcccctcggacctcctctgcgtgcctttcagctgatttagcgcaatcatccgaggtgaaacatcgatagacatgggtgtcgagtagaataaaggacgaagtagggaagtaaatctttagaccagcctcaagctgccaagcatcggatatcatcctgttctcgtcatattgtataaacccgtgattttagcttagataaccttggggtgtattatacagcgaaatggcaaggaagacatacaaagggaaatcaggaccacaaatcgaacgaagtcggttcagagtgtttaaatgaaacttttgaagctgagggcaggccgcaggctcgttcattagctccagtctttggtcatgagagaaacaagcatgtatattcagtttcataagtcagagtacgctaagatgatctactgagacgaggggatactaggtttttccccactcaagacatcgacagaaggaacttacccaataacgttttcgacgcccgctatagcccttagtaatacttccaacgtccggactgtctgagcctggtacttctggtgagtgaacaagagagcctcatgagacgctccggcatgagcatctgggttctgttttcccggaaccgcgtggagatctataccatcaataaagcttgtgagccgtgcgatggtccttgaggaacctcatttctagatgaagaacgaaccaacgagaacacctatatgatatctgtttgcccactcaaatgctctcgtaattctagaccaagcgccctgatagatttcaactgtaaaatcgaactcagtatccttaacaagggatggatctaggccagatagatgatagtatgatatctgctctctcccaaagcaaacaaagaagtactcaaattcagcaaggtgtagaccgtcgagaacaagcaaagaaccttatagaaaagcagcatagatgggacgaacgggtaaccgaattgagttgatccctctttgggccagaaactcgaaatcgctctcgacgatccatgtatcccaatgctgttcaagcttccgtttgatctcttctttcggcctgcctgatttacagatatcaaggtcggatcctcctgatgatggaaagagatcataaagctgttaaacctctctccttagtcaatatgcatatcgaagaagagagaagaaacagaccgggaggagcagcgccctcgaatggactacttgagatccatttttcaagagtgaaccaagaacctggagtcgagaccgtccaaacatacataatggatgagtctgcagtactatctctcaaaaaatcgatagaaacaatcttgacctagattgactcctgcccagaatctaattccatcattcacaattcgtcaatgtatcgggtttctttgaggttctctatatatgacttgcgaaagacgaagaaagagatgggaggacaaatatggtatacagacctatatcgcatgatctcgctctttgatccattaccgatggggatccttcctccagcttccgatccaggttgagaaaagctttgttgctgttgttgactattgacacccgtgcccgggaatgatgagcccggaggcttggaatcatctacaagcgacctgaccttgttagataactttgcgaaaatgggcatgtccagagatgatagtgtcaagagttgatggaggttggtcggccagaaacaccgccagtaagcggattagataatggattaagcagtcttacgtcatcgactaccctacagatcaactaacaacgacgcaagcggccacaacgacaggagatgtatgatcaatcatgtataacatgtacaatctacaaggtgtatatttgtaaggatacagctgggcaaatcaaccgactctaagaagaaacgcataggaaaaaagagagataaaggagagtaaacgttctaagcggcgtctttgccaatctaatttgtgtacgacaggcaagcacatcattgttagttctttcaagcccatcgttggagaagatatttcgaatcgacgaacctcgattccaggcttggctcccaaggcatccttgatctccgagtaaataaggaattgaccagcgaccaatccagcggctgtttcgatcgtttttatcattcatgttagctctcaagcaagagtagtataatatgtcaataatctgaacaaaacagtacgtactcatcagcatcctaggtccaagacctgcgaacaaccccgcgaatccagcttgcctgcctagagtcaacagcctgcccaacataggacctttcggtccatctcccttattgatctgtgagagaagggtgtccgcaggctagcaatggatatgcatcagagggatgtacatagacagttaaactgttcagttaaccgaacaacgcgactaaacaggaggacaggcgcgatagagaagtaaactcacgtgagagagcacagcggcgacgataccagcggtgataccagatccaaggttgatacccagtctttttgtggtcgatagattctcctgctcctccttcgtcattgacttgtaagcgagctcatgcataaactcgtttgttgctatcgattgccgagagagatcattgagaaagtcgtcgcgtcaaatcccatgtctgcttcggcaagagcagaatgaagcacgaaggacacgtccgacttactgaattgaccctgatataggtagaccagactcaaacaacgatcagcaaaggcagagtgagaatcaataggctcaaggaactataactcacgatagtgtacggaacctgcttgcacacgatcggaatgaatccagaatacagtccagagaatccttcggttgaggccaacttggtgaatccagaaaccaagccggatgcgtactgtggttccaatgtgtgaacagaaggagaaaaaccagacaaaattcaacccgggtaagcattgagttgtgcatatgtagccaaacgagatgacaaaagaaaagcaaatcattaggagtcttcgaaccttcggattggaaaccagccgaatccttgtcgcctccaatggagtcaagaaaatgtctgcaaagaactcggagacggaagctccgaccaggtagatagttgttcggttggcaaccgcggcttcaggggaaccggcaactgtgtttcggagagttcagaattataattggaaggtaagcgaaccggatggaatatggacagagataagggaaaagataacggacgatcaaccagcctcttcttcatgtactcataaccggcaaacttgagaccacctagatgttccgacgataccaaatgggattttgataaaaccaaggtgaatacatatacaactaaaactgaaaaaaaaaacagattaagaaaataaggccacaaaccctgaataagataccctacggccgtgggtccaaatctgtagcggtacatccatcgatcagtttacggtgagatatttggtaaagacggaacagaaaaatggacaagatgcgtcatccttacccggtcattaaaccggccgctccttcagcagcaacaatctttcttcctgcagtcaacattgagtttcgcttcaaagcagggtcgatttggatccttgtcttgatgatatcgatcggggtcatcaacccatgagtgctatcagtttcaatcaatccacgataagagtcagctttttgtgaacacactatcaaggtaaaccgcgtatcagccggagcaagaacagttacccaaagaatgatggacaaacatggtgcagcaagaagcacccgccaggaagaacgtgctgtaatcctgacgggtgaaatttggtgtaagcgagctctttacggtctgtggcatgttgaatttcttgattgagacaagagatgaacgagtgtgaatgcaatcaaggagaaaacgagaagcaaaaaatcggcatcctggtttattcttataagaaacaatcattccgactgtttctgacccccggccgctcatctccgcctccgttacgtcatcaccagctttttttgttgcactcaaatccgttgtcaccatccaccacgtcccagtaatccggagggacaactgattggcttcgttactcatcgagtttatctcgtaaagtcctttcatgtgttcccacacctcattcgagagagcaatcaagcaacgaccgagcgtgctgtcgaccgtgtttcgcaagtcattgactggcaagtacatttggaggtgatactttcatgatttgtattatagataaaagacggttccccgccgaaatagccgcatccgttatatatgtaatgagaagactcagaaactggctttcaccacaaacgcacatatgacagaaacaaggagaaagaaaaggaagaaaaatagagaagacaacggaaaagaaaattggaattcatgctgcaagctgaatttcatggtgtagctttgaattcaggtccgacgtctaatgtggactgacctatgtgaactgcttgatgagttcactagtccgaactatctatcttggttcgtttgggcctccaacacataatcaagctcagttcgatatattatattatcaatcgagctgtcgtctgttgagtcatcacgtgcattttcctgattcaagtccatatcttacggtacatcgttgtgagaagctcactcgagatggacatgaatagagtctccggagcggatgtccctctagatttgtgacgggtgcaggtcttgaccaataaatgataatgcatcggaacacgggcagaaaagccggcgacagataggacggaaaactagtaagataggtatacaaattgatgtgaaaccaaaagcacaagatttgatacttgagtttaccggttattacaacatattctcctctccatcttgatgtacgacccacccggacatgaagtttcgaccctcttggagaatcttctgtaccagattcttcaccacttcaagtgtctatatcggccggaaggatcaccaagcggaccagtcgaatacatccgatacttgatcagaggtgacgctcaagaaggagtcagaatgtcggaaagaaagatggcagggcgttctcgagtagctaacaacagaagaagcgagagactctgaacaagcacctacctttcattctttcccaactgtttgagatcaatgccggcgatcttgacaaaatccaagcagaatcgaattttatattgtatgagaaagaacgagtgagctcgacggccaaagaaaaagaaacctttcatcgaccagtgatgttggccgctgcgttgcctctattcgttgtgtttcctggggcctttttaaacactagaggccacgttcctccccggaggctgggcgggagaagctttcctacggacgcctggccagcgatggaaggaatcgtgaatttgaacggaatggcgaaagtatcttagacatgggtctagttgttcagaaggtctaaagactatatagtgcttgattccctatacttcacatcataaaacaaaaatacatcgatgagccaactgtgatgatcgatctatgaacaaagcagatgatgaacggcaaggattcacaaatctaatgacctgttattcaggtcctcgactggagctatgtatctgggtttgtacaagagcatcaaacaaacatctcaatcttgttagatcacaaccatcgacagctagatacaaaaaagaatctctaacctgaagagcccgaatcttgaccgtgaattccgcaataccattcaaccgacaccattgtgtcggaacatcaacaataccgcagacgaccgagccgcatgtatagatatctcattgtttagggaacgagacgccaaacgaagagccatagaactcggagactgccaggccggtgacctttggagaaaaactgggcgagcgataataggtgattatgagatagtaaatctggctgatgtttggtgatatctttgctttgttgaagtatgcagtctagacttcgacgcaattttgatgagtatttatctatcacgagaggtgccaaacgagcagaggtcacacaaaatcttcttccgatcagttccaagtcagttcctctctttccacttctgtttctcaatctatctgctgagcatgtggatcggcgtgtactttgggtcgcagtttggacgcttgttgaggacaaggtggctgacgatagaagagagagttatgatgacatattgtggggttgatagcacccgacagtcatgatcatgggtgagctcgttcgataagggagatccagcacagtagacttatctgcaaggagaaagcctgctcaggcaaaacagcaatccacatactataagatggttgtgtaaatctcatctaatctcaagccaaggcttttttggcggcatctcgcttctgccgtcgtttctccagagcggccctgttcttctgtttctctccaaatccagaatcatgtaaagcctagaatcgtaccaaaagacagcccaagaacatgatcagatctcaagtgcatccaagcctttgcttgataaaaagactatctctcgaaatttttaccatcgcggccactcgtttagcggtggaaactttgttgagcgattcaagaactttgtcttctg

SEQ ID NO: 28 - DNA, 27096 bp, Xanthophyllomyces dendrorhous
ttcaagaactttgtcttctggaagggtgtactctgacaatgtagcgtctgaatgttattattaaaaataaaaaaaagaaagaaagagagaattaagaatatacagagaaaaaaattattattgggaaaagctggatgggacgaaacgtgaacacgtactgatcttcttctcgatcacttccaccaactctgtatctctctcagtcaccattgtgatcgccacaccaccccttcccgctcgagccgttctaccaactcgatggatataatcctctccaacccttgggcaatcccagttgacgactaaagcaacctctggaatatccaaacctctactacctacatcagtcgctatcagtactggtgccctaccagctcggaaggtcgacaacgattgtagtcgttcgtgctgagacaaatacgaatgaagcgcgacagaagggatttctagttcggtcaatagagcctggacatgagcagccgtctgacaacgagacgtaaagatgatggtcgatggaggccagggacgggtctcgacgtcttcggaaacggcagtagtcgcagacgagacgggtgggttgcgcttccgtttagatgaaatgggcttggaggaagacgttggatttgggttcgctcggataagatgcttgattgattccggggggttcaaaaggagatagtataggtatgtttctcgtatgtgggaagggatgaagagataatgttgtttcagcgtgctgacggtcgttgtactgtcgagtacacccataaagcatcacagatcgatcagtcaaaagaagaggagaagaaaaaaggtcacggacgacaaaaggtctcggcttactctgacgcgactttgtgcacaaagatcttttcttttcctttctttggttctcgttgttccaaagttcggatcgcgtctgactctgtggcagtgaacaaacaggtttgccgctcctctggtatccgagaaaagatgtaagccaaatcggcagcgaatgtcggtgtcaacatccgatcggcctcatctagcacctaaaccaaggtgaaaaaagttttcagtaatgttcagacaggctctctattcacgctttatacaatccgagccaacttgggtagggtagtacataccaatgtctgcaccttgtccaatccccactccattccactacccttcaacagatcagccagccgtccaggagtagcaactatcacatgaggcctgttcactagctcctgagcctgtgcaatcacgtccatcccaccaacaattacggaagtcttgatgtgcaacgggacaccgagaacgtggaactgctctgcgatttggaacgccagttctctgatcatcgagaaccaaaccgaagcgaacatgataaattgtgctgaacaaacaaaagaacgcacggcgtagataattcatacagtaaaagagaacgtaccgagtaggcgtaaggacgacagcccagattccatacggatcgcgagaaatccgttgaaggattggaagcgcaaatgccaacgtctttccggaacctgtttgagcaagtccaatgcaatctcgacctttgggtgtaagaatcgcgcatgaaagcttatgtcaatacttgctgaatgaggttctcaaagaggaaaagagaagagaaaatacacataccagcaaggatagcaggtatacaaccctcctggatggacgttggtcgtcggatggacattgtacccattgcagcaatcaacgcgtttgatactccgatactcgagaacgttttcttcttcttcaattcttggataatagagtctacttgactatcctgatcgttttcctgttctgccgccaaagtcttagttagactttcagccgacggtccgaaagaggatgatgaggatgcgggaaggctcgacttgactcttgacacaggcacccgagaaggaagtttaattcgagaaggcaaagccgtagtggtgatcgatggcccagattcaggttctggagagggagaaagttcaattcttgtgcgttggtgaaacgaatgttcgtccggaaagtcggcatcgtcgtccattacctctgggtcatcgtcctcagagtcagactcgtcgtccagggagtcagttgagaaaccgtcgtggttgtcgccatcaattccctgatgctttttttctgtaaacgacggctggaagttcgtgttgatggaagagtctttttgagtcttcagcttcttagatataggcgccatttgtctagccgagtggtcgtctatgtcggcaggaatgatggtccgatatgtttgctaattctatcggacaagaaagtggagtagttagattttgtaagttaggtgagtaaccacaccgctttcgagcaacgacaaacacgtgatttaaaatccgctcctgccttcttctatttgttgaggatactcatcctcatagcaccaccgtctgagaaaacatcagcaaggagcgcgtatctgaccagaagacgaacaacagagaccttttcgaacgtagtagcattcaaaataatcgttttcgcagagcattaagttatgggcgctgcgagcgcctctcgacattgggatgatgttccagaaattgcgcgggcggcggcggcgacggcagcggtagcagcagcagcagcatcaacaacagcggcagcagaagaagcagcagtagtcgtatcatcattgtcaatgaaacaacatttgataaagagagtttttctaatatatatgcagagactatccagacttgagatagcataattctcgacaaggtccacgcttcctttgtaaggacacgtttctttgtctggcttctggattctgcgcgaaaacagaatgtgtttatatacaaactgatcatgaagaggaaattgttattcactatagaatataatgcaactcacgcaacatcaatgaatccgaaccaccagatattcgtctctagaacaagcatgttgagctctgaatacactgagaccgtaagaaatctatcaagttaaacgaaccgggctaataagctataaccggtggattacatcattctagtgctaaaaccccgaacccctccactttcttaatcagatcgtatctctcttcgatcgtttttgttgttcaagtagacgactatagtcagctccatccttaccatcaccatccattcgacttgcaacatgacagtctcacctctatctgattctattaccttcaagaaatctggctttgtggcaaaaaacaggtctgtgtttttcccgtcgttctctccgaataaatcagccgtataaatacatgctgccgaactgatcttttttcggcacccaacggcttttcacataggtttctcaagtctgctatgactgagagactctgtacgttttctcaggaggaccacggcgctcggtttgtcttcttcatcgcctgtgcttagattgcatgaggtcctagatttgacacagactgtctccgcgcgttgatctctcatagagggaagtctactcctgaatatgtgcgactatacgaagagtggggaaaaggcgagatgtacgtccatcagtttctgctcgaatctaaatttcttgatcattcatattgacactcacccaatctgtccagtggtgtgatcgttcttggaaacattcccattgatcgaactgctctcgaggctgctggaaacatcgtgatcgacaagcgatcgtctttcgatcctgttgagaacatcaagcctgtcattgaggcctccaaagcccacggaagcatcatcattggtcagcttactcacggcggtcgccaggtaagaccttttgattcaacgttcgtcaacttttcaattgtgtgcgatatgcgctgaagctttcgtgctgttcgactggtcgatcgtgcgctagacctcggagaacatcaactcgcaaccgttatcggcatccgatattcaatgcccttcttttgccggcatggccttcgctgagcctaagcctgcgtcgcttgaagaaattgacgctatcgttgagggtttcgcttatggagccgaagttctttacaaagcgggggctcatggggctcagttgcacggagctcatggatagtacgtttgtgccttgaagactgtcgacgctatttttcccgttatgataagtttctgatctgtcattgtttttcttgagcgcatctacagcctcttgtctcaattcttgtccgctcggattaacaagcggactgatggtacgtttcgctgtcctttattgagtcaagttttatgcttatctcaaacggctgatgcgtttaacaaacagattatggtggatccctcgagaaccgaatgcggattatcattcgaattatcaatgagataaagcaacgaattcctgaggacaagttcattttgtccatcaagatgaacaggtgcgctgcttcataaaaagagtcggtgatgagttgacgtgaacggttggttgctgatctatcacactgatctgtgtatgctggaaatggtttacagtgccgacttcgcggacggaggacttacccctgaggaatcttctactggtgagtttcagaatctagtataattgctctgatgaattcattctgactttgctccaaatgtccatcctctcgtagttgcccagcagctggataagcttggtctagacttgatcgaagtttgttcaatctcgtcactttgtttcaattcaaagcatttacccacgttcccttccatttatataatgtttcttctgcgcactcatcagcttagcggagggtcctatgagtccatggctttcgaacacaagaaagagagcacgatcaagagggaaggatatttcattgagtttgcggaacacattcgttcgtcattcatatgtctctcttctcttgatagaagctactagatcgtcgatctggaacctgtttctgttctttcgctcctttttttttctttcacaaaataggaccccacttgacgaatgccgttttggccgttactggtggcttccgaggaaaggctgctatggagagagccgtcgctgagagcagtacggacagtgcgttccgttctgaccaattctctagcagcgtattcttcattattgaaagaaaactgatctgtctgattttggatcatatcgcgtcaattaccattgatctcgaccgaaacagtcatcggtctagctcgacctcttacggctgaaccgtgcttctgcagagacatcctttctggcgcaatatccgaggccaagcccaacaaagttgttcgtcttcactctcggcctctttcttatcttgttctcggtatcataaatttgatcacaatatgcatctgtttactattcctagccaaccgccgttcagactggaacctccatcgctcagattggagcaatcgggcatggaaagtctattcccgacctctcagatgagaaatcgtgagtcctcctttttccaccaacataaatatttttcgtgttattaaactcaaatattgtgctttactcctccttgatgtcaaaaacgtgtatcacgacaatcagagctcaagaatgtttggacgccgtcatgggcaaagctcctcctaaacaaaaagttgacggccacaacaccactgagtacgctggtcagaaggaggaatagagtttctacagtcatgctgtttcttcttctgttatattctatccttctgtttaagagtgtcttctaagtgaggtttcagactgtctgtatttccactctgtacatcgagtagactggacggtgttcgttagtctcttctcatctttcttccacttcatcaatagagctatgtcgttcttgtgatcaatcttaaaagacgccaaagggtatgctcgatatcagattaggaacattttcagcatttcatcttaacaggctaagcagcttagttgcaaatggcaacgggaaacaaaaacatatatcattacgatgttataaccagaacgagagtgatagtaagagtggtacaagtagatgaagcgaaggtatggaatattagaacccaaccactcagattctcttttcgatcaacgggattccaaggcatttactacaagcattatttttttgagttttatttaagtagacctatattcccctagaaggctgaggcggtttcgatggtagcccctctggcgctacaggaagggtagaattcgatgccgaagtagtatcggatgaggatgctgctgatgactttttcatttgagcgagttttgcttcaagagccgcgatttgggcgtcggctctgattggaatattggacgtacagcgtttaacgaatagtactcttgtcagtccgttacacaaaacgatacattcgaacagaagagaaacggaagaacgaacccttgaggagctcgttggtttttgaccatactcaacgtagtcctcctatcgtgagatccagaacctgaattcgagccgtatttaccaccgttcgatgaaaacgagcttccgtccccattttgcatcttttgtgacgtttcaaatccatcgcggttcattaaaatgaagggtaattttcagaatgttagctattagtaagacgatcttcacgatgatgatgatgatgacgatgatgataataagaggggacaagagaagaatgagaacgagagaatttacctgagaagcgaacgtcacgaccaagtttcgtcctcgaagcggcttgtcatgtagtcccgtcaaagctttcatcgcgtcctgtgcacattcattcgagtgacacagaagaagaatcaacaccacgtatagatgacgatgacatagtattgtaggtagaaacgaagccagacaaactaacctccttagtagcaaactcgacgaacgcgtaacctctcggtttccctctcatcggcccagatttatggaagagaaagtccaacttggcaatcttgccgaaccttgagaagatcttgatgagagcgaatcttgcgcaattagaaagcgaatatgtttcaaaggtttcattcaacgagttcgataaggcaattgaaagggaaagcagaaggtgcgatagtgttagggccgacggtatacatcaataaggagagtagagagcatccataaaagcaaaaacaacctactcatccacagtaaactggagattgccgacatacagcctcggcgttgcgttcttagatatctccgaggtagccatagttctatgctgggatttcttgtggccagagaacaactggtgagtgagtgttggtggagaacacggtcagcgtaaaattcatatttactttgaagcccaaccgatgacgctctctcgcttatctcctataaagcaaccggccaacggactcgacgacatcaatccaccaccgtacttatcacagagaacatcagtatcgtacgtgcacaactaggatcactccagagggtgaacaatggctttcttgatcccactccttgcgccttcaatagcagaggcgtcggccaacttgggtgagtttctcttatggcttatggatctataccgtgctgtctgagtcacacactagacgtcctgttgaccaacccgttatgatctttatgttcatcaaacgatgcacaccacagcaatcggtatatccaatgcagttcagggaacttcatcctcggtgtcgattcaaatcgggaagaaagtgtttacgaataacaaagggttcaacctatctggcttaccatacgaacttcgagaaaagatcctgctcatggcactggatgaaagcaagaggtttgttgatctggtttgacaaaccgtcttcatcttcatcttagactgtctgatcaagctgacatcttccatcctcttcgaagtcttgttgtacctatactgaagctgacgaatccgtatggagtgacacctcaacaatacgccgcgctggaaaagcgatcacctttaaatcgctcaaacccaaactaccgatcggtcatgaacgagtatagatcggccaatggatatccactctcgagttggcgatggttgagagtttgtagagaatggtgggctctgttgaggagggaattatggaagagatgtacgatcgatggatggaatccgttagtgacgcttttcttcttctttctgacgttgctcttccagagagtgtgcggataaagcagtggactgaaatagacgagaaacactgtcgtttatagatatcaagtgtttctacgtctgctggaaagcgacgactttcatgccgctccatttatcagaacactcagtctgctagatggcttttcttccccttcggacctttgtacgtgaactgttctagccaactgtgtgcgcacgagctatcactgatggatttcttgatgatcatgccagatacaatattgacatcaccaaaaatgaaacacttggagacgctcaacattctcccgatctatctagagagctctgcgtttaatccttatttgcctccgcctcgcccgttcccattcggtgttcatctgatacctgtcggaacgatccgatctgtatctatcggtctaccactcgatcaatgcacaaatcagaccaccagacgtcatctttcgtctctccaacttgattttctgggggtcaccctaaaccgacctagcgagcaactgtttgcagagcttgccgatctcgtcggtaagaccgtccagacaatctcgataagatacttgccggacctcacggtaccgctgagagcctttgtggacccgggggtgttaactggcccgtcgataaggtcgtttgagagggtggtgatcactttgcccaaaatcacttcgtttggtagaataccttatcagaaccagccggaagctaacgaattgggagagagagtggcgttctcccaacgattgatcgatctattggatatggacaacgaggggccaacggtcagggtttctggagcgggcgacaggtttgaagacaaaggggacatgaatagggacgagcaactcgaaagtagaggaggtttaagaaaccggacggtcgtctatctaggaagaagccacggagacgaagaggagcatggtctgtcgacaggccgacgaatctggccgttgaccgatgagtttgcgtttgagcccatcgagaaacgacccatgatggacaagaacaagtcgggatcgaggctaagtaacggccaatgcgagggcgggaatgacgagaaagacgacaaaccggacaatacggttgagtcttgggaacgccagactgatctccggttgttcggtgggttgattgggattcgaatggagtccaagaagcgatgatgtgtacgcgcgttgttttacatgccgttatctgctctgtatcctttgtatcgtctacatgttctgtatgttctatatattgtatcttacccaaacgtcctatcacatctacatgtatcatttatcctttgaattcatgagccgatacatctcatcccaggcgggatgtttctcaactgcgctagtcactcggctctgaccggcccggggtttatcttctgttggtagtgctcgaccggacttccttcttacctgcttaccttcatcccatcaacgacctttgtttgcttgcttgcctttcgctcgttatatctctggtctagtgttcgtgtgtaggacaacgatcaagattgatacactgaaggaaactggagttttcgtccctcggtgtcatctctggcacgatgaatccgacggcggtctgttctccgacatcaactccttcctcgcctagattgcattcatcacattcttcaccacagacaacagcgattgcagcatcaacaacagcaggaggcttctatatgaagtctccctcctatccttctactccagctcctcattatcggacaagtattcattcgtctcacttcccgcctcagacgcctccgcctggttatactcaccctccacctccaccttcgcactcacacccgtctctgtcgaatcgtcagcagggacaacgccatgggcattcgcgatcgaactccaattcaagcatctaccattcatatcagtatcaacataaccaatcgcatccctatccgtttccgtcgacatcgatggtagatcctgtaagccctggcggcttgacaggtttaggtttcgattcggccaatcctgataggcaggttgtccatctagataggctcgatgtatcagaactctcgagagccctgcggagggcgagagccgttatgggatatcaacagcttgacggagacgaagaggatatcgaagagggagtagaaggagagagggaagaaagtctacccagttatagatccagaggcaggggtggtacgtctccgatgttttcgatctctttccttctactaactctaatttggagtgtatctgacctcaccctcatcatctgcttttgtctatgaaatttcctctccggcgcagtgtacggctcgtctagatcgacccttcttacttcgttctccactggtctccctcatcctcttccttcctcctcattcccatccgactctacttatcgtcctaaccctaaccacatcagttcaaccagcttccaatctggtccttcccgacgagtatcatgtcttccctcagctcaaaccggtcccttcttcacagaaggaactagcccaattctctgtccactagaagatgcccaccgatcgggcgagatcgatctcggggacggagaccgggatgcggaggaggacgatgttagagtcagtgggtcatgggtcatctggggacttggagtcgggctgggcataggttcgattggatgggcttatgtctctcatggttgaaagtgaaactccaggtcgagtccggtcctgaatatcgagccaagctcgagcggggtaacaggatggtgtatctatcctttcttcattcttttctttcccataggtggagcttccatatatgtttggtatttgtatccgtactgttgtaggtttgtagcattatgataagggacatttgcgaggataacaacaacagagttcctcttcggtacataacttgagggacgaggctacttgaaactctaaggagaataatagatctagacggactatacagacaagtggcttggaaaggaaactctaacgagaaacataggtctcaaaaggcatgaaccaacccaaacggtaagagacagataagtaaaggaatgagaggaacgagagaaaactgttaccaatccagcagagtcttccctggatctctcctcaaattacctcctcctcttagatgttcaggaaggacttgacctctcaatatcgtcttttccaccacgtccacacatgccttcggggtcactctgccgtagtaaaggatggaacccgatgggaaacaaatctgttgccggacaataagaagaggatcaagaggtcgtcgtcgtttgatgagatatagttgggcgaacaaatggaaaacaagcacaatgggaaaggaaaaaaagaggacgaacgatcatgacaccggcgtatcggtgtccacccaaatggctgattttgaagacaccgacttccttacttccttccccatgcgatctagtatcagaactagctccagctgcttttctcaacaggtccttcaccgcctgatctcctccctcgatcgactcgagccgttcggagcgtgggaggtcgtgtaaagattcaccggtggtgtccgctgtgtagccgtgtatggagagagtggaggagatcacctgttcaagtaagtttgccgcgatatgacatttcttatcccttgtcttgtgggagcctatggtgggtgtgtatgattgatttgatgcaattcagtcaagtggtcataagcgcgcagggcgagaagaaaaggacgaacaaagcagaacgacagctctgtacggcaagacccaactctccattccatctttcaccgtgtcctgatcagtactagcaccagccaacccgacggtgggactcaaaatccgatcgtagagtctctgagcgccaggcttgttcacattcacgttagaaacgactttgaaatctggaaagaccaagacgctcgtcttgtttgtgtcgtcttcttctgtcgggtcgtcaaatggctcgacactagaagcaaggacggatagtttaccggattcagaggtttggtacactccggggatctcggttacagcaggtgatggagaagatgagggaggcggtctggtccgggtaacagattctaaatagaatgctaacgagtcctgatctgatgagcttttaaggtaagaatgacaataaaacgacataaagggatagcgtaagattcaaccagatccggacaaatgaaggaaagtaaggattaaaaaaaaaaacaaaaaaaacgcacatatctcgaggccaatccgatttcgagctggaaatcaatgccaaccgatgcatcggttctgaacaagattttagccattctacctacctctctctttcctctgctctcgcgtttgaacaaagaacgatcactcactcgtggaacccaacatctcgctgtcgtaatccactccgaactttgccgggaaaccgtcgccttcctcctcttctccttcctgcccgccgactctaatggcctgtccgtcgactccctctccaaatccggtatcgcacccatcacactcgtcagggagagagactggaacctgtgctttcaactcgttcacccatttctcggctggaagtgtaggacccgtggccggagctctgtcagccgatgagctgacaaatgattttagcctattaagcatgatgtatccgtgtggttgtatgagtgggagagatgtgactgatggatccgacaagttgggtttgaaggagaaaagaacgaagagatacgattattaaccgtcctcgttgaatgatgttcactttctcacgttagcggcgcggtcacttaattacgccgcgtcattcaatcgggccggtcccgatttgcttgcttatagttgccacatgtgttacagatagaaaagcacatgctgattcataaacaggtagagttggatgataaacaggaaattagagtaagcaaaggaaagagagaagcatgaacggagagggagagattcagattggaatatatcgagtgaaacaagtggagtgacatgactgagtgatgtgggagaagatggaaaagaggaaagaaaatgcaagcatgtctaacagagcgactttatatacacttgaattctaatgataaagtatctacagaggaaaggcagccttaaagctcagaaacctcgaaagtgcgctctctcctgtttttctcctcggtctctttcaaccgcaacctttcgacttcttcctctgcagctcggagggctgcgttcctctttttcttgtcgagttctgatggtcaaagggagaaggaatcgttgtcagacaagatagaaatcccgttcaaaaaggataacgaaaactcaccctggaagaagagagcaacattggaagaaacaacgttgtcgtcgtcctgctcgtcctctgggatttcgttcaacttctcctgaagcattctagcgtaagtctcactagaaatttcgaaatagccgccagtgcagagagggaaagcaggtagaatcagcaaactagcacggtcgactaatataattgaaaaaaagaaagaaagacacaaagctctcacctaagctcctccatcttcgcagctcgatccttctctgggtcgtaagccaaatgtcttttcaaaaccatcgtctcccacaagctcaagtgtcgtttgtgaacggcgattccatggtattctccagccttaccagcccggacgaacgaccagtatcgctcttgctctctgtaaattcagacatgcgcgcgtcagagcaaaggtcagtaagtgagggtagaagagaaaggattttttagagaccgagaaaggcacggaccgaagatcaagaccggtggtatcaggaatgaaaactacagtgaggacaaaaccgagaagaccgaaccaggtgacgacccagaactttgttctcacatcggccaactgagtagagtcaaatgtttatacatgttgtgaaaacaaggagaagagtaagcgtttcctcttgagtaagcccatcaaagtattgaaagatatcgacgaacgtagttgtacaagatcgcgggggccaaagctcccaactttccagcggcagcgctcagtccgtggcaggtagcccgaatagaagtcgggtagacctcggcagcaagcaagaaagtggtagagttcggaccaaactggttgaagaacgaagaaagatagtagattgcttgaagaccgtgaatgttttctggcttgatgagatcggtgtacatggcagcggctacaaggataaggataaagtccatgatgaaaccaacgctctgcattcggactcgaccgtacatctacggaggtgggataagaaacgaaaagagtcaggatgttgtggttagaaaagaacaactccggaagagaggccgcaccttgtggtcgatcaagaaggcggcaaggtagtaaccagcaagagaaacaccaatgttgatcaagttgtacaaccaaccatccatcacggtcgattttccaggcaaaagaacggagatgaacgtcctttgatacaatagaacaagttgggtatcagactaggatctggttcaaaccaacagaaaagaaagatggactaacgactggaagagcttgttaccgtagaagaagaaatcgttggcaaaccaggttccacacgttccgatcatccttcctccaaagtgacccatggcaagtttcaaactagtggcatcgtaaccggtaaccgcgccctgtttcttcttcttgttctgaagctttcggtcgacggaatagtctccatggtagaatcggtggtaggctagccagagggtcatgacaccgacgacagcgaactggactcggaaggtccattggacagagagggtactgtaaggtgggtttcctgatccatggtggaagatgatcaaaaggacgctaaagaaggaggagaaggtcagtatattatgccttcttgtggttgagagaaacatgtggatagcgacggacatcaagatgacttggttgaagagctgaccccatccttgcactaaagaggccgagagcatagtcaagaaggaagcgacgttcagtccaggcgctcatgagggcacacggaatatgaggtcaaagtcaatggaagacatactcaggaaggcaagtccgacgtttcgtcctcggtgaagtcggtcatcagtaagggcttcggcagagactccgctcttagcttccaaagcagaagtcgacgtcatcgggtattctcctcccactccgattccgtacacaaacagacaccatccgtagcaaatctgtagtgaggaagaagacagtagatgaccaaaaaacaaaaaaaaacaaaaaaaaaacacaagcggttaagtgctgagaagatataaaggtaggggcagaggcaaaaagagaaaagaactgacaacccagccgttcaggtcaacaccccaactggcggtcaacatgaccaaaccgagggtcatgatgagagcgtcctggacgagaccccatcttcttccgacccaatcaccttcaaacccgacgaggatctgaccgcagatgataccgaggatctcaaggtactcgatggcattgatccagcctttgctacaaaccttgtgattggagaaacattgcggccaaactgcggcgtacaatggcttgaggtttccgatggagaacaacgttgctccctgatgatatgatgttgtgtattaaaagaatatacatgcactcaacgttcattagtccgaacgtttcgactatgaacgtgggggtttaaaaaaaacctcaaaggggaaggcaggatgaagacgatgaagcgatgacgaacctcggtaaagagacccattccagtgacgacatagttcgagaagtatgccgagaagggcgacaaaggatcctgtaaacataaagggatgattcatccgtgtgtgtatgcaagtgtatcgcagcatgtggattggcaggttgcaggacagaacatgttgagttgtgagcggagaaataaaaaggaaacttttaatgatcggagattccacaccagccggatgaggacgcggaaggacgaaccttcttgaacatgccaccgatgacagaaagctctcgtttagcctcctcagtcgactgtctgaaagcaaactgaactcgacctatcgaatgaatcgaacaaatggcatttgtggtcaacggtcaagacttctctagcctctctgaaaggaagggaagaattcaaagtaacatgaaacacaacttaccggatctgggcaaatcagcccagtaagttccgttgtgataactatccgctgggaagaactcttcaaccaacaattcgtgaacacccataggagtcttgacacccgaaggttgccagtcctgttcttgaggcttccccttctccttcaatgttccatcgttggatgagtcggacgacgacgaggtcgagttgttgataggtcgacccttttcgtctgttatcggagcgccaagtgagttgtgttcgaccgagaaaagcgggtaaccttgcgcgttcccaacgggacctcctgagcgaggcatttcttttttgatgatgagagaaagacgaggagagaaaacgagactaaggagagagttgaaagtagaaggtgttggaccggaaaggaagtcaagaacgggaaatcttatgctgtttcgttttggggtaaaaaaatattgaatgataaaaaatgatgtaaaataataaaatttaaataagcccaaaaagatcttccggaaagatcgtcaccggctctccgagccgatcaggtactagacggtggagtgttgtttttgtccgcagctggtctatttttataccctgcacgcgacctggttcttatagtggcacacacgttcgtgggagaaggagagcggagtatttgatatataagcgattcacatatgtgacacactgcgatttacgtatctatctaagtgttgtcttgctcttgtcggtgtctctgtcttggactgtttgtttacacatctctgcttgcgtgcatgtgtatattctcctctgaatagacgatgtaatggactcatcgtttgtacttttgtacagctcgtacatacactcacacgactcactcttgtgatgccatttttcatatcagatccaatctactacagcccgagctgcgccctcgcctctctcagcacggcatctattgcctgctccacatccgccagcccagagccctcatcatcgcccggttggttcttattgttgacggcctgagcgactcccttttggacaagggcccaagcctctggctcggtgtgagcctcgacccaacggacatactctccttcactccatccgtgttgctggtgaggtaaagaaagtggcgaccgaacaagaatatgatgtgatactacgagcgcagggagatgaaccgtcctcgccgggtcactcaacaggcaagtctccaagaataagaatggtcggaaagctcgcaagcaaaggtacgcctctccgatatcttgaatcttgagcgcgttccttcggtcgttcccgctggcggccaacaggaaggtaccgagcgagaactcgagctctgtcatgtcgctcgtcaaccggagctttccgctctcacccaaaggagaaacgatcgatgcatgaaggacgaacgtctggatgatgtatcgaaccaattcgaccgtccattccttcttcagaggaccgacattgtaaggcgcaagaattcttgtccggacgaatgacattcgttcttgaaggtctttcatgtatggactgctcgctccgcccatcgacatcatcgaaccatcggcttccttcgcgccatcagcatagtccacccggtgaagtcttcccagcgtattgctgaactctcgacggatcgcacccagcaagtcggccgtatgtttcttgtacagtttctcgagttcctgccaatgagtgattgaatcaatcgtaagcttgggcaaaaaaacctcatatcgcatgcttggcatcatatcaaatataaattagaaaaaaaaaagaggaaacgaaacgaaccaggattgagggtcgaagcaaattcatcacgcgttcattgtactccccctcgatctttcctacagcggaatggcaatgataaagcgcgctagtcagctgcgcgttcaacacctgagcactagtctccgaggtcccggtcatcgtgtaagccgcgttgtccgtgatcaacagattgtccatcctcgatcggaatccaccgagagcaactccgacgttccgggcgacactcctcaacaacaacggatcaaactttgcagaatctaactcgtttgttatcacccgagctattgctaggccctcattcgcaccaggtggcgatcgaatgccaccggcgaacgcgttggacaccacttcgttcacccggcccgtcgaccgcgttagatattggttttcaaacgtcgagagcgatcggagtaataacaccgtttctgggctaaaagtatatatgtgttagacgaagtttcttctttttctcaacgcagaggacaagatatggcaaggaagaaaacccttacctttgttggttttgggtatagaccgtatcggtgaggacagaaatttttgcgaaaaactgatggaacaatcgaagtagtcggggataacctgcgctcaacgtttgctggatgaatccagaacctatccggtttcaatgagaagttaaagcccagtggtcaactttcatcgcgcaatcttttcgacgacaattctttcagtgaggatatcatacttcgagctgcttctttactttgagtttccagcgtacgggctaatgtcgtccagaatgtataactcggtttgttgtccaacacctacgatagatcaagaactgtttttttagaacttttcccacaacatatccactatacaaatcgaattcttatgaagacttcagaactaaccttcatagcttcatcgaggaaagcaactccagaggccggatcctttttgaccttcaacaccttttctaagatatatacctgactcaaagaagacaggtaagaacagagacagaccgaaagatcaacatccggtcgctcaggtttacaaactttacaatccagaggtatatgaaacagaattcaccttgatacaacactcaaccatgtcctcaatcaaattactcattcgggcccacagagcattcgcccaaagctgggcattttgcggggtcggctcatttttcccactcgcatttccagaagaccgatatttgtatccagacgtgtcagacggggcgacttctggtttaaagagagggaacaaaatgaagagtaagaaaccttgtcggcgaggatgtcgcgccaagaatcggatgctcgcctttgagaccggcttccttggccaattgagaaggatcaaacgtctttttaatccgagactcgacagcttcagtcaggtccccaagcaaagaagacacaagtgatggcaaaagcccaagattgaatgctgtttgaagagccgatgccaagatcggttggttctatcatgatcaattggagtcgatcgaaatgagaatgatgtctactgatgagcatagagctcaccgcccatgatcgcaagttagatataatcatcaggagtacgaactaattttgaaagtcctttaaacacttgattctccatctcactgacgagtgtttccttggaaatttgaagaacaggaaggtatctggtgacctggttgatggcagtaagtggaatcggtcgctcttccgttgaagcggtttcctgttcttccgccgaaggcttcaaaggatatgccagcagggattctgtacgttcccccaaccatcaaatgttctatcagcttcctgccagcttgcagtcaagcaacacagttgtcgaatatggactgacccatctctgctatactgattgcagccttgttcatcgctcgttctttccttccttctccctcagccttttcctcctcgtcagccgtgctgatcatctctccgatctgtagttccaaccgtcgggccacaaggataaacctatgtgtccgtcggaggacgtcttgagccttctgaagatgtgataaccgagtaacagacgtctggagcgtttgatgaggaactcgaatcttgagccgtagtcgctcgagtgaaagcgatacttgagtcagaccgtgtcgaacttgggtgagtgaagtcgaaaggtgggtcgttgtagatgagagcgagaggagggaggtatgatgcgtcgtgatctataaccagaagagagagatcagccacctaaacccagtaaggaaggtcagaagaacgagtctgacgcctcgaaagaaaaatactaacctctgctttcagctgcctcgtcacttcatcaattccaaagttcaacctggccagcgtgagcgagatatcaactttggactctcgttctcgctctagcccagacacgtttgaacctcttctacttgtcggtctgaaatctgagcccactgctggagccaaagccgaagtcgaaggcgtcggatcagaaggatggtaagactctccagcgagaatgctagctgagagttgatgaggagagaaagccggatgaagatagacctggtggtctgatcagaaaataatggatgcccaagatgaagcttgatgtcagccacatttaaattgagtattctaagcgagacaggccgactacgatctcacccaagtatggttcggacgacattgtggtcaatcgtgcaagagctgttgatggacagaacgatatttagagatggaggagcgagtgaagggatagaccgagagccgaacgccacagaaccaacccggaagctgtgcaggctcctattcgtcctgctctctgcatgataagatcatcttggctttgtttctctcatcaattgtctgcttcttcctctcgttcaaaccggccaatgaacatgatacctatataggaattcaacttagacagtggaccagagtgatgtacagcgaggcatatataggaagagaaactggacaattcagcgaatgggtatctagcgttttaactgtgttctcatagccagatgagcatgtcacttgttctacgagcgcatagggtatatataatgtcttcggtttctggtacaaggagataatgaaatgaagagtttcactttgaaagtaaaaagatagagggctgtgcgctcaaggcaatgatgatgtatattgcttcatgagtctttctagtctgttaaacacgacgcgtgtgacataagatggaagaactatcagtcgataacaccaaaaccttgataagaatgaaagagaaaaaacctgtttttctcgtatgtgacatgatctagttctcgtctcaatgaactaagccaaggaatgcaagaaagaggaaacatgcaggcattcgatattaacttttctagtcaaaaagaccaacgtaagaagtaaaatggcttacgcgttttctaaccgaagcgcgtttcgatcggctttagcaatttgaagatctcgtttcatcgccacgttggattctgcgcctggcaaattcatgtcagaatactagatagtgcacagttcggaggaaatccaggtatcagatttaataagacaatataggcggttcaagatgcgattatgtataattggacgcaccatttgttcgagctcctcgttaaaagcctgcataaatacgtcccacaaggtgcaaattagacaaacataaccagccatcgaaaagaacaaaaaacctcggtctttaacttacgtcatacaatgttgcgttctcactcttgatatcaacaagctcaaggccctgcctttcgattaaactgatagcttcctgatgtgtgactcgtagctcctccagctctcgcaaaagcttgagagtgttcgacgagaccggcgtctcagtgttctagtgaggcatcaatgttaagagttagtaagtgtttgttgatactaaaacaatgtcaaagacatcagaataacgagtcacgaactttgatagaaccaacacgcgatgaactcggtgttgattgatttatagctcttgaagacccgccatcaccggtctccaaaggtctcaatgctgatctcggactgtcttctccaaaatgtctcggtttcttgtctaaagaaggggatagactttccattgattttgcgcgatctcgcttgaggacggttgatggcgaaggagaatctgcctcgtcatcttcatgcttaaccgctgttgatttggctgaaggaagcggtcgtctgggtcccattggacgacgggaatctgaagtcgatagcgttcggccgaccgagggggaaagaacttgttgttctgatgtaggggacgccatcagatcaatcctgttagaagctttggaaggcgaaagagattgagtaggaccaaatccattcagaggttcgaatcctgatgaagaaggaatttggggagtcttgttccgaacacatagcggaccagccgtagcgaaagaaggggtcgatggaggtttaggccgtgatgaacttcgtgtcgaaatggaacctcctcgatctgatgatagagagtcttttagacatcacaaggaaaactcccgagccaagttagcaacagcaatggaggcagagtcaaagggataagcgtaccgaaactgagacggttgacttcgacaggttgtttgacctcgacctgttctactttctgttccactgcttctgaagagatcacttcctcaaccatgttctgcccattcttctttgccaactccaatcgttctgtcagctcgacctcggaaccatccagcagttcatcagttggaactggttttcgagcactatatggactggttgatcctccccgggatcctatacctggactcttcgaacgaggactttttgaagtcggacttctcggtgtcggggatttctctctagggtgatagtcgctgtaagtcgtcatggaagacattgtcgatcttgtcgttgatctggtcgctgtactattcatagtagaagatttagaaccgacagatcgagaatgtcggtgcgagactgatcctttggaaccaacagagccagaaccgaacagatttctggagatgacatccaggcccaggattggtcgccgactgacagcgtgagaagacggagtattaggagcggaacgaggatccagtcgaggccgataaatatcgtgttgatggatttttttgatgatattagacattacagttatcgtcggtgtgatctcttcctccgcgtctagcccagatatcttattcgaaaccctagcaagtcctccgacgagaggttgaattctgaagaaaagtgacggggctcgctcatcatccgtaagcagcggggtcgatcttccggattcgtccacctgaatgactactttcgacttggccatatcctgctcccattcatttctcctccaaacgttataaaatccttttgcacactctcctgcactgtttccttcacttgcaccgatgagtctctcttcctcagtgctcgcaaacgccaaacttttcccgcctcgagcacggatgagcgtctgggcggcccaaacattctggatgaaatggtatctgtcagaggctatcgaggctggatcgatcgaataggggagaggaggatgaacgacagtgtaggatcggaagggacggttggaccaacgatcggactgatcgacaggcggatatggtaggtagacagagaaatctatcagattgaggaagcagagaggaaagagttcaatatcgtttttttaggctgaaggtctgtccttcagattaccgaaagctgacgagaaagacgaacctcctccacctgaatcagtgacgacgagatccaacaatcctaccaaacctttcgaactcatcttccccgttgacccgtctgaactatctcccgaccttctgttcgacgacattgacattgctgacgaagagttcgacgagcccgcttgagaaggcgcgacactgcctctccagagtcgggctacgtcgtccaacccggtaagttttcgcccggacgcgcctgcggatggtcgcttggcaatcaagatacgatctgagaacagataaagtgtcgaatgaagggtagcgatgtttccaagaggtgaagccggagaagcgtgggaatttgtgatgaattccggtgggagatcttcgacatctactgaggctagatagtctcgattattgttgatcaactcggcctgtatgagatacggaccatgagataaacaaaccccgtcaattgtaagtaacaaacttggttgcaatgaggatttacaacgtcaaaggaagaactgatacataccgggaatccatccacgctcttcgacaaagccatcatgaccatcatccgcttcgtatgcggatctttctcacatgtggcaacggcagtagcgatatcggtcgcttccaccagtttctgcctctgaggatccgacagagacatgtgtttgatcatcactatgttttttttttttgcaagcataaacgaccaaaatgattattagtcaagatataaattcgacggaacactgtgaacacggttcttgacatacgttgccaaatcatggtgtaacgaggtatgcgctgcacgggctccatcagtaattccctcaagccgacattcgagattccctccgtcttgtattttgaagcctgacggcgcgacatgcatttcaaaacaaaaaaagtagatcagacttgaaagcttaccaagtgaaagcacacgtgaaaacgtatgagtcgaacagacagcgaacgtacagaaacgaaatcggcaaactgttttcgtttgacgatcatgtctgcaaacatagtctgcgcatcttcacatttgtcataatacgtcttgtaacagtcgaacgcgcgaagatccttgaactgatgagacatgcgcgagaccaaagggaaccaccgtcaagaacgacattaaaaaacccgaattgttaggaagcacagtttgagaagaggagaatatatgacgaacatgttttaaggctacatccccgataccccattcgtcttcagtgtcgaccttatactccgtactatgttgcccctgcccgatgacagtctctagatctgccaagaaagcctcattcactttgataataacatcaatgtttccgaacagctgattcgcgttatataccggaatgattgccgtcgagggatctttagaaaacaaccgaagcgggtcggcgtaagtctgtttgagcgcgcgaagtcggcggacatatgtctgttcagtcgacagcagttcggacaagagcggaggaagcttggaaagattcggaagcgaaggagatgtctaggaagcgtagggtgatatatgagaagcatgatcagggagtcaaaaccaatccttatctacataacacgatatggatgttgcttgtatctggagagcacaacttaccgacatgatgtccacgctcccactcctctccattcttcctggaacattcagatgtgacctctctgtttctgatgaacttcgattattcgttggcggagccgacgatgaagaaagtgggacggaaggaacagcaggatagggtatagcatgtagttgatctcccaacgtcgacaagaacaagtttgtctctattggcgacagagcgaccgaggaagaagatgacccgtatgagcatgatcccaggacaaacagtgcctaactggagaccaaagagcagcagtaattggaaaagaaacacaaggacgaaccatcactctctcttccatcctccagaacgatatcacagaagaaagctcttttcaacagccttcccgaacccccactacttcctccagaatgtccgagcattgaactcgttttgaggcctcctggggttcctccttctccaccagctgactgaggtcttcgcccagatgccaagggtttcacaggcgatgacccagtcggatgagtagatacagagccagaaacacggccagatctggagtccgaagcatgtgtctgttcggcaggaaggccaggaagagatttatgatagatcggagaggcgggctgggtagttgccgcggcaaaaggcgaatgctgacggtgttgttgtgattgatgaggctgacgaggatgatctacagtgtcaggatatggagatgaagtatgcatcttgattcaagaagaataccgtctgggtctttcagaacaagaatagcagaaggtcgtttactggatgttgtggatgtgactgagaaaaggtgaacgatggaaaaacaatggaaattccggttagaaaactctccaaattcattaggccgaaattctgatgctttcgactgggatcagtacatgtttcgtcacattcttaaacagatcttcattcatagcatcacagagggtgtaggaaaggaaagagcaaacgagacaagatatatggcagcatgttcaaaaaagaaaaacatatcagcgtcgaagccattaatcccactcgtcgtcactctcttcttcttcatcgctatcacccatgtttccctttctcgtactcaacgccgcagccaacgcgcttgcaagatcaccacctccagcagaattgtcctcaggggcagcgaccgagatcgctcctgcgcctacacctgctcctgctcccaccgccgctgctatggccggtgatgccgaagtaggagcgggaggaggcggtgctctggccggcggaagcggcggtgcacctcctcctcctgcgtcttcccttgcagaccctccgctctttgatttgaggttttgtattcctactccttggatggaagccaacagatttgctcttggctctgtgacttcagggagaccaagactggtcgtgggaaccggtggcgcagacccagacgatggtggcggcggaggaggcggtggaacgggtcctcgagagggtaatgaaggtgccatcggaggtggagcagacctactaggcgggggcggaggttgttgttggtatggtgctgacacaggagcgggaggaggaggaggaggaggaagtgtggacgtcggtcgggatggcatcggaggtgtagacggggtatgagaagccgctaccgtgg

SEQ ID NO: 29 - DNA, 71746 bp, Xanthophyllomyces dendrorhous
cttttggaagtgggtgccggtgggggtgctcgtttttttggttctggcttgaatggctatattcaccaaacaataatccgatgttaacgacgaatatgatcgacgacttagttgaaacatgacattcactaacaggtggacctccactcttctgaacgaaatctcgaatgaaaccttcattctccatgatttgtttctgactgattccctgactgcctagctgatcaagcaatgcctgccaagatggatcaacacctgacgaggaaaatcctgattcggaggaataacccatatgtgcgacgtgcttgaacgatccttccgactgtagcgcgcgacacgaagaacagtttaaaaaatttggtatcagagtagggagaaactcgtgagatatatagaaaaggacaacatacaggaccagagattaacgacttgtcgatcttgcctcctttcttcttcttgacggatccagtagatgacgcaccgctcggcgcctttgtctttttcttgtctttgtctacacggattggtctgatgagtacgttccgatgtgtagagatcagataaaaaagggagtctatcaaaacacgtacaatactttccacgagcgtgaacttttttgtacatctcacccgcctcaccctcatccgcaaacacgaacgcgacgtttgtgtcctgatatacaacaagaacctcgatcacgtcagctgaaaggctcgagatgtagacaagatgtcgaaagaagagaaagaggagagagaaacaacaagacacatacttcgctaggaaaggtatgaaagaatcctcggtcttggttgtatgaccacgtagatgacgacggcagttcgtgttcccagatcacgcctctcgtacccttgatgggattcccgccgaaacaagagacacgatgtctttagtacataatgcattctcctatgattaacatgaaagaatgaagcaattcggcccgctcaccaagagatcaacgaccttccaccagacacctcctctttgcttgtcgaacactaaacaggctcccccttggacgccagaatagacccaatcgttcccactttgatagaatattctgacgacggtagcagtcaggatcttgtttcccgacgggattgctttcttgatcaacgccttatcctcggctaggagtgaagatgtggatggcattcttgagctctgtcgtttggttcaccgagtgatggcttgaatgagagacacactcgcagctcattgtctcaccgatcacagatggaagacacgaggcgatgacgggacgagagttcgctcgccttacctaagcaaattccttagcggccgttctcccactcctttctctactcatacctgccccggctctctctttcttcaggtggatctgcgccttggatctcttgaagaagaggccatgtgcatcgtttgtgtcctctccattgtttgttttcgattgttctcacggctttgcgagcttcgccgaattattcgtgaagagagatctgaaagaaacgagacgaaacgaaaagatggatataaccttctgatattgatatcatatgtaagaaaaaaagccaaagaaacaaaacaaaatcacatgaacaacaacaggcaaggatggaaagataaatataagaagggaacatcctgaaagaggtgaagacatcaagataaaggagaaagaaggttctcttttgtgaaatgttcttgggttccttcaaagcaaaagatcctcgaacggatccttctttgtcacaccctgagtcccagcgttcgatcctgtcccaggagaagccccgggagagactccaaccccatactgtccgttagccagtccattcgaactccagaaaccactcgatccaccgggcccaatgttcaaactgattcctccacctcctcctcctccgttacccgacgagaattgactgctgcctcctgccggggctgacgacatgccccaacccatctgtgatgtcccttgagcttgagactgagattgagctgtctgttggtatgattgctgtggtggcggcggcggctgctgctgctgctgctgctgttggtaaggatttcgataaggttgggcatatagcgaactcaggtctgcccctgccaaaaattttgagttgacagggcccgaagtcgagcccccaaggttcaaactgggcgctgccggagcggaaaacaagtcgagaggaagtccagagaacgagggtgggggtgaaggtgctgcagttgatgtggctacagatgctggtgatgtcgatgctaatgctgcggatgaagagacaaacgactcggaagggggatcatcggcaaatgcgtcaaacgagattagagagggttccggagcgggtggcgcagtgaatgttctgtgtttcaagttaagcatcaaaagggatcttctgtcactatccgtcgagagaacaataatggaggaatagggaagctgataaacgaacgagaccgcaatatttcttcctttggaccaatcgcccttcctgcacgcctcgtatctttcgataaccccgttgatgagatcgttgattaaaagtagccgatctgttcatcattcggacatgaaaacgagtgggggtttgccggggttagtccgaaatggcgtcttgaatccatcaaagatgatcaaggaaagagagagaaaaaaagtagatggagtattcagtcgactcacccatcgaatccggctcatcctcgctcacttcgccaatccacttttgaatctttggcctagcctgcatacacacgagcgcgacctgctgataagcgtcaccttcgagtccgattcgctcgttctcattggcgctgttgagcatatcgttcaacaggatcgcctttgcctggactttgtcaagctccttggcagtctgcgatcggtagtctggtgctttctccggctcctaatcatttgtttgttttcgtttataaaccgatcaagccaagacatcaggatgagggttcagaagggcatgtttctttgggacaagtgattcagatcaaggaaaacggtcacgtacgaagcctgagagatccttcatcagttcttgcgctgccaacaaatctttcggtttccctcgacgaataagctcttgtaatttctgctcgacatcaaaaagtgttccgaaaagatcacatgagtacgaatcacctatcaactcaagtaaagcaagcatgctctcacagccgatttcatttgacgatcctcctcttcgagctcttgaggtgatttaagattctgttggtacaagtttgatccaacagatcccaaagagagtcttcgttagctaaatcatgaaaacacaatctcttgggtgaacccgacaaacctctgtttcttgagacgtgatgctggtagagtttgctcgagagtctttgaaccgataacctggtgtcaccgacagatatgatagttcatcaagatcagctgattagtcgcgaagaagataacacaaatatccgtgttggcagaatcttacccttatagcttagcaagcgatgcatatctcggatgtggactaggtcctccttccacttggcggtcacacaaatggtattcttccattcatgaatcaactaagccacgtagaacaatcgactcagtgttcttcagcaaagctcaacgatctctatcaagatgatcctgataaggaagaatggaaggagatatataagaatttgaagaacatacctccaacgtcttttgcatggtatacggcggatacactggcggtcgttccggaaactttcgaacaagctcgttgaggaattctttagtacctacttgaagttgaaacgggtatccgcagttcttgaccaaagtgtcgagtaactgtgatgaataaagtgaaaaccatgtgccgagagaaagagataagcaaagtaaccaagacggaacgaattggatacaggaattggatccaatgtcgtgtgcgatggcggttgaagcaaacgaccgacagagcggtccgatcagacttacgtgtagagccaggacagagacgtgagggttccgatgattcaccatccgaaccacttccaccgccgcctctctcggtctgtttgtcaaggaagacccaaacaaaagaagaaaaacagatgacagggacgtaaggtcatcagttcgaatggcgatcgatgtccatacgagtaaaggcttgtctgtatacgctagaaaatcccggaccaaaaatagacgaaggttgtggatggttcgacgaatgaacttacgtgttggccttcttctcatcaatgtaatcggccagctccaagttgagagtataggctggctcttgaagcgatggttcacatgcacgctctgggtaccatatgtaagtgttagatagaaagtatggacaaattcgggccaaataacgaaagtaatattgagcaagaccgacgtgaaagatgagatggagaagttgcactgggaaggcgagtacgggaaaggagactgggcatgaaggaaacgtgggcacacatacctacaagagactgtacaggagatacggatccccaagtcgatgggcctcgaggggcatacatggcaaagaagatgagttgagagagtgagcgaagtggatggttgataggttgatggagccaacgagagaacttgttgaggatgaacatatcgcgagcaggcttatgtcagcatgataaacagtcatttctgccgccagtgttcgtcctcccttcggtctgctcatctcgtttggaatgtagacgttgatgagaatggcatcgaactggaggaaggctgaatatatatacatgtgtatggaggagagtgtgttatatgattacaagaatgatatctaaagatagtacaagtgaaggcagcggcaacgaagttgaccacgtcgtttcgaggagaagatggaacaaagaaacggcaacgaagaatggagttcccatcaatcatccctccaagagacctcgccacggccccatcgttcggaccagatggcgcgtttgtggtaaacctttctggcgcctttgaattctctggtaaagtcctccaatgctctggcctgaagattgagtggatgcgaaaacgagtcagcatgtatcttatacgtcaaacacgaagacggatggacagaatgacgtagacttactcctctatcattggagccagcggttcccgagacgtcgagagatggagtgtctgctctagagccttcgatgaacgcattggcgagtgcttccgaagtgtcgtcttgatctactagcgcgtgtcggaggcgaagattgagaaaggaagccgagaagcgctggacagatagaattttatgtgtgtttacgtcgttgatgtttcagaagacagctatctcgtcagccttctctgtacgaaattaaacatgctttcaagggagcaaaagggacgaacttggtataacgacgcctgctctttttcaatctccttccaacgagcctttagttgctcggcttccgtgaaggctgctagtgtttccgatcggagttggactaagccgggctgtaaactctgatttttctctagagtacagaccacaaaacagccgaaagatgagcatcggttccgacagggtccgatcagatgaacgagctgaagcaagggaacctaccggctaacgtctcgttgtcctttgcgaccttggatatgctctcgatcttgtctgctacctgagggagtgtgttgacgaaggcttctctgtaggcttcatctgtaagaagctcgtgcagatcgtcgttcctgttataaggttgaccgatgagagaggatgatgagcgtgaagcgttgatgccgtacacaatccgggcgataacgaacttacgagagagcttttgtctgtggaaacgcctgatacagagaagatacaaacgttgttgtcgttgtcatcgttgagataggtgtatgcgtatgtctgatgggtctgtcaagccggttcgttctcgatgatggtgatggtgatgatgatgcgatgtgttggctgtcgtacagaactcattacaaacacggactaggcgggcattaggaaggcatccggaaaacactacgaaaagcggatttacagaaaactacaaaagacgactagaggaaactacagccatgactaggaaaagacagcaaaacgggcattacaaaaaagactacgatattctcacaaactcaatacaaaaaattcgatttttttctattcgccaggaattttccattttctctccttttttccccgccaaccttctttctctcttcattccatcttaagtactgtcggtcaacccgttcgatcgtcttctatcggccagagaatcaagctcaaagctactgatcgatagtcctaggatagcttcagctctgttctctctcgcttcccttttcttttcttctctttccatacctgtcatacacaatgttcgcctcgacccgggctacccagcatctgcacctccgtccggcggcagcccggttcttctcgtcaaccttggcaactcctcagtcatcgggtcccaagtcgtcccagcaagccagtaagcaatcttttctttcaaagtagaagctggagcgaatcatggatgattccatgcttcaccttgctcatcgttctgtctaacggatgtctttactctgtcttactttttttttcccctcgttccctgatttgccgggtttctctccttctctctctccatttcatcttcttcgaaaccgtctcacgtcacgagctagatcccgagaatgctgccagcatggaattcgtccctcagggaacgccaccagtatctagagcgagcagaggaagcagaggccgtggagacggaggaggatccgtcaaactccgtaagtgatacatcataggcctaccaacgttcagacacttgaactgtcattgaccatcagcgtccactcctttgtcctaaacttgtttctcccttagttcgtgtgtactggaacaaacaccgatcgccagatcgaattcgttcaagccaagctgctcacggtcaatttgacgacgcccctgctcagtttaaaaacaagccgtctggcaaccgagcaaatcgacctagtgaatctcgacgatctgatgattcggtcaccatccaactcgacagtcctacccgccgccgaatggaagaacgaacgccacaaggccagatcatcaagcattaccaagataaagctcagggaaaattcgctaggttcggccctggaagaggtggcgctcccaactcgagtggtgaacgaagaccctatgtcccccgggagaacggtccgagctctcgatatggtggcgctggtggtgctagagatagaaagccgtccaacaagtcggcagctccaaggaaacaacagtacactggtgatccttaccgaaccatcagagagcttccaacgatggcaccttcaacattacccggtctccacttgctttaccaatcggataatatccttgccggcgaggaagacgcaccgacgactgctcctccgaaaatcacaaagggccctaaagccaatgtgttccctcctcaaacagctttccagcagaagatccacaacgtcgtcaacgaccaagctccttacgccggcatcaagatgctccgaaagaagaaccctttgccattccttcccgacacgctgtctggaaatcagccaaggttgatcaaacaacgcgccaaagagtacgacatgatggtctctcccgagtttgccgacgtcgaggggatcaatgaaaagattgataacgaacgggttggtggtgattattcgcgatactacgatcgagaaaggctcgatcaagatgtcaagactctcaacaatggtgacaagtccgcgaaggagaacggaaagattctggccgagtacggagtgagctggaatggagatctcggaatgagagagagagagatgatcaagagcttggtcgatgaattcatgggcatgaaattgacaaagcccaaggagacagccaagtagtggctgtttgatttggagcaatttaaatacaatgactattgttctgctatgttttgtttcctcttgccttaattgaggactgtctcgtatgtgtgtgagaggagcagacttctcgaatgaccaaaggatggggttgggtcgttcgtatcgaagatgattgtaccaaaaaaaaataaaaaaatctaggattgaatgaagaaaggaaaatgaaataccgttcccctaacacagacactttcaaggtcaacgaccatccaccatcaatcacttcgcatgccattatctcttctcatttagcacacatacacacagacgcacacatacatagcaaacatagcaggctcctatgtcgactcccatattcaaaaagctcaaaaagacttcgctccgacccacgtcgtcatcgtcaatccgggatacaatttctacccccgaaaacgacgtgtcacctctttcacgatcgacagagtccatcgcgaacgcgtctgtctcgtcggataggccgaacggaaaggatggtcaagaagaggatgacggagattttagtccgtcagcagcaatagcagcagcaaaagccaggacgaagaaggaaaagaagaagagaccggtcgaacggttaagctttggaggagaggaggatgtatgtcttttcttttctagactctcatccgttaggactcaactgggatcgactctgatgggtcctctaactgtttcttgttcttttcttcgtttccataaatggttctacctaggaatcatcatcaacaaccttcgttcccaagaaatcggctctctcccgcgctctccaactccctcgtccacctatatcctccgacttgactctatcccagcaaacccctgcctcagcgatcccttcatcatattcatcaagctatctatccgagttgaaagcgtcgacccctactagacctggtccgcttccaccgtctgcaggagatcgagatggtggcgaatatgacgcgatcacccgcgcaaaatataatatcaccgcagacgaaggtggtgtgcctataattccgacgcaatccgctatcgacgctgcgaagaacagacggtcaaagttgcgatcaaccggtggggacaaccaagatcaagacggtttcatctccatcagagaagggggcagaaagggagcattggtcatcagagatgaggaggttgaccttggaagaacagggttgatgagagaggatgatgagttgggagacggagcggacggtacgtgaatctttcagtttccatgaccttttttctttgctttttctttgtcaatcgaatcgctcagaagagggttatccatagatgttgacaagctttcactctcaatctttgacagaatttgccgagtttacagaagcaaacgttcggatccccttgggcaaagctgccaacaaaaaggcagctcgattgttgaaaggagagaaacaacaacttatcgaagaaaggtcagttcaacctcgcggacgtatttaattacctgttttcctacctgaattcgtatctgattctcttaccaccatctggctcgactgggataatcgtatcaagagaggaagaggacgaggaagagagtgacggggagggaatggaatgggaggatgcacagatccggcgggcaaacttgtgggcagagtctgaggatcaacaggatgcgtccaagacgccctaccgagcagctcacagtatgatagtttcatttcctttctttcgtattgtaagattacagatcataccaagctcatccttccgttttttccttggttctcttacgttcgctcgttgatcaagttcccacacctgtgcccctgccttctctatcaaacgcctcagccaggctgtcagaagctctttctacattgacaatgtcccacgcggaacacactgcccgtttggaaagcgcggctgcagagttgacagctttggatcaccaggagaacgatcttcggagagaggtagaacgagtggaggaaaagagagagtgggcagaggagttcaaaggatgggtggaggaggtcgggaaattcttagaagtcaaggttcgtcaagcgctgagctccttttttttttcttcgctcgctttgacaacggctgacatattgatctattcaatttttgactcattcgcttaaaaagtatcctgagatggaaaagatcgagaaggaaaacatagaacttttaacggaacgttaccggatgatctcacttcggcgacttgaggacgattccgatgatctgtgcctctgtcttggaacccctctcgagaatctttcttctctcggtcccaagctgtcagcatcaatctcctcgtcaacaccaaacacactggacttgatttccccaccgatgtctgatatccgaactcaacgccgggagacccgtcaagctcgactcgcgagctcgacgtccgcgccgtcatcactcgagacaaccccgttcgtatcttcatccgatcaaggatatttgaccgactcgaccctccctccatccgaagaatctgactatgcactcgctcgggccggtctagatgagaggagacggcaggtgttgggtgatgtaagtgctgtggacctgagagatccagagctcggattagtgcgcagatttaaaatctggcgagaaagagacggaggagaggagtatctgaaagcttggggtggagaagcgttagtgaccgcctgggagttttgggccaggttggatttatccggttgggatcctttgactgtatgttcaatatctgtcattcgagatgtccgagaattttcgactgaaaatcttttttttttcctcaacaactgtatgtgatcagtcctcagaaacactcgatcacttcccattttatacctctcttcatcactattctcgcccgcctataccccatgatgaagacgatgacgaccttatggaggatgagaaacctccgttgggtcccgaaggggatctcgtggcttccatcttgaaaaacactgtcttacctaggctgaccaaagtgttcgagtctggaggcgcgttcgatccgtattcgggcgtgcagactagacgggcggttgatttggttgagttgttggaggagggtgttggaaaagatagcgctaggttccaggtgggtggcttatcgtcgtctctaccatcacaacataccatttatctgactcggaaacatgaccccttttttttgtgttgtcaacagaccttcgtcaaagctcttctcacgtcgttcaatagcttattggaaaccttgtcttcccttacaatggcttgtagacaaggctcgccccctccagcattcaacccgttatctttctcctcacgaacgcgtttcctgtcgcgcgtattgaaagtgatcaagaacgcgctcgcctttcactcatacgaaccgagccaagtcggtaggcttgtagaaggattagtcgaggttggcaggatggtagctgagttgggatgggaggaggaaggcggaggtagagaatggggagcgaaagtaaggagtttggtgccgggtggtttgttgaacatagatttggagaggagactggcaagtggaccgcctcagggatggtagattttcttttcctgagaataagggaagactttgatgaagcatggttctctttctctctctatctcgtctacctttctagcgttgtatcgatggggtgtgtacgtgtttgcttgcgtgcataacggtggtgtttgatgaaagtcggagagaaaaagaatcaaccctttccatccatcctccagcatacacaatgtcggacaaaccgtatctacccttcgacatctggcaacatgtcctcccacatctggctgattcaccatcgacacttgtttcactatctctcgtgtgtacttttttagctgagctgacgaccaggtcgttgtacacacatgtccatctggccaagtcatcgatagcgtaccagtcgttcttcagaacgttcacttccccgttgtatgaccagccgaaagagcgagaatctcctctcaagttcacaaaaaccctgacgttgggcgcatatggagaagaaagcatctcaaagtcggcatcaacatcaatgttgacatccttgactacgacaacaagaagttcagcgaagatcgaagagctcaatcttccgccattgccaagatcgttgtttcctcagttggagacccttgagattggatgcacccattcggatcagatcgcatccattctacccatcctgatcacattgaatccagttcatgttcggttgtgtgcttccgcccctgaacctccgttctcatcaggaggcgaacaggtgatgatgaaaccacaatcaataaagttctcattcataccacatttcacgtgggtgatgtacaaccgtctagaatctgtctttatttcaaagtgtgatgtccatcccccgtcgtcgtcagactaccctccatactacgagtttccatttccttcgacatgcacaactctccgatcagtcgaatgggattttaggggtgcgataggaaatcctccgttgttcagagggttctttagaaatcagatcggtttatgggattggaagacaccgttgcgagttagcgtctgggttgatgaagagagtgaaggggaggggatgctcaaaagcagtctagcatctgttcttggagatctggtctatgaaggaggcgaagaatgtgagaaagagtgggtcgattcgaaagtaaggattgggctcttcatcaacggagccaagtatgttggatttcatgaagagtcatcctagacggagagggagaggtatgtgagagagcgatgatctagatgcatgtacaacatcttctatcagacaaagctgtagttctcttgccatcctccatgtcggctctaagctggacacatggaaggacgaagaaagcaaagaaatcgcgatccgatgatgatggtgatgatgacaacacatcaaataagatggagaagaacatcgatttgtttcatctcgaccatcaacagccagatggatcatccatcgtctctcaccattcctcccatcaccaagcgttaagttgatcccgatggctcgggaaccatctcaaacagatcccatgcgggcttacagagccgagatgaactctcgtcgaaagctcgtcctcgatagttatctaatcctcggtttcatctcctccggaacatacggccgggtatacaaagctcgactcaagccggctttcaactcgttcgacccaacatgcccaaccagacctggagatagaataggcaaagaaggggagctctatgctatcaagaaattcaaaccagacaaggaaggagaggttgtgacgtatactggaatcagtcagagtgccatcagagaaatcgcggtatggtctttgttgccttgcgagtgaaagaggatgtcatagcactcaccatgcttcttccttgttctcttcagatcaatcgagaagtagaccatgagaacgtcgtggcacttcgagaagtcatcctccaagataaaagtatcttcatggtctttggctatgctgaacatgactttcttgtaagacttctctccctcttctccttgatgctttcccgaagctcacttgtttcacccatcaatctggaacaacatctgataccatcttatggtctgaagcaaatcatccatcaccactctcaaacgctgcgtttgccagttcctcctcctacactcaagtctcttctacatcaactccttctcggcacgctttacctacatacccatcatatcctccatcgagacctcaaaccggctaacatcctggttaccaaccagggtgtagtcaagattggtgatctcggtttagccagggtcagcagagacccactccagccactctggcaaggtgacaaggtcgtagttacgatttggtacagaagtccagaacttcttttgggcggacgacattatactggcgctatcggttagttttattatcatataactttctttcttatttcttcaacaaagccaaaacattagaagaaagctctgatcgtcggcagggggattcttgttggattctatccactagatatgtgggcagtgggatgcatctatgcagagcttttgtcgttgcgcccgatctttaaaggtgaggaagcaaaaatcgacagcaaaaaacaactgccatttcagaaggatcagatgagtaagatcctagaggtcttagggagcatcgacagtaagttttgctgaggcgtcccggttcttctgtgtgatttctctcttcgtggaaagattagctaacggtgtgttggtatcttgatagaggagaaatggccaaatttacatcactatccagaaacaccacatctagctcgaatggaacggtccgtttctcgtttttcaatgtctctgcctgattattctacctattctcacttgccgttacgctcatcaacagatatcaccctggactagcgcattggtacaagaccaaatctggcccatccttttcacccaaaggatttgacctcctctcttcgatgtttgagttcgacccagaacgaagaataactgctagggaagcactcaaacattcttggttcttagacgacggaggcgttagctcgaagtacgtctttccacctgtttcgtctcgtctgttcgttttccatcgacattaattcccattccatcgtctcgcttatacggaaaacacagcgcgtttgcttcgtctaacttggtctatccagatcgtagagtgacacacgacaacgaattatcctctcagccccttcctccttcacaagcccagggtcaaacatcgaacacaacaacagcaaacaaccaaaaccgatctatccatcttgcaggtgacccgtcgagaatacataattcatcaatccctccacctgcaccgcctagtgtgatcccgatgcctgtgtacccagcaagctctagaccaggtagtgggatgagaccaggggtgggaagcgtagggcctggtggaatcggaagtgcggctggaccgggaagcgcagggaacagtgctggcagaatggttggtaaagcggtagatggcagtcggaaaaaaagtcggatcatataattcttctttccaatgatccgaccagtgtcgcacgtttcgtagatttagtttctcgcagataatgtatattcaattcgagaaataaaaacatcaacttcctttcaaaagatcttcaagcagatatcaatagatataatggagagcagaaacccaacatatatctcatcaatagattcattcgttcctcgacagacaacttcgcagtccagcaagatacgtttcagatatagctgaaaagtaataggaatgttgagcgttatgaggagagacaagattatgagcaatttcgtgcgcgagtgtaaagtacctatggtatatgaacatcgatttgcatttttcagtcaagtcacagtcaaagcctcaaaaagacgagttgatacggaccaagatgtcagggcctcatcgagctttccgtttcgaacgagatcagcgtgccaggcgagatagtatcgcaagttcataaacacttatcgtttacaagaccataacaaagatcgaatcagaccaataagaaaactttaagcatcgtcatgctcattccatattgaatcaggagaagattgatagcttacaagaaccgcttcgattaaaggcaataagaggtccagatacgtcatggaaaatgtgctgagaagaaccatcaatcgaccccattgacgacaaacgttagctcggtaagagaacacatcgagattgaaaaaagtataagaagactcaccaaagacaaggagctcattttgaaaacgtctgaaagtggtaaaaggactcttccagcgaacaattcgatatcaacctggtgtctcgcaagaagaccctttggattctcctcgctcttgtcggcatagaactgaagcttagacttgtcatcgtttccgacaaagacaaggtttgtgttcacgccggtcgtatcacagaaatctttggtctcttgaacagggacagtctgctgtttagaaataagagtggatgatcggtttcctcgggaggcgttgacagccttctcgacattggacctacagagccgagtgtcaaagagatgtaggatatgaattgcagaatcagcaacaaatcaaacaccatgaatgcaaaaatgacaaaccggatatcttttgtcggtgtcacgatacttgtccgaggttctgtttgaccgatttgcctatgaacggcgggtattggagtcgatacagtttctttgaccgagggcttcttcagtccgcttttgaaagaactgaagaagcctttggggccagaagtcgaaggagatcgggtgagaccagaagaagaagatggagatttcgataacgaagactcgctagatggggattgaactttagaatgggaatttgtagctcgtttagggtaagatttttccaaaagctcgtttgtggcattgacaagatggttctcggtctgagcgcgtagcctacgctgaatttctaagggatcacagtcagggaataacttcaaagtaaaacgatgtcgcgtgagatacaaaccacctttaactagaatcataatggattgatgatagatacctcttctaattctacacccattgctttgaacttttgctcctcttgaagacgtaatttctcagccgactcttgagctaatctctcaatcttcttttgtttgagaacccgatccgtcgcaaaccctcttctgcgctgtacatcctcaaatcgatataatcagccacatcaaaaaacaacattgatgaaatacgtcgatgcatgaaaacggcctatacgtaccaaagccgataaaggtgttgaaaggattgtcgagagtagcaaggcgtccgtggagcgagactgaacaggaaggtgcttgatgagagccgacgcaacctcgtatagctcaagatctatacttgaggacacagccaaccgaatcttaccccctctatcctcggaagcagcagcagacacaggctcgatactagtcttgacaattgtgcctatacgcaaagttcgtttcaactctaatttgtgtacttcataaacctctatggaatttcgaagtgtctccgtcgtgatcggatgctgtttctcatgaaggtagatgggaagccgttcgagaataagatggttcgtttgataggcgagtttggattgagagttgacagctccagtagcactgtagtcctctacaaataaacggaatggaatcagtatgatgacaacgaaagcttataccagccatatgcgatatgcctgatgttgagcttaccttttacctgtctgcttagcttcatagagccaagtttcaaatagaatctaacatcaccaacttagtgatcttctgatccaatcccttcatatgcagagatacacttactcttcgagagcgggctcttcaggagctgccaatatagattcttggaaaatcaagtggatcactggatcatcgaggatcataatctctcgggggtacgctaacgtccaaatgttttctgaagaaacaagatagccaatcggggcaacaagttagtagatcagactatactcggacgcatgcgcaggttgagggtcgaaacagcataccgtattcctcgtcatcttcagcctttgaagcaagtttgacacgcttgaaaccgagaagtacttgattttctcccatcgatcgcaaaacactattggggagattagatatacttaaattcctcaaaacgtcgaggtacctatgaatagattcaaacaaatcgatgagagctgtgtttgtatgcagaacgtttcctggacttacaattcaggagtgccagccaggtctaatacaacgcgggggctgaaaatggacgatacagccgtcgttaacataacgagaagaaggctaagcagttagattgtcttactctttgataaccatcttggcgacttctgtaggacttggttcagcttgtaccccgatagctcgtagaaatgtgtttcctttagcgccaaagtcaacgtagacaaatctaaagaaaataccaggttgaaggtcagtgatatgaacgagtagtagcgatgccatgccttacgcacagagctttgtacattgatgagctgctcgcgtcatgattgacgaagtagacttcactgttttcataaatgagagaacgacaatgagacggagagatccgagactaccaaatagactgacaaaggagattcatactttgaacgatgaagcttaatgcttccggtcttatgagcagggatgaacggcaccgtgttgagcctctttaacgacacatgatcaaacgtggacagtcttgaggccagatactgcaaataacacaatagttgtctaataagcttcacacatggtcaaattaatcactcagatacacatacttcaaatatctcttgagcatgagtaacattctgaggagctttgctgatgagtgcatcaaccagcgcagaggctatggtttgtcgttgaagtcagaaacagatggattggagaagagagcggtagtagggaaatatagagtcgtatcagtaaatcgatgcaccatagtatatcgtggtgcaagacacgaacctttaggatccatgtcaactaagagcggaaggactggtacctctcggatggagcttgctacaactgaaaagcctagaagtttggcatccagatttcggtagacgtccaagggagagcctagaaatgcagatccatcctgcttgatacaaggaatgaatgcgagtttccggttttcagatgcgggatctagcaaatcgaagttgagaaaaatgtaaacagtcaaatatttcattataatgtgtcagatatatgcttgaaatacagagacttcgagaaaagaactcacaagtttgcgcatagtacttcgtaaagttctcaaatagaaactcaagagctacagttcgaacggaattaacagaaccagcggctagaggcaaaagagtgtcgatggatgggtacctcatcaatccaagagagaataaaaatttggctagtttgtgatcacaaaaatcgacactgtgagctctaattccagattgcttctagcagaagtgtggaagacgctcaccctcatctgaattcgatctccacttagctttccaatctaagataggaaggccgagcttccgaagcgaatctgatggttcgtatatctgtctaggtaagaatctcgaggtagaaccttcgacgggaaatgcagccgtatttttcaaccggttgatctcagctgggcggagattttcttggacagagaccaggtatttcgtcactgttggagattctcttgaaatgatatcagtgcatctcctagagatagcttgatcaagtttggtcactgacagtccatcacactccatccacctgcgcctagaagcctgctgaagaccaactgaagttcaacatgttttcgaacccccaaagccatcaatagcttttccatgtttccctttaacgaagatcctttcgggaaagcaataattcttttaagccggttccgaaacccatttagtttctgcgtttcgttgtggcgaaggagtatacaggaaaggcttacgggagatccgggaagaggctgacatttggaaagtaagcctctccaggagaaacctgttcttccaacgaaagatgtaaagatacatcatggagtgatcatcaactttgtatgtgaagtagaatagtgaagtcgactgtgcagtgggaaacaggaacttaccatcccagatttagaaggtatgatcttctttcctgacaatagtccaaatatttttgcctgagtctgcgcgtttgcacttgtccaagctctggcgacaattcccagaaccctctccgcgaaagtagctgagacttccatatccaactctggatcatcttttgcccgttctaaaaggttttctaaccagaccgggagagaaatctcctgtaagccaagagcgaagggaatacgctgtatatcaagttgttttgaaatagctgggggaagcatatccaatgggaaggggagatcggatggaatgaccgagcgaggttgatgaaacgtccgcatggaagataattgagctatctctggctctcctgtcttcttcgattcaacgttttgatggggccgaatggtgaatatagcgtaatcgagaattttggacctgagcgacttgtcatattccggggcttgactaagttcgatccaccatttgaggcaatccaccatttcttcttctgtcaacaatctactctttaactcgcctgcgatatcgtctaacgacatatctttaagcattcctctcgttttcaaacgagtcaccattgatgaagcaccgtccaggactggtgacggtacaacaggaaccttgcggatgaaatttgtagtggcagcatgaggcatcctgacctcaagcattgcatcagcaacgccttgcgtagatattatgtggaaaggtctcgacctgccagagcatgcaaagaacgcggcctccatatgacgagacacgacgcccgatggtgtcgaggagaggaaagtgaaaaaacgtaatgcatgaagtgctcgggaggtgaggacttcttggaattgaggggatggagagtcagtcagagatgggcccttccataacgagcggatctcggaaagctctgtttcgtagactgcacggcacagaaatcctatcattgcccaaaatgatacatcagctatgtaatcgatcctcgagatgaatcaggatccttaacacatatatgaacagtacctgcaacgtataacagctgtacgagccgatcaagagacaaaaacgccataagttcgtttcaaatattataatatattgcgcattgagatagatgttgactaaagacatacctccttgttccattggctgacatatcgatctaccaagtcgatgctttctctttctacagtgggtatgaatctaccagctgatgatgtctccatggtgagtgttatcagcagtgaaggcttcatatgtatgaacatatatttgacctacatatatgacccccaattcctgtcgtctgtcctgtggcgtgtccaatgaaaatctttgcgagtccttgtctggtgttatcaagaaatgcaagttgttaaacagtaacttccaagtttgataagtgaaacgagcaagaatggtcgatgagaacaaacatacccttctaaatccgctcggagccctctgaagatgctgttttcccccgtaccttctttctcgttctccccctctttctcggccgcatcccattcgtctttactcgtccataccaacacaactttagtcctgcttggtggctgcttcttcattgcgcgttccatctcttttccgaaagcctgtgagattccgactttggcgtcagcagcgatgaggttgagttctaatccagtttctatcaactcgaatggatccttaggttttgcaatagagggcggaggtagagcaacgggtacgggagaagatcgaccgaacaaggccgacgatagcatcgacgtaaatgaagtcgtaggagctgctgaaggtggtttgagaagtttcggaagagaccttagagggggagtcgcactattgtatatcgctcgaggaaccttcgcagtgatcttgatggctgcaaataagagtagtgaggttaagaaacgcttgaatgccctttggagtgaacaagaaggagggtggatcataacgaacaagtgctagctaactcgtcaacagtcatcattcctccttcactctttctccccaacccgacagggacctccatcaactttgaggctctcacatccttctcgatcaacgctgctctcatatcgtcgaagaaaagctcggctcgcttgatttggaccataaatgtgatgcttgttgccaagaatctggctagatccaggagtgagttttccatcggtgcgggtgtacgaaggtcaagcgtaaatgttgtccacggctgattgaaataagaaacagaaggatttgaagaaggaggaagggaacctgctctcgcaaacagctgtattttaaggacgaacagaaaccagtgcgttgaacataacaaagatccaatttggagagtcaagaagtcacatacctgatcgccgccacctttccaatgaaagcccatccatgttccattactctcgacgtgaggctcctcagtgatcgaaaacaacgcatagaatccaacaccatatgccccgatcttgatcgagtcgttatttccgtcggcaatctttttgagtcgactccagtcttctggccggaaaggtatctaggatatcgattcgatgataggggaatgtttagtaagctttcaaatcctgaggaacaagtaagtttgtagactgaacataccccatcatttcggaactctattctcacaacctaagaatcactccaatacttgtcaatattgaatcattgtcctcgcggtcaagaaggattgtaccaacaggatcatccttgaagttcggaggagtcccgtctgtatcttgctccttgtcatcaaccacctgatttgactctgttggatcttgcttaagccgagctctctcacggtcaagccccttttgagtgaaaaacttgatttgaaccgaagaagcctctgcatcgtctgcattctgcagcagctctcttcattaagagcaacaatatataagggccaacacgatcccaaatcagttctgactgaaatctagagaatgataggagggtagcgaactatggaaatagatttgtagaaaggaactcgcctgaagatcgtgtgttctccactgtaacgagcaagcaccttatcgatcaacgctctctggttcacactaacagcttcatcttgacccgagtcccacaaattctttctatccatttctgaagctgtaatggttgatgtgatggcggaagatgtttggaatgattatgatgttcaagcgtccaagcggtggaaggtagtaaccggtctgctcggtcttagccgcgctcatttgacgatgaaccgatatacaacatacatacacacaaaataagcacagaataacattgagaccaaagattttatcgtggcgtctagcattacattgtgaagtaaggtgaagtatgacaacgaaataagtcaaaacaaacaggcagaaacttgaaatacaacatgattggatatggtatgttatggcaatgacctcagaggaagaataacaaaaaaaaatgaagcgagaccaaaaactaacagagaatatggagatgaattccgatagatacacgcaaagacagtcaaccgcccatctcgatttctgtcttttcgtctggccgctcactaagacttccaaccctgcttcgtttccctatcaccccatcctctccctcatcctccgcacccatgcttttggactcgtctccttctgaatcctcgatctctgttctctttcttcctacactcgagccgtccagccacccatcaggccctgaaactcctctggacgtcgctctcgctctcacaggcgttgaagcgccagattttaaaggtgaacgatagccacttcttgtgtccgtcccttctggtaataagtcttccggactagagcgcgagaacggactaagctctaaagaaaggtcttgagggtgaggctcgagaagggcttgacctcgattcgcttgttggcgttgtggacccaagatccgaagtctttcgatccaactatacaggtgatttgaacgaaaattcagtctcttataagcaagtgaagacaaagatggcaaatagacgaacgcttcggccctttctaaactttcaccaaatacctgagcaagacctgtgatcatatccagactttccactgctaatgtcataaccctgccagccgcaccccttgccatcccaacttgtactcccggcacccctgcttctagctcaccagactgaccactctctctgttaagtcgctcgttcgccctttcccaacgttccggtaagccaaggatgaatcttcgaacggtccgtcgggcaggttctggtaaggctccaccagcgtattttgatacgacatcaacgaccttgcggatggtgtttaccacgtcagctttaatcttggaaagagactccaaggccgaaggagagatcaaagcttgagatgaagccgaggagtcatttaaggatgcgatgaagtttcgaaggatgctaatctggttggttatatgcgatgtcgcgtactgtttgtttcgaattgcgcaagtcggagtgatcagaaaatgagcctatggaaaaatagaggagaaagaaaaaggaataggtgaagatgataaaaaaagcctacttgtagccactgcagacaatacgtcaaactcttcatgctctcttcgcttaccgccgctcctattcctccagcagtcatacctgcctcgacaagcatcgaagaccatcgcccagtgtttcctccagtcgttcgttctacctctttcgtctccgatggaacatggacgagcgcttggcctggttgagaagtcggtcttacccgagattgagaacgcgaagttgaacgatgaagaagtgggaaagaggatgaacctaaaatagatgtatatcatataaatgatcagaacggaataagaggattgctgaataggtgactcctagatgttcataacctcaccctgagcttgaggatcttcctctcgtttcactctgttctctagaccaggactatctctggagctcatatgatcgcttccgcttaaggaggatgatcttattgagctcgtcgctgtcgaggttgacctatatctttcttcaatattggttggcggcaaggaagacgatccaggtgttgatagcttcatatcgtcagcacaaaaacgatggtccaacgcaaaagtggttaaaaagtaagaaatttagaggcaaagtcaaggaagcgaagagatataaacacaaagaccaactccaactcgatcaagagtccgacagccccaatcatccattgcacccgtcagtctaggatctattcgatccatgaccggtcttgagattgtcttgaccgaagactcgacaatttctgctccatactgcaaagcaaatcggatgaagatactttgtcaaccaacgatattcaaacaaagaacgaatggcaaaacatactttgacaactcgggatcctcctttggctgtttcataagcttttaacgcagtgttgacaacaggcatcatcgatactctagatacgaagtcggcctcattctgggatggtctggtaaactcatcaaattggttgatcgataaataggaacattcagaaacattgtcagtcaagggatcgtcgaaacaagaaagagacccatacgacgaacatgttagaaggagaaggtccgagatctaaagggttcgagtagaccgaggacgccagagagggagttgtcgccacggttgatgaaggagtcaaggatggacctgaatcagtgagggcatctgtgagtgaagatgaacgatggaatcaatatatgtgtaacttataagcaattgaatagaggtgatgatgatataacgaagggagatcaaagcatcgacagagagaaccaaaggacctcatggtatcttgagggacgatggattgacgagtatcccttcttgagcacttgtgctcgagtttgccggacacccagccggatagatccgtataagtgaacccatggtggagtggaagctctttctatcctggtcaatattcctttcccgtccaactctctctgtttactgaatgcactgccctgttcgatacgaaacgaatgatcttaccatgtccgaaactagagtcggtatggatagaagaagcaagtgacatagcggactccccacagaccgtactgttgctgctactgtcactgtgttcggctaccggccgcggcggcccggtgggcgatttagatgccatcatgtgtagagctgtgatggcgatgagttcgtcttgatccctaggtggccaaattggaggatctggttgtgtagatgagcccttcatcttagtcaaaggatatgtctgacgtggaagatggtatgaaaggatggtgtagcgaaagacagaggcggcaaggatgcgagtgcgtctgcttggaattgtgactgaaggatagtaaccggatggtgaaccggctagatgagtacgagatttgcttgctctccgctcaatcttgatcgacttcacctttaacatgtcgttgtcaaagaaaccggtcgacattgaagatgttcttgaaggtaagctcttcaatcttagctttgatcttgttcaccgaccaactttctctcgtttcctttgtttgatagtcgtagacaagactgtcctcagaccgttcatcgcgatatcgatctctctcgccgtttgggtcttgggttattcatggactagtcgactcttccagggcactttgatatataccactctagtcgttctatactgtaggtttcgctgctctggttcagtccggtttcgtttgcgcttaataatcctcttgccttatatcattagccctcatccctcatctcatctcgattgccctctcgcctcatccgcgaaaatacctgttttctccacccaagatcgactggtccgaacagatcgttctcgttaccggtgcagctggagaaataggcttcactctcgtccaagctctgtctaccaaaggtgctcgtgtaatcgcgctcgacatcaagcctgagtctgattgggtgttcaccggagatgagacaggtagtggtcagagtgtgttctattacaggtgtgacatttcaaagaaggaagaggttgattcagtggcagagaggatctggaaggatctaggagatccaacgatagtagtgaataatgctgggattgttcaagggaagaagatcttggatttgaccgagcaggacatcaaagagtacgccatggttaatttgtttaatcaatcaagtcgtatatccgcttatactctcatctcatctgtgggtcctggttggcactagaacggttggagtcaactatgtttctcatttttggatcgttaaagctttcttgccagccatgctgaagactaagcgaggtcatatcgtaagtactttgctttttcttgtacgtgtcactgagtgatcactcgagttattgacatcatgcaatgtccccgtggcgaaactatatctgatcaccagttgacggtggcaagtgtgttaggccttattggctgtgctcgtctcagtcagtcttggaacctgtcactttgcatgatcatcggtctggattgagaagtctgtgatatctgatatgattctaggcgttttcctcgttttctagccgactattgttctaccaaggctgccatcattcagtaagtctgggtttgcgacgtctcaaccagatagttgatcggcttgttgacagaccgtcttcaaatccatctcttccttggaacagatttcatgaggcgcttcgatttgagcttaatacccagtccgtctcaaatacctgtttccttcgtactgttcacctatttgagttcactaatcgatattcaatggacctcagatacgacgctccagagatttataccactcttctccttccgtctttcgttcacggtccgctcttcgcgtcagtaacgatgtcaaacaatccgttcatcaaatttttctctcctgcacttgaggcgagagatatcgttcaacgaatgatcgaccggttgggcgtagagcagagcggggtgatcatgatgcctaggtgagactttgttggtcctccttcacaaagagatagttgatctgatctttttcggagtccccgtgggaaatacagctacgtccggattgtgccatttatgagatggattcctgggctaagagagatctgtcagaatgtttgtacaagttctcatctctctttttgtctttcttcgttttggtattcataacgagaactaatcagtatacacgggattattcataatcgcctctggggcaactagctttctgaagcagaccacgcgatggacaagtttgtccgaccaggcaagaaagcagattgattatatatgcctaaaccctagatttgtcgagagaaaacttctgttgcttatgtttcgctcctcgacaaactgcttttacatgatactcctctgagtcgttctcctagatcttgttaagccaaaagaccatcacaagagaagaataaggggagaacaatttatcgatcaaatatactaccactcttcttcactccatcacccgttctggatacatttgagctcttatcctgttctttttctttcttcttcttatcttcggacatctgtttaatcgtgtcgatgacttgagacacatgagacgatgcaacaaacacacgcatcacaaaggttgtcatttgtacctaaacagagattgaacaagtacgcaggaacgaaccctctcgctctgatgccttcttatgcggccgggcagaatgggcgtctccggtgagatggacgctggacatgttgatgctcgggatgctaactcgtaattcaatggtggtcggttgatgaacgagttcaacagacgggtgtcagataccaagagaatagaactacacgggcgcaatgttagggttaaatgacgtcattgatctacagttaggctctgtgcacagccacatccggtatcgcgcacggaccgccaaaaagaggaacatctccaatcatcccgagcctctttctctttcttaccctcaccttcattgatccaaccattcatccagccatcaatcacttgctcaaacactatgtctgccactcaggatcacaccgctactccccctactgctgcatctggctcttcggtccctccctctgtcgaagctgctgctcagtctgcccagaatatcctcgcccaggctcagcaggtcagttcaatccatcggcatcttgaaaatttccaggtcttgctttggtttcacccttgaaagattactcacccgtttggatgccatcccaacatatacacatcaaattatagcaagccgctccttatttgactaaggcccaggagatcgccgcaccttatattgagaagggtaaggagttcaccgctcccattatcgccaaggttcgttcaatcgagtatgctcttgttatctcagcgcagacagttatcttacgttttgttcttgatatatcatcatttagggtggagaagttctcaatgctgcccaggctcgggctgatgagctcatcaaggaagggaaggccaacagtgctgccgctgccgtacgcattcatctccatctctcaagtctcagtcgcgtccttctactcttgctgtttgatactcatctctcagtgtcatactttggaacaatagggtcagactcggtcagccgccgacgatttgaaacaggaggcttcggctaccactaaccaggccgctcaggagggttctcacaacttggagcaggccaaagagtatctcgccggagttgctagcaccgtcactgtatgtctcgagtctgtctgctctgagcgcaactgtatccttacaatcacatgtgccatatagactcggcctgaaacgatttcttgtcttaaatagggaactctcagttcgctctcgcatcagttgaatgacaagaccgctaccgcttctcacccaggagtcgtgactcagctgttcgtcgcgtctcccttgtactctctatataacatgagactaaaaaatctaacatccagctttctttccctctcttctgttttacccctctcgcttcaacagcacgaacgcgttcagctcagctcagtcgtacatcaacactcatctgccccagtcatcaactaccgtcgaagaaccagtcggaactgtgatctctgacgtcgccaacaacaaggctgacgaggctgagatcaaggatgctcttaggcagctcgccggaaagggagaagagactttggagggagcgagggagcagttggaggatgtcaagaggccttaaatggtcagagtgtagattatagaattgtagaaaccatgtcttgtgtttttcctgttccatctccttttctcgcttcggttacatctgttcttcatttgtcccaaatctgttttctccaaatctttgggttgtatcatgtgttaaagtttaattttatctatctgatgaatcatgatgtctgctacgtcttgtatatgaatccacgagggtcggaaagcccaagatgaggctgactcggtccgacgcgacggctgtgaatttcctgggttcagtcccatctcgcctctctttggtcaatctcactatcaaccatcctttcaccatcactcatctgatccatcgatacagccatgccaccctggaatgctgcacgagcccggatccaactcaagtgacgtcctttcctcttgggatctcaccttctgctgtctgttgccctctgcttataccttctttggcgtttatcgcctgctatgctatatctgtcatcctttgcgattacttttagactttcaatccaacgacttcagcttttgcaagataaaaagacggcgattgctaagaagacaagaagagatattgcggatctgcttctgaagaacaaagtcgagactgccagagtcaggtgtgaggttgtcattggagatgagatcaccgtggagcttcttgagttgctttccgttcgtcgtttctcttccctttctctcttcttggctcatcgggacttatattcagtgataaactggaagacagttgtacgcagaactgctcctcgctagattcgccctactcgacaacacatattcttcttccgaacccgatcaaggtatccacgaagctgtctgtactctcatctatgccggaccgagaacggaggtcgctgaacttcatcatctgcgagaactactcgtacacaaggtgagaatcctcttttcgcgttgttttactctcgatagcctttgttttttttcccctcaacaaaacaaaccttttactcgccaaatcattttgtatcagttctcgagagatttcgctatagcggcaatagagaacaaggatggctgtgtgaacgatcgggtgtttgcaaaactccagatatacagaccaccgaccgagttgatagacgcatacttggatgagatcgcgaggacatacaaagtcaattggagttccggaagagaagatccagcgaacggggatgtccctgcagggtttgaacaatcgactgaaaaaccagacgattcggccagtcaacccacatctacggacccagcctccttgcccaacactactgtcgctggcaactcttctactataaatactactacgccgaaccctcctccaccatcctatcaacctgcatcctcctcctcttcttcttcacttcctagtgagaagacagatgcatccaacgaatctaaaccatcagctccacctgcgcctagcgcgagagcacaacagaaatcggcggatgacctactagcagctcgatttgcagctctcaaacaaaggtaggccctcatttccttcttctctagcaattgttcagaaccatgtcgctggcagattcgatacagacgattgatatcacttgaaattacatcgctagataagttacgtacgcccgacgccttccccttcatctttacttttacctccgaccatgtcttcccatcctatcgacgcatctaacatcatcaaaaatactacaacaaccgccatctccgctactacgatcgaaacactaaaaggagaagaatttgaaccagagccaaccacatacactgaaatcgaagaactgaacgatgactacgaagacaacgatcgcaaagaagaagtagtggaggaagtagaagaagtggaagaagtggaagaagaagaaatagtagtagtagcagcagcagctgaaacgagaaaaacgggaattagcacgaatatggtggcgttcaatgaaaactatctgatcaacttggcaagtggtagtctaggtctgcttgttggtagtttgtttggattcggaattgttttgggaggtttcacatgggtcataggtcttttctttggacttggagatggatggcacggacgagaagaggcgtaaaattaacttggtcgttcagagtgaggcaggttgtatcaatggaatttttcaagatcaagagggggttgtttgtcatttcccaaatcaatcttggctgaaatgaacaaagagacatctgtgtgtctaagcaaagacaacgaagtggatacagtctttttactctcatctcctatcttttgctgaccatccaccaccaccagcagatctcccttcatcttcccttccccgaccatatcttctcccctcctctcctttctcagccccaaacctagacccagatcctccccgaccaccgtctcgaggtcgagagtcgaaccctctactagacccacctgagcgagacgctcgttcgactgagtaccggcccttcttttgagaatcttgcggtttctgggagtaagctttagcttgagaccgagtgtctatcacctatatatcatgggtgccgatatcgatgtttgaaagagaacaggaggcgaggagagcgatgagtcgtagaaaaagatcattaaacagagaaacggagcaaacctcataatcagtctcggctcgccgagtctcatcaaccgctttctgatcggtatgatcaatcaatgcatgacccatccatctaaaaatggaaggaattagagaagaagatgacagaatgagaggtttcgcaaatatttatatgaagagagcagaaagaaagagtaaagagagatcgacctacccaagatcattatcaacctctaaatctccttcctccccgtcgcctccttctgccccttcggaatcatctcttgcgctttgcatcttcctcctaaatccacccaacaaagccaggatatcctcctcctcctcacctcctttcctctttccattccttcccccaccggcagcactagtgttcccacgtctaccacgttcgtaccccgcgagttctctctcaagcatcgaaggccccttcgatcgaacaggagatggggaccgggcgcgtttgttcgagagattacgaagggaagcttccattgcttcaatttcgcgcgctcgtttcacacttgtgacaaagaaggcgaacaaatgataaagtaagagaatcggtcacatgatctatagagaaaagatcataagagtagtaaacatactcagcattatcttcatcagcctttcttcgaatatcttcgaagtcttccaatttagcctgtgatgcatttggtcttgttgaagatgccgatacctgctgagtccattgaaataaaccgaccattggaatgtcaatgaacacgtggttacttatgaaaagacgtggtgtaaagagaaacgtgatgaacggtcacctgttcgctgggaggtcgtatagcaggtgcatcagctaatatcttgtcgaaagaaggcacatcgttcgccgttgttgacacagcaactatcgtaatgttatggacgaagagaccagaaggatgtgtcagatttatacgtgtcataggatgaaggaatccaatgaaataaactgacgatccggtctggcaaggtttttcttcgaatgagcggcttcgagttcttcctcaccagcttcttctccaaacgacaaaagcttcgtgtttctgcattccagcaacgagtgatttgttttgtcaaagacccaaacttacaagcgttttcagactcttctctctacgcgtctttctcagtactcactttttctttttccctatcccagcttctctcctctctttttcttctttttctctttccctccttctggcctcctgtttcctacgttcctcggcagttattcgaatgacaatatcgtcaaacgggttatctaggataacgattgatttgatttttggtgggtacttgggtctctcggtttgcttgtcagtctcgagttgaccaattttcagaacgttgaagatagtgtttccatccgccgctacctgattatgaaagagaaagaatcggcagaagacgttaaggaaagtaaaatccagagaaaagaacgaaaaagaaggagcgcacttttccaaaaatcgtctaaagtatacgaaaagcaagctaaagtgagctctcttgtcttcagtaagagaaacaaggaacttacgtgcttgccctgcaactcatccgttcgatctatgcaacaatcatttccctcagccttcagacctttatctataggatttcaaacttaaaacttaccaagggtgactgtagtacatacgccatcatacaattattgagaggtcaaaatgattgcgcgcgctacagtagacagacttgaggatgatgttcactaactgaaaaattgactctgattggtatctgttccgatagataacaaacataaagagacatggaaatgtcggtaagagctctcaaatacatgtatatgaaataactcgaagaggacttacttcgcgcgttgttgttggccatagcaacgagccctcgtctggagaacttgagtctctgatgaggttcatcctcgaacggttctgtgcaaatcccagagtcagtgagctcaatcggcatatgttaagcggaagaaagaggaacgtaccaccgtagaatgattcgcctccgtaaccggtgccggttggatctcctgtttggatcatgaagttctcgacgattcggtggactatttgcagcagagaaattggtgatgtgatcagtaactcatgcactttccaacagatgtacagatgctgctgcgtgagccgtaatggatcctgggagatgttgataactcacaaatacaattgtcgtagtatccctccctacgttaaatagaccgtccagcaaattatggacgacgtcagcatgcccatcaattaatgcgcttgaaagaactcagtaggagaggaaagcaaaagcatggagttacatgattaaactgtctcggatgaaaaccaagatgaagagactgcttcagcacggtctattctggatagcctcaagcgtacgcaattatgaagaaagatcaagtgttaaacgaacgcgataaagttccgacatgcctttggagcctctttcggccaaagctcgatctggtgagcgaaggaaaacacgtcacgaaaagaaaagaaaagatcagagaataaagtatcgagtagaaaattgattcaagctgctataacagatgttggtgtagggctgatgacgaacctctatgtcgcccatagtcgtttgaagaacgactgttgaacatgacgtgacgtgcgtagaagcagaacagagtcagaagatgagtcagacaagcgaaacaagacacagagttaaaaaatgttgaccttttccactggtagctggctcatagatgtataggttggacatcttctctgccggctctgtcctcgttgatgatggccgttgacgatgatggcatggctggtagagccatgagggaagaggaggaggggtttatatgtggctgtgtgaacacgtgactgaattctcttgtggctgtgccggctaattgaccatacccgggtgatgttcttctcgtcttcctcctactttcctatcctcgccatcatcttgatattcatcaccatatacttccttctcaccatcattattcacgatggaaggtatatccacttcgctagatacaaaaacgatatcacctcagagtcatcaagttctcgatcccgacattttaccttcccttcacccagtagatcctcccagagctgcgtctgctcctactcccgttctggctacaggttacacaaagtttcttatcgagaatgcagcctcgattaatagtgtagaaggcgcaattcggagtggaagttatctccttccaggaagattcgagggagctgagatcgttagtgagggaggtaagttctgcttcctgatctttattgtctctgcctacctgtgtcgcgtctacaagttgatcacttcggtcgtttaactcaaatgttcatccgcctggcatctttcttttttttttgtatttttttttgtaaacaagtctctgccttcctccatatacttacacatctacactccactataatctccaactatgtgggccgacttcctttgactttcaggccacctgtttcacctccaacgatgcaggagcgatatactcgatcatgggctaaatcttctggcctgtacagatggtcagccagactactccaattgttgagtcaggttgagctgttggtcgagatgtgtgctcatcgaatggatttgaaggacaagaagcaaggaaaggagaacagaggatcgagaagagcgaatgtgcttgtgggtatcgagggaattaagtacgtcttgacctacttgcccaatgagtagagccgagatcttcgagactgactatcctctttctttcttcttcttctttttctttttgacagaacgatccttcgactcattcttcttgccgtcacttctcgtccattgatcaaccctcctcttcctcaacctgcgtccgatctaacatcagtcccactcagcacctccccttctcctctatccgagcccgaacgtgacctgacgcagatcaaaaacccgattcaagagatacttcttccaaaaactctctacaccagctcacttgtcaaaggaagggaccttgtgactcctcttgccggttggaaagatacgttaggagaagtcttttgggcgggaagaggagcgttttatgtgttgctttgggtctggggacgaaagttcggtggcagagggaaggctgtttggggcgcacttttggttagtcattccccgaaatcgttgtcttctaggttaatctgtattaaatcaaactgcttcccttcctttgtccatcagctttcgatcctgtccagaaatctttctagagcggcctcatcgccgtcgtcggcattgacgccgtcaaaaccgacgtatccatcttcgactaccagccccgaatcttctcgcaaagtgagctcgcttgagagggcagagagggctaacagagataaggcattcttcggttatctattcaggggtgccgtctgggagactctgactcggtccgttgtcaatttcacttttgatctcatattcttccatgagattctgttttcaacactcgtgttgacgcttctgcccctcctttgttgttattttcttcaatggcttggtttcattttctcaaattcaataaaataaatatcagaccgatgttagaatcagtggcaagaaaatcgtcaaagattcccatcgtaggattagtaggtggtgtgctggaggactatattccgttgatcgagaattactattgttcgtctctcttcttctcttcttgctctctcacttttgtgaacatacgctgaacacatgtaacaaatggttgtttcttccggttggtttggctgtgctcgtccgaaatctggatggtttcttagattatacggccgactagtctgtgttgtgtatcatgataatctgtacactgtctcacatgtctgtgaatcattacatcgggggtttcctcattctttctcgttcttcatgctttgtgtaaagtcgactcaggatatcagatacaatgtaaatgcatgcgagacagaaaagtcaagatggaatgcttgatcggggatgatgcaaacatcatatgatgtgacaatacctatggtaattgaatgatggaagataattatcgaattcgatcatcaggatccaaacacctgacccaacttccctctctttcccagtttataggaatcgatttctcttcctgtaaatccgtttacattcgggtgtcgaatccattagaaatatcaagagtagaaagagagaagagatgaggttagtgaagctatcccaggacgcatatccgcacaagacaaacaaacaaaagagaagaccgggattcacaaatgatcgtgttagccttgagaaaactcctcttgccagtcgttgatgagctagtaacgaaggatggaagcagtctcttatgtttttcccacaaaattccgtaatggggatcaatgcccgacatgcaaagagataggaaagaattatggctcacgctgacgacaaagcttcaatgggaacttctgacatgttgagcgccgatcctggttgaaaaactgtgccactttgatccatgatgtaaagagagagcaaggccaagaacacaataatcggggcggtgagaatgacaaacgtgataggcgacttgttaggaggagagcagagagcgtacaacataggatcttgaagcccttgataatattcaacgatccgaacgagcctttcatctgttcattcattacagaattgagcatgaattcagttaaagcagagagattcacccagagcgcaaaggtgtgtatcgatataagagaatggtgcaaacatactatatcgttcttgcagaaatttcatcctcgacctcgtcaactctcctatcttcccttgtcttaatgcgcatgaacacttgaattcattcaactcaatcgcttctgcgctaattgatcgatatcgggattaatcattggtttgagagggaagtaagaagcgttacgagaaacatgcttagcgacattttgagggtcagggagagactcaccaatatgggtcttgaccattgtccgaaagttcatgaattttggagacgtctaacacaccgactgaggtttttcgagtaatattgatgttgttgagaattaagcgtcgatcttctctagattgacttgtgatgaagataaaaaccaagaaattctgacctatgttgatcatcactccggctgtcaagtacaaatgcaagcccatgttgataggatcgatatcgtgagaagggcatccaatcttttatctgttttccaaagataaagaacagaagtagactaacgaatgaactttcgcacaatctccagtgtctgtcgaacattcagttcaaagagatctggggatccaggagtgatagcaattccagcttttgggtcaggtgtcgatttgaccagttagtgatgcgtccaattcatcttgtaaatgacatgtacatgtcgtgaagaatccacgcacgagaagaacaaagtgcacactacggtacataaaaatcagaaccaacccaggcgaccggttgaactactcatgctagtaccgtcgaaggagaagaaggaagcttactaaatcgttcgatccaatctgtaaattgagatatgtccatttcataggacgtcccgatttattaaatccccattggtgtttttcgaatacatagtgagccataggaacaaggtagtctgtcgcagaacatcagccgtgttttgagggggtgtacaagtttttagctatcagttttcgtgattgagtcgagatgttcagtagggaacgacacaaatatattaacctcgagcctgatgaggtaggttctcagccagactaccagaaagtgctgcattcaaccgatcctgacgtggtgtccatccgacaggacccagagggcataaatgacctaaacaaaccagatgatggaggagatatgaaaaattcaattgaatgagcctcaagagaaattgttaataaagaaagagaaataaacagaccgtaacatatttccgctggatgatcccctctagagaagccagttatactcgaagagtagtatctaagtagcttctcagattcataccccggaactcgatcgatcagtcttacaagattggtcgcccacagtgcaaggatgctgatcgaaaagacagacgaaagaacagaacagaagacatacgttaggaagagtaatttctttatggtctcctccggccgcccaactagcgcctctgaactcatgcgatgttgtttcaggtgtggattgtattcctcggaggaaccatccggcggtgatcgagtcccctaaagccatcgtatacgagaactcatccggccgacttgtcgatgtcaaacgggaaacaccaactggtcaatgaatgatccaagaccagcattacaaccggtgatcagaaagtacgagtaggaacttacaggtcccatactgactctgatggacgatctctggctggaagatgagggcaatgcttgatatttttaacccaggttccgttgaaaggctgggccgaagaagtacttcccaatgttttttgcgtttgtgatcgaggcaccgggacaggatagaaaagagagctgagaagcgtcaatatggaaaaagatcggtccatcggttcatcaagacaaacggcttgtcgggaagtttgattgaaggtctttgagagaatggatggtgatcagcaacgaactacatggtcagaaggtaaaaaggctgagaacaacatcgagagagataacaacgtacaggacttatctaatctgcggccaaggaagatgcgtcataacatgtgattcagaaagctgtgctctacgcgttcctgttcctttgttttgtttttgttccttctgtgattttcgtggtattttattttattttattttattacccgccttctttttctttgttgcgcccgttctttctttcctcttctctctccaaccatcatcaacgaccgagctaagcaagagcaagccatcaagaaaacaagaccaggagtgcacataggcaaggttaaggagtttctgtttcttctcttctttctcttcaagaagtaccctccaccatcatctttttctcggaacccatcctactagctatctcttcttgacaccaaatcaagcctcagattgccatctgcctttccttcattacctacaacgccacctctacaagtaacctcttctttacttcgaaacatggctccttcaactcctgccaggtccaacattaattccaggccctcattccaaaactcaacaccgaaccagtccaaatcagggcatgctcagggctcaaacccgtctgtcaatgtcaagactcctgcgtcgaacgctgcaaactggaggactcgagttcggtcgaccacttcgacatcttatgctacccctgctgctcagagcaggaggaggactgtgagcgaccaacagattcaaggtgtacgtatacctctttctgctggctagtttgatcttttggtgttcccctactctccttcctctttccacgtctgcaggagccggacatggcttgatgcatgtagcctctaaactatttgctgccgaaactttgtttcgatgtcttgcgatagatgtcagtatgcatgtcgacggtgcacgactctctgttgccatctacactgtccttacgtagttcattccccctgactccaactcgcggctcgagctgtccctggctgcagcgcttcagcacaccacctctttgttcctctctttctatcaaggttatcattcttactagcacactaagctttcttgctttgcctccttgactcgatgcatatagacccaagatctttccgagaccccaggtttgagttacggcgacactccttcaaccgttggctcctccgttggttcctctctacctgctactccggcctccccgacgtaccgtcagcctcgaaactcgaagaacgttccgtatgttccgtccaaccttcattccaggcaccactcttcaccccttcaccgatccttaggtctgcctgcagacgactcgttcgatgagtcctatgagcaggacatatcgtttgatgaaggcgttgggatccacagcatgatgccccagtctgctgcggccagaaagcttcggcttggaatccttccagaggagaacaccgaaccatttactatctctgctagcaagcttgatcaagactggtctgctcctagccagaccggcgccagccccctgcgatggaggcaggtgagcgaagcatcatcctacgccagtcagaccgatggtgaagatgccacttcaggtctgttttttccttgcgcatatactcgcatgttttcttgtgcacctttctcataacaagaagttcatactgactcaaacttctcgtttccattacagtcaaaactgtcactccggccacgactcctcctagaagcaaaacgcgagccctaagctctggagccgttccccactttcttactccgcctcccgtcaacacacgaggtcgagtgatcgttcccattgcgcctgccaccgtcgctccctcccttcgagggaccagtcgacggtcactctcacctttctacgagaacgatgagccgctgttgcccatcgacaagagcatctctaagccccggttcgccggtctttctcccgctcagagagggactcttgtctcagtcgtcaatcgagccatcgccatcagaaagccccagtcccctacacccaaatcagccacgccaaccgctatattgggttctcaaacaatcgaggcgccaagtcaagcagagccgcagcaatcatctgctatttgtggatgttgcgaagatgagatcaagaaggacggggtaaagattggaccttgtgcctgtgtggtctgtaaacaatggtcagttggatttgcgcttcgtccccagctggatctcaactaaacggttccaagcgtttgcttctctctcaactcaaatagtttcactagtggaatgaagtatgtataagatcagatcaggccgccttctcctcagtgctaatcttgcctctttgtcattcttccgatagcgttgtatgtgatgtagccggaggcatcatgaggtaagcatttacagatcagtattccatctcatatctactgatcacatcgtctggttacatcttagatgcccttcttgtacaaccactgtcaacgacttttcaaccttctctcctcctaagcaagaaacttcctccaaagttcaacccaaggtccaaactcgagttctgccttccattaacgatcaatccaatatgcctgtcattcttcgatttgacaatgccagttgggtgagttacctccgcgctttggtgtaacgccgttttggcattcgctcagaactgatgtatcaagaactttctcaatgttcataggatgttacccctgagatgatcattgactttcttcctgaaaacgctcttgccgatccatctcaaaatcctcaccctattcacctcttgatcaacccttttgatggaaagactaaagactttttcgtacgtgtcttcaaatcaaatttcaatcactgaacttcgtccagtgggttgaccgacaaagcatttacaatccatcacctatcttagtttgtcgaggttgtatcaaagtcagcggcagcggcagtcatcaagagttgccagtcaaccattcttggagagggcaggagagcgagaccagtgactataactgtatgtcggttgcaggctttaaataaccgaatgaaatgattctaaatagaacaatcatttgatataccagctttcgaacttgactgagcttcgacgagaggcgagtactaagtttatcaatttaaacctgagtatttcaaacctgattcttaacgtcttcccgtgttttctagattcaacctacttctgcgcgagcattgaacagcgtccttgagttgtgctccactgcattctcgaccaagaagagctacatcaagcgaaagtccttcccattgtaagttcaagaagcgctcttcatcagacgtagcgtagagccgaacctgacaaagatatttaatgaatggtctggcagcttgtatatgatgacaattcttactcgggctagtctcaagggtctcgaaatggacttgcttgtcgtcttccaaggtgcgagtctcctttttaatttaatctgtgcctgcgcatgcaaccgtaccttattgcctgaatcttttcatccaggcgctgccctgatcatctcaaatcttctcgagtccggcgctgcctcgacttccgagctagcccttgcccgggcgctttactctgttcttctcctatccccactcttgacccctgttgtatgcggtccattcattggtgttatgcccggaccagctcaccctctaagccgacctgttgtccaacctcaaatgcctcagctcatgttcaattcgatgggtattccgggttacaacggaatgggtatgatagcgccggcaaatgttgggcagtcctatttgcaacagcagcatcagcatcagcaacaaatgtttgcgatgaacggacaactaagaatctagcgttctcgtctaaagcagacttatagatttctgtttcttcactcgtttcttctcttctctctttttctctcgacgagcactcattttctcaccggctggaaagttgcttctctatttcaagatccctcaataagtaaatacacatctattttacctgtttttctttttcacactatatcccaaccttgcatacataagtttgatcatatcctcctaacatgactcggaagcatcctcttctgcgtttgaaatggtttttttttcactcttctcattctgattcttcatctgttttcatctgtactttgaattttctcctcttctgctcgtttctagatatatatccctcttcacctccattacggtacgcctccgtgtctgcatatgtccgtctttcattcatttgttcgtatgtttcgcttctcggttcgacgcaactcgttctgtgttttgctcgcttaggctttccgaaatcgctcccctcgatcacgcgaagttcatgatttatgatgtttctattcttctatctgtcgttccaaactgttgcaagatgggtgccaaacctcagacatgtacctgtttatagctaacgacctgtctgtaggtgcatcctcaaaatacttgttcaatcagctgtattttgacaacagagagggaacaattcgcaaaattcgattgatgcgcttatcaacaaagccctctgatttggaacactttactgatccacttatcctcattgtacagtgtgcgcagctaatttattcgtcagaatgatcttattcaagaacgactcaagatgaacaggcctactgtgtaccttcgtgtcggtttgtgaacgaaaggagttatgtatgttagttttattcttgcgaagcggacttttcatcaaaggatcgtctcttctttgtcaaaggcgtccactctcgaggaaagtgtagaagtatagcatagagaaagcaacaatgtgaccaaacgagagtactaggaagaaaatgcccggaaagttgataatgatgacaatatactgtacagcatggagtatacggaaacacaatgaggaagaagataagcaaagacagtcagagacaaagttaaacagagtagagaaagcttacagaaaacaaacaaggagaggcagagcaaagagagtgggagagacgggaaatccttagtaggaaagcaggatgagcaaacaaatggaagaagactgtctacaacagaagaaagagaagaaatagagaaataacggaaaggagaacggaaacgcgaaaaaattgctgctctcgtctggattcctcgagggtgttgagattaatttcagtcgcttctgcagacactttatgaacgatcggtggtgaaacctcaagttgctcgtccgaggatatcagagggagttgagtcggactgagaaaggaagaaatggaggattccgtacagagtataaactggtgtagaggagatcgagatcgcaggatcgatcctccccacggataaggagccacttgttcctgatgttcgttccttcgggcctcaatccaacttgggatatttactgattggggccgttgcgcgggaacagagggtgagccttctaaatccaacgagttctcagcccattgcttcggcttcttgtttgaccgagccggctcatcacaaagtttgatggaaggatcggccgaatgatgtcgaattctttttccgagagaagacttggtagtaggcgaggcccaggcagcacgtgatgaagagcgaaaaagcttgacagaaggcaaaacaaagacgggcttcgatgtcattctgtgaggacgatatcacaaggcgttagctagaaagaaccgatgctcggtaaatgaaaagaggcatttacctgtaagattctacctttttgatgtttttgattttcttagtcttgtcagttttgttgatcttgttaattttgttgattttcttgatgtggtttatttggtttatcatattaactaattgcgtctgtctgacacgtttggcgagtttgatccgtttcgcccgggaaaacatgatagtggacacagttcgattgacagggctgggggacgatggaacattcaactgagtgttgtgagtcagaggaagggaaaggtcagatcgagaggtgatagaaacagtgctcatgatgaatgtgctgatcgaaggaaagaagatggcgccgagtggaagaaaagtggaaagcgtgagataagtcaagaaacaagaacaactgttcctgacgaccagccatatatacctggccaaggatttccttcccttcgtaaaactgatccagggcgcgtcgaagctgcataaaggataagaaaaataaattgatgaacgcgattatattctatttccaggcgacgtgtccgtttgttgtttttcttttcggacgtgttgtgcctggatgtcgcgctgcaagtgttgctgtaagaacgaaccaccactgtgagcaggatgtcatcaagtcggaaggtcatttgcgaccggtcgatgtacaaagacgcatcatttgtatcagtcacagcagttgcatcagctaaagctatcacgacctccgctgggctatccggaacttcacatgcagtgttcctaagaagtgtgagtgatctgagcatgtcagttcggaagctgcctggagagcacatctaaattaatatcacagagagcgaagagcgaagggtaaggaaccgtagatctaagggctgagctctctttacaatgcgacgcatactgacttccaatctaaggacgctgacatccgcttatttagacagtccgtccttcgttctcagcactcggattgtatcctggaagatctgaaagaagaatttgaggaacagttaacgtcgacacctgtgctctgtaccaaatgagcggacatacgtctttatgaaagaagagtcagagttatgcaattgcccacaccctcggccacaacatcatcatgttcagtaggcctcctccctccgcttctactccatacagcctccttcaggttatctcacaatgaagaagagctctcgttccgccaataaatcactctaacagtctgctgatatgacaatatatgtattacacattggaatgatccacggctgtttcattcagtccttggtagaatgtaccgatcgaaaacctgatcgatcgacaggccactcaagagcactaaacgacatttcccagccagtccatcagagatcctccacctgatgcggctttagaggcagattctgcttcctttgccttattggaagctagcatcttttgtaaagcggatggctgtttcttcttcttcctcgatgaagtggtcggattgatggggccactgacactagcgccagaggtagtggagatagcagagggaggggctggtgataatgatgctggcgagctaagcggtgtctttgatgcagatccaacaagaggtaacgcagatgagatagagagaggattaggagtgatggatgatgagaatgctggtgtcttgatcggctgtttgatagaaacacgcgcactggctggagagtgaggtgcaggcccctgcaatattgacgtcgtgagtaggggagaggaaggaagagattccacaggttgttgttgctgctgctgcttctgtaaactcctcgtcttccttgtgctaggaaacgattcaaccacattccgatcacttcccggtctgatattaacatccccacaagccaaacaggtcactctgaccctgttaaatttcttctttcgctctttttctttcccttgatcaattccttttcctttcttagatctccgtagctgtatggtcgaagtatgaccgggaacaagtaaggtgctgcatcgaacgcagctgatgtgttcggtggctgatgcgggaagttcagatagaagacgaagtcgactcaaatggagagcggatagattaggtgaaactgggtagaggtgagcgggtaaatgggagagatgggatagcgtgggtaggctgggttgaaaggtggacatcgtggtttggatgaggaatcagttctcggtcaaattaaaggagttggatgttgaggaggatgaatgcaaaaaaagaaagaaaaaaactagagaaattttgtaataagaaattggacagccgtctagtttaaacttacagtcaagagctcaaacgtcggtggcacttccggttgatctccatctctcttattccatccatcttacctgtatatttaatcacaaacaaccaaaaaacacaggcagatacacattctatggcatcaccagatataataggtgctccagattggcctggaagatacgagcatgtggagtaagctacaaaatgatctgacttcgttcgaaattgtctgtcatatgcccctcagtcctgataatcacatcttgaatcccctgatggatctccgggcttgaatgaaccgatagcatgctacttgataggcctggacccagcacagatatagactccttcgttcctggcgatgctgtaagcaagtttctggctctgatgcgatcgtctgttgggtgagatggatgagggcgctgatgcgcgtatatcctctcgttgttccagatcaagagctttctcagagatacctgcaaaatcttggtcatcggagcaggaggactgggttgtgaaatcctgtcgaatctggcaatgtgtacgtttctcaagatcactctgatgaacgcagcgaatcggtgctgataaacccatacataaagtgggctttaaggacatcaccgttatcgatatggatacaatcgatgtgggttcttgagtataatctctgtccatagcagggcctaagcttaacttcatttcttcacgatcatgataggtatccaacttgaatcgacagtttctcttccggttcgttcacattgctatgcccttaattgtcccgatcaccgcgctcacttctgattcctgtgataaaccttgtagagaatctgatgtaggtaaaccgaaagcgactgtagcggccgacttcatcatggcgcgtgttccgggatgcaaagttacgtcgtacgtacctttctgcttggattctgtgatggagagattgtccattgacgacaatattaatcgtcctctgtctcaacagatattttggaaaaattcaggaccatcctgagtcgttttataagcagtttaacttagtgatcaccgggcttgattcggtggaagctcgaagatggatgaacgccacattggtcggcatggtggatgaagatgaaggtccagagagtatgaagccgatgattgatggtggaacagaaggttcgtatcatctcggaataagatgcatcaagttatgaatcaatagctgatgtttggctgctcaatgtgaccttctctgtcacaggctttaaaggtcaagccacggtgattttgcccacaatctcgcattgttatgagtgcactgtgcgtctacggctcgcctgttttcgatatgttcccaaacctcaatgataactgatagtcaatttcaattcgacactcaactgcgagtgcagctccacatgcacacaccgcctacagctttcccgatatgtacgatcgcaaatacacctcgactaccggaacactgtattgaatgggcttctgtacttgaatggcctaaagtattcaaaggtgagtctttcttgcttgtgattgacaagagaggcaagctgacgtgatagatattgctgctgccatgacaaaaacaaaaaaaaagacaagaagctggacaccgatgatcccgcagacatcgaatggctatacacccaggcattggctcgagcaaagaagcaccacatcgaaggtgttacttggtcgctgacacaaggtgtcgtcaagaacattatccccgccatcgccagtacaaatgcaatcatcgctggtgagttcattgttcaattctcgcgagtcttttcggaacatgacgtgaagaggaaactaactggttaattttcatcgatattcagcgagttgttgcactgaagctttcaaacttgtcaccaacagcgctccttacttggatagctacatgatggtaagaatgttcccttgatgtttctcccgctctgctttcgcctatctttatcttgatctgtgctgacatttcttaaatgtttgacactatacaaacagtatgttggtaacgattcgatatacacatacaccttcaaacctgaacaacggccggactgtccggtctgtgggggagaagtgatagacgtcactatcaaaaaggagtggaagatagaagatctatacgagtggttgaaagctaggcaggatctgtcagttacatttccttcttcctctcttctcgcccatcttctagcttctgtcatcgatgctgaaataaatctgaacctggcatgaaacaatttagtcaactcaagaaaccatccctttcaagtccgaacggcccactgtacttttcatccccaccccaacttgaacttgcaactcgaccaaatcttgaacgactagtcagtgaccttttgaaggacggggatgaaattacagtgacggatgtcgcgttgcccttccaaatgagtcttaaggtcaagttcgaataagaaaagcgggtaagatgtagactaggagcgagacagttgtttacagaatttgtttcgtcgatagttctcttccctcatgattaatcagatttttgatcggtagtgtgaattgagggattgaagattgatatgagaatcagtgaatgccggaggaaaaagagtttgtacataaggcaagaaaagaacaaaggggaagatgtcaaacactataaacgattaacatgatgactagggttcactctactaacaatgaacgagtaaatgaccaaaaaataaaaaagaagaaactatagaaggagtggaaggaagagggaaaagactccaaagaaaggccgaaaaaacggagagaaatcaagatcacggattgaagagagatcaggtcaatgaattgagatctgtgcccctgacaagggcatggatacaggataaagttgtgacgattgaaactatttgattaaggagagcaccggagagacttagatcgaggctccctcttcgcgctcaacagcttcaagtcgagagatttgtctgtgaggaagggccaaattggtacaaaaagaggatccaaaatactccagtcgggtcagaatcaagtaggttagaccttcagaatggaagaatgcagataggactgacctatctctaacagcttcctgccacctttgaagccttccgacctcattcactccgaacccgaagatttttggtcggtacctttcaactttactagcagctgccaccatgctcacactccccactcctgatgggcctgccaatcctccaccgtgtaatccttgacctccttgaccggctgtttgtccgccggtgttggcactaccggacgtgaaagcgccatcgctttggtgtgcggggtgagaaccaggcaaaggtgtcccggagttgttaccagcgcctgctgacgaggcttgttgaggagagagtagtaaaggaagcgaaaggtggggcaatgtcggaggggggactttggaaggaatcatgtgagggtaaaccatgaaaagcatgtgaggaaaggctgatagggcgtgcgttgcagaggcaaggttagaatcaattcgaaaagtaaggaaactgaatagacgaaaacggaaggacctactagttccaaaataggccccatcaatggttccgtgtcggttgcttttcggactgtagatgtcttcacatcgaggacagtacagctttacggctttttgataaggtagatcggacaatccaaccggaagaagcggttgagacaagcaatacaccctagggcaccttccgaagtcggcttttttatatttttccatctgagagcaaaagagaaagagcgtaggttacggcttgatcaacaagtttgattctagaaaagcatttagatgtggatagacgaaccatcttggctaaacctcgggatgtaaggatataacgggcgtggattagaccatataggaatcgggctgaattttcaatcgtttctctgacttcatcttccaggtcttcctcaactgtagatatgaaaacaagtttttgaataagctagatgctatctggcagaaagatagatgtccagaggaaagggacttacagacgcctagagaatcagtaatcaggtcgagtgctcttgagtactcattcaacacctcagcactcaatccagtaaggttaaatctgtcaagaatatattcctcatcaacctccgcatagtattcgttccctttagtcagaaggaaccagttgatccatcttgggtttgagcatattcagttgtgaatgagtcaggtgaagacaagaagaaaaagaagaaaatcaggaagggaaacgatttgacatgaataggtacaaagaaacaagtaaaagaaaaaaacacgaacgagctgttgtactctgagtcacttcctgttgagaggtcgtccattttgagatcaaatggaagagaaggagaagaaagaggtgaacgaataagtcgagcgagctgatggaaggaaacgaggacgatggaacgatgggcacgggaaagatcaagtcctacaaaaagcggcaccttttttctccgtttcgcaactcaaacattttctaatcggtcattacgacactttgtaatgtttcatatcagtcgacacaaatagcgagtctcctcatcaattgaggttctctcagaagatgcaataccaggttctaccgcaacaagtgtagttgcgaatgaacatcctgtgatctcatcatatagatgaaatataggcaatcagttcagtacacgatccgttttgagcactcgactttctgcagtacgaggtttccttcgtaatctactcctcaagcgtacacgcatgattgctttgttaaggccttcaatatttatctctctagtcagttgagtatacagagcgcagatatttcgtatctgggcaatctatacgagagagttcaatctttgtatgttctctgcataaacactctaagatccttttcggggtctctcgtagccagctgcacaacgcaccgaaatccaggcataaccctacgctgggtgcgcccagcacagtttggcagcaatggtgaactagacaacgatattatttttgaagtgatgtggaggacactatcatcagaagaactttatctgggtcgactgactggttttgtgtcctcttgcttcccaatgtgattacatatatattaatttcgtcctgatacagtgctcctgtagcgatggttggaagaggtcgggtcattgagtagcatgatcagagaatacggtttcatagtttacgtatcgacttgtcttctcccttgcgctgatttcattttttcttgcgttttttgtgatcacacgagtttgatgaggaaaaaatctcacttcaagctctcacagtctgttctgacgaaacattgtatatgagggttctattagaccgtgatgaaaacattagctgccatgggaatcaagtcttgaaagtttgtctacgtaatttgagacttcaaatcagttaattcttcagatcatgaacaacgactctgccgagtcatccgctactcgagaatgtcgggcatgaggttatgttgagtttgctgacttctgacgatgggcaggcggtcatcgacatgatcaagactgaaagcgacaacaaaatcatcccttcaaactcctccgactctggtccaagcgggttcttttcatgcctggtcaagtatataacaacaatacttgagatatgatcatgtacgggatgacgtactgaggataataagggttacatacaatgtgtgacgacagtacaacaactcgtagagtctcaagacgaactcattaagtcctttcaacgcgtcgcgtgccgcgtgcggaggaacgcggtcagcttgacgcgtgctgttgtcacaagaagtttcatccaaccgaaccgatcgatattgtcattccctgcttccatcatccttctatcttttctttttggttgcttccttcatcggcactctcttcttcctctttttctctttttttttgttctcactttcgtctttgctctatttttctgcttacgcaggtcatcaggacatcccttgtaaaatccgtttgaaagggaacagagcaaaaccttccagcatatacccataacatataccctccatttttctgatccttcggttctgatcatcaacagcccatcttcagccttcaactagagcatggcacgaggtggaaacccaatttttggactaacctctggcagaggtaccggtggacgaggcagaggtcgcggaggtagatccaacactcagttcactgggagtcgtcgagggggtcatggtgccgctaacggcaaaggttcaggtccagctccagttagagcagacgatggttctgcacaagtggagaagttcgaggatatcagagtcaaagatgagatcgacgagaaacttggtttctggaggtgggaagggggaggaggaggcgcaacaggcgaagaggattctaagattggctggctggtcaatatgcatcaggtacgtcgtcctcaaacctaactatcaagtctcctaccgtcttagtcggggcagaaacactaaacaccttcaccttgcttttttcgtcgtcgtacaaattctgttgacagaccctaacgcaggacgaacacattgcaggaggtcgtcaagcgatcgacctgtacttcattcaagacgacggaggcatgttcaagagcacgatgccatttgagccatatttttttgtcggatgcaaggttggtcaatcatctcaatggtttctagacaacatgctaactagtttctgttttttaaagcttggaacggagacgatagttgaagagtggcttatgaagaaatacgaaggtcttctcatcaaagtcagccgaacacggaaggaggatctcaaactcgtttgtcgcttcccttcgttataattcctactcttgtttatctcaactgaatcatcgtcattcgttgttttcactagccaaaccatctgaagggctatcgaccaacgtttcttcaacttttcttctataacaccgccgacctttacgctgtgcgccgcgaaatcgttccactcgcgctctcgaaccggtcaaaacttgatgctgttgatgcctatgccgaggttgttcaagccactatgggcgttgagattgagcaagggttcggcgaggacagcataggtcagagttgggcgggagaaggaatgaagagaggaagagacttggatccaagtgaatgtttgaatgacgtgagggaatacgacgtgaattattacttacgagtagctattgatctaggtccgtcagtttaatctttggggcgggttattggacactcctctaacgcctgtttttgttcccaccttcataaatgatgaccctatagacatccgagtgggactttggtacaccgtcaagtccatgtttggttcaatatctctgaaaacgatcacagaacgagtgaagagagccgaaccggtcgtcatggcattcgatatcgagacctcaaaatcgccccttaaattccctgaccagcaggtcgatcagatcatgatgatctcctacatggttgacggaatgggctatctcatcacaaacagagagatcgtgagtgaggacattgaggatttcgaatacaccccgaaaccagagtacgaaggcccattcacaatcttcaacgagcccgatgaggtgcgctttctatatttattcttctgactttttactctttgttaagcctcagataaggtacttggatctgaccgagaatccttcaatttgatgacattaggcagcgctcatcagaagatggtttgagcatgtccgagatgttcgaccgaccgtcatcgctaccttcaacggagatgctttcgattttcccttcgtcgatgctcgagccaactttcatggtatcagcatgtttaacgagattggcttcatgaaagatcaggaggatgagtacaagtcgaggagttgtgttcatatggactgtttcaggcatgtctccaaaattcctgcttctttctctcaagtgacacaagctatcctcttatggctgactgatcctgataccgtgcttgctgtcgttcacagatgggtcaagcgtgactcatatttgcctcaaggaagtcaaggtctaaaggcagtcacgacttataagcttggttatcagcctatcgaactcgatccagagcttatgactccgtgcgtttccagttcgattgctctctatttccgtcttttatctgtgcagatgattgaccgctgttttgctctccttgacgcatgcctttttgatgaattgttaggtatgcaattgaacaacctcaaattctagcccagtactctgtgtcagatgcagtagcaacgtattacctttacatgacttatgtccatccgttcgtcttctctttgtgtaacattattccattgaatccggatgaagtgttgaggaaggggacaggtacactttgcgagacgctgctaatggtaagactcctaaactatcttggctcaacttatccccttttgtccaatcatttgacctgcttttccccttttatttttatttttatgattaggtggaagccttcaaaggagaaatcatcatgccgaatcgatatgaagaaccttacgggaacatgtacgagggccatctcttatcttcggagacgtatgtcggtggtcacgtcgaagctctggaggccggtgttttcagaagtgatataccaacaaatttcaaagtagtaccgaccgctatgcaacaggtgtgtcatatctctagttcttgtacaccctgaagcttgccacgatgaaactgaaggaggtctcggcggtctctctcttcagctcatcgatgatctagactccgcgctcagatttagtctggtaacagagggaaatgtcaatctagccgacgttgagaattacgacgaagtcaaaggccaaatccagtctgcgctcgaagaactccgtgacaatccatctcgaatggataaacctctgatctaccatctggatgtggcggctatgtatccgaatatcatgttgtccaatcggttacaacccgattcaattgtggatgaatcgatgtgcgcgacgtgcgattacaaccgtccggacaaaacgtgtgatcgtcgtatgcaatgggcctggcgtggagaatatttccccgcgaagagggacgaattcaacatggtcaagaacgcgttggaacaagaatcgtttccgccgaaatggccatcaggaccgagtcgccggttcgtcgacttgactcaagtggaacaatcgacacttttacataaacgattgggtgattactctcgaaaagtataccgaaagactcacgagaccaagatcattaacaaggaggcaatcgtatgtcagcgagagaatccattctatatcgacactgtacgggctttccgagatcgtcgatacgagtacaaaggtctacacaaaacctggaagaagaatctcgacaaggccgccaccggaggaggttcccttgctgaaatcactgaggctaaaggaatgattgtcatttacgattcgctccagcttgctcacaagtgcattctcaactctttctacggatatgtcatgcggaagggagcgaggtggtactcgatggagatggcaggtatcacctgtctcactggagctaccatcattcagatggctcgagaattggtcgaacagattgggcggccgcttgagctcgataccgatggaatttggtgcatgcttcctggaacgttccctgaagacttcaactttcaacttaaaggaggtaagaagtttggtgtatcgtatccttgcacgatgcttaaccatcttgtgcacgccaaattcacgaacgatcagtaccatgaaatcgtcgataaagaacgtggcacatacgccgtgagaagtgagaattcgatcttcttcgagttagatggaccctacaaggcgatgatcctaccatcttccaaggaggaagacaaattgctcaagaagcgatatgctgtgttcaatccagataattcgcttgcggagttaaaaggtttcgagatcaaacgtcgtggagagcttcagttgatcaagattttccaagctcagatcttcgagaaatttctactagggaccaccacagaggagtgttacgcggctgttgcgcaggtcgctaatcaatggcttgacgttcttcaaagtaaagcggctagcttagaggacaatgagttggttgaattaatctctgaaaatcgaagtatgtccaagacgttagcagaatatggatcacaaaagtcgacttcgatcagcacggccaggcgactggctgagtttttaggagaccaaatggtcaaggacaagggacttgcctgcaagttcatcatctctgccaaacctcacggagcaccagtgacagaacgggcggtaccgattgcaattttcgatgcagagccgacagtcatgaagcactttctacgcaaatggctcaaggacaacaggtaaaaaaattccctcttcaatttgtatcgatcacgaaaagaaaaactaatctaatatttctacgacgtatacgttcagtatcgtcgacttcgatcttcgctcaatcttggattgggagtattacactgaacgtctaggatcagtcattcagaagctcatcacgatccctgccgctctacagaaagtctcaaacgtaggttaaaaatctcaccttgtcgtgtacatgatctagaatcgactgaccaacatactattttctttgttaacactgcaatcagccggtaccccgagttcgtcatccagattggctgcataaacgggtggccacgaaggaggacaaattccaacagcacaaacttacggatatgtttgctcgacaaaacgctgccaactcttctgttctgctgtcagctgacatggaagattttggaaaaccttcggcatcgagcaacggcgcgctcgcagtcgcacgaaccacgcatcgacaatcaaaagttcaacaagaagaggctgttgttcaaaagatcgaacttccgttgagagatgtaaatctaaactatccaggttgggtttccgggatgaaaaagaaatggaagaaacagagagatgttagggcgcgtggcatggtgtccgggggaaacggtggagccagatccggatacgacaacagttcaatctcctctttgttccgacagaggacttttgggttgagctcattgacgtgggaagtcattcaggtcacgccgacttcccgaccggggttgttcaatttatggcttctgattgataacagtcttcaaaaagtcaaacttcgtattcctcgacagttctatctaaatcttcgatctcccccggaaaaagacacgttcttgcccatatatcaggccgagcctctcgtgagaacacttccaagaaaccatccatgtctaaacttattccggatcaaagtcgacgaacagctttatcttgaaggagaatctcacttctcgacgttaattaataacccaaaagtcgatggtgtatatgaactccaagtaagtaccagctcatttgtttagcaggtcatgaaatgattgctcatatgatatcttgcaatttgtgaccagattcctttggttgtaagagctcttcttcaatttggaaacacatgcgcacttgacaagactgtgaagggaggccttaataaaggacttgatgaaggtttcgaccttgatcaactggaacggattggaccttctctctcaaagcggccgtatctcaacggtggacaaggtataagattcatcttcgtctaccattccactcaagacagccgtcatcttcttggtctcttcgctcctggtcaaaccgcgcgagtgatgtcaatcgatagtgcccgagctcgtcaacaaatcaaccatcttcccaagttctatgccgaacggcattcaaaatcacctgatacctttctgaagagtaatctgttcgactaccctgaagaacatgacttcgaggtctcgtatcatttgactgatcaggcaggtttctccgccttcaataaagagctcctcaatctctcttcccgaagtcaacctacagtccttgttgcctttacatctcaaccgcaacaattctttgagcaacgtgtgtctgcatttggaaattacccagtcgtcatgatgcacagtagcaaagaaagcgggtcatcactcatgtggctcaatcatacgacccgtcgaatggttgttgcttatctcagcatggaagctcgactcagggatctaatcgaggttgctcgtcatcatgatgtaccggtcggtaaccttgaggcagatgcccctctcttcctcgcagatattgactttgcccgccggctgcagtctcaggatgctgttctctggtggtcggcaggcccaagacccgatttaggtggactcgaagatgatgcaaatactccacaagctattgatgaactcgctagtccagagttctcaaacgctggttgttacaccaacgttactttccgtatcgcagtccaagatctcgctatcgacgccattcttcaatcagctttggtcaacgagctcgaaggtagtggatcggggtccatggcatttgattcagcctcgcacactttagacgattattcgagaggaagcgcccacgcgtcccttacattgggggatgctgtcttatcaacccaaacgtttggaatactcaagtcgatggtcaagtcatggtatctcaataaagctcgactgtctggtgacgttcctgtggccgatatgctggtggataacttctggagatggatcagttccagctcgtctgcaatgtttgatcccggcgtgcatcgattccttcatgggttgatgaagaagacatttattcaactcttggccgaatttaaacgactggggtcctctgttgtatatgctgattttaacgagatcatcctgttgacgtcgaaaccatcgacaatcaacaccgttgcatacgcaaagtatcttcttaccgccgccaactctaatgaacttttccgtcatctctccttcgagattgtcaacttttgggagctcttgctctggatggacgtccagaatcatggtggaatacctgttatgcctgaagaatgtttgtcccatacatttgttcattgtggaattttgtctgctgttcgttaatcgtcgttactctcattgtcaaatctatacagctgcacaagagattgaagttggctctcatgtcatcgatctcgattggaacatacgttctttccttcctcccgctctccaacacgatttcgaaatcatagtgagcacgttcatcgatcagatgtatcgagccaaacgacaagcgagcgacaacgaacgtgagcccctgcgagcgattcaaaaccttactcaggctactggacctatcctcgatcctattaaaaccaaggaggttggttatgggaaaaagatcatcagcaagaacttgacacgaaaaatgctaggtctagttcagaacattttgattactcaacgtcaggctgccacccatccagaaattgtcgagaccttaacgtttcctaaacttcccggtgcccatcttaaggtttctaatccggcactggaatttgtcaagaccgtctgccacgtcctcggtttggcgcgcgatctttcgatcgaggtgcaagttcttaagcggaatttgcttgaccttgttggggttcgagagtttgcggatcaagcgatcttcaagaacccatgtgaagttctcaaactaccctcagttatctgcacacactgtcagatatctaaagatctagatctttgtcgagatccagaacgcctacctcagcttgtagagcagagtttggatggtagaatcagctgggggttaatccctccccggaacgcaacatggacttgtccacagggccacgctttagaatctttaacaatcgaagttcgtctggtagactatgttcaacgtctagtcctccaatatcaacttcaggatgtgagtcaatttatcctaccgctctcttccctttcttgttccatggtcacttaattacatccattacacgtctgtccttagctcgtctgcagtaaatgcaagcagatccgagactctaatctgacaacaacatgtcagtgtggatcagcgttcatatcgactgttagtcatgtagagttaggcaagcggctggcgttaattgtttccatcgcggagtatcatcatttaaacatgttaaaggaatacgcgtgagtattcaatgcttcatggactttggatacgcgtcatttgaaacgagtagatacgctaacagccttctcgtcgtatctattttctgaatgcagatcgaatattatagggttttggtagagcatccattcatcatttctagattcgcccactttgtattcatcttcatctccaatctctctttctttcttttgtccgttctataccatcatgttgtaatatgtcattcattctgatcagctggcattgttgagcaaaactacggccggcggaccgaatgccgccagatatatatcagtcaaggcttatcgatgattatatttgacatcaaagtaggcatcatcggcatatacaatgagttcgtgctacatatctcaagtaaagcaggcacattctattcatctacatctatcgtatcattcaagatgtcccttatcaaaggacgggacttgacaagcgcctgtctcccaatcttcattttcttgctagccaaactcttcgaagaactctcttcggccgaagatcccactagacacccttgttcgccttctacatcttcagttcgaattggatgatctgaagacacttctgatgaccactttctcactttctcgatagaagccgcttcctcgcttgcttcatcttccgtttgcagagttgaagtgacaattgaaggttctatcatgatcgaatccgaggaagatgacaagtcgatagtgtcgggattaagagaagcaatccgaccgttgttcttcatgagctgaaggaagcgtgcgagaagagtatcgcacgatagagttgaactagagccgatgatgatcagtttcgacttggcgcgagtgaaggccacattgatacgacgccagtctcggaggagttcaccgacctattcatcaacaatcccatgtttcgaagttatcagcgatgataattatgagatacacatgcacgacagaacaaggagcagaacctaccgagccctgttcattacttcgcaccatgctaacaatcacgcaatctttgtccctgccctgacttttatcagctgtgagaatttcaactccttggtttatattggcttcgagtttctgctgaagcaatttaatttgttgacgatataaagttatcacagctacctgacaaggcatcagcccggcgactacagccccttgaactatctggagcagaaaaaaagttggtgaggtcgtttttgtgcaatagatcgaatcaagataatccatacatactctttgaactagcgtggcttctcctgtattctggactaaatctcctattcttgattctctacatggtatgttgtctgtgtcgataaagacgacttttcgtcttgttcgagatttgaagaagaaagcaaacttaaccttgacaactacgaagggcgcatataagagaccttctcagaacttactctggcttcagtatattcttcaaccaatgctccccctccgttcttgcgcacatgtcctccaatttatcccatgtagggtagttcagtgcctgcttctcgaccatatctgagccacacctgagttttccctcataaatgagttcattcgagagcgacatgatttccttgttcattctgtactgataggacaggtccacagatgctgttggatgcgcttcatgcagtcttcggaagagagatgtttctaaacctccgagacgtgccgatgggtttttgacctacacaatattgacgagactttcatcaaacttcaagaactgtttcaacacctgttgatagagaacagaagaccaaacgtaccaagggaggcagttggaagtgatcgcctactagaataaatgtacgagcgaatcgtagggggcctaggcaaacgggcaacgtgatttgagaggcttcgtcaacgatacagtagtcaaatgtccgctgagcaaacaaaggactgaggagcgtttcgaacaaaaagagaaggtacactataagttcgcgatatggtgcttgttgaaaaggagccaggaagagaaaactgactggtctattgtcaatgctgtggttgctatcacttgaggactcatcagtcgccgttcaaactcttccagattatctgctgggcgctgtgctccgagcgtcagatgagagatgtctgggtgaacctgatgattttagaagtgaaatatgtcaagttatccgtccgggtatatccaaaagtgtagaatcagcgtactttatcaggatttcccaatctcagaatttttacatctgtcttaatcaatttggtcagaattgtatctaccgctgaatgggtatagctagtcaaaaggactgatttccctctcttggataaagccttaatgatctctacaattgtcgtcgtcttgcccgttccaggcatacccaatacgagcgcgtagtctctagcggtgagaaccttggtaagagcctccgtttgatctgtgttcaagatagaaggaatttcctgtgggagaggagcctggctttgatcgaataagggtgatcggagatccacaacaagcgaccgaagttgagctggtgcatcggagtaaaatagctgagccaagttatctcgaattcgacccatccctgtagccaattcgtctttgtcaattcggaaagtcggcttggagatctcggttgtcattgaattgactgttttaacccgacgagtccgagcgagtagcacattcacgtcaagtgtatgatccaatccaactacgatcgagctagagctaagctcaagaataaatcctctcgatagggaaagaagattaggctcaatcgagactgtcaccggatcgccaacagaaagatggccagtcagaagggagctttcaggattatttgtgccgaagagactaggagtagtaggagagagatgtcggatgaaagtatagttgtgtcgatgaaccttggttcggtttgttccaatctccagggtatatgattcaatgcgcattccagcgaaacatctgaaatattggtcagagtgaatatttagagatagttgagctgtcagccaacatcaaagtgaaagagacgatgaagacgaaacgtaccttccctttttttccctctcgacagctgtcatcgtccataactctgcctggaaacgagtcacgtcctgttcctccaagctaatcaattgttcccacgtcttgaaaaactcggtatggttatctgtcaggtgggatgtcttatcaatatagatttcggctactggtgaatcaacgtcgaggacattttcgaccgcctaaatataccatgaccaagcatacagaagagaattaatataagtctgaaacggaacatcaaaggcgcgcaagaaaaaaaatatgagggacggaatactcactcgtcgatacaacatgcatgagtccacctgatagcacttcttgcaactataagagtcctcgatatgaggcggcagaaatctctctgctgcttcaaactttcccgctgcacttatgaccgccgcgtcgtgcttgttcaaatctgttccgacattctcaatctcaactttctcctcggatgccaacgaggtcaattccattggtaattttttaacgatccgagaccgttttttggagaaatatgaagcgatgatattcctcgccatgatgagagagcgaagttcaaatcgagcggcaggaaccttcatgatagtgtccgactgggtgtagtagaggagaccggcaggtatgggggttgctattccaatcaagaagaaaagatgacgaaggtattaattcaaaacggtgcgaaaaagaataggaaattaaagacatgaagaagaagatactgcacaccatatcggtcttccatcaacaacgtatacagcatagtttgcgctcgatgctccatcacgccaaccgctcttcctgtcttgatctcgaaaggcatagtccaactttgactggtcctttccttcttacctgctgagccagatcctaaccctgtatccaataaagttgcctggatggatacgtcaatcttcccctgcaacccccacataggagatctgatatcttcttctatatcatgcagtccagtcaaagccaacctttccttcgaattgtgcaaataagcttcgtcttttggttcgcaccctgcgtctattccaaccatgaatttctcagccagacgactgatactgacggccgccttctccttaacttcataccaaacttcatcccagctcaaaccagcccggtagatctctcctttcatagtttcatctgaaagggtggcttcaacagcttgacgtatattatttgggctgaaagtttcccgagtcggataaggtcttgttgagaagagagactgaaggcttgtgtgctgtatattgccgtacagaagagatttagttgtctttgaactgtgcacgaattgaagaatgagaggtcattgcgttagacgatatgcaagaaccctcaatttatatccgtagagaacatacgatgtttttgtgagtcgttgcaaaacagactttctcgaacaactcaaaccggacgatattgtggtattgggtatcagaagatccggatgatagatcaagaagttttctggaaagtcactcgcaaagatgattttcttaagctcagcagttgaaagcccaggtttgacttcaacggagtcgtcctcgacgaagtccaaagaagaagagatgacgttcacatgttcacctaggttaagacaacaaagggaaataggtcattggtggaagtatttgtcgatagaagataaggacatacgagcgcatattggtaagtctgcaaaatcctctctcagtatcaacaaaagtctttcttcagactgatgaattgaaacgtctacctcctatataccagcaaaaggcagaacaggtcaaagtccatcggaagtcattgagaatatgtcatcaagtttcgtactgactttaatcgaaaaacctctagcatctttcccttcacattttctgacttcaatcacattgcatctgacccatcttttgggtttccaatctggaggaggctctgtcggaggagggtttaaatttattaaagccggtttgtctttcgttcgtcttgtaggggaattatccggactggagctccaatcgtcacttcccaaatcaaactgaatcccatctaagagcgacgaatagtcacctcctgatgtttcaagttgagatcctatcgacggatcttctgctttcgaagaaacacgcaaacctctatgcggcggtcgaactgaagtatcagtgagcgtagaaagagtacgaggggtcgttccagggagagttcgagatactactggttttgaaagtggatggttctgcaatatattcgaggtactttgggtcggacgagtggatgccggagtgtttttgacaggagttgggacattcgatccttcagaatgagtcttccgaagtccagtcgaagccttccggatggaaggactcgattttggtacagcctgtttgacaggttgacgagtccggatagacgcatttgaaggagatgagaatgattcactgaacaaatcgtcctctgtcaaaccagagaggagggtctgcatgaattcagcttcttcctgggcagtctttggcatttggtttataaaatcttgtagaagttgatggtgatgtttgaaagggcggagtcgaacggtctcattcatcaagactaatgacgctcatttaattgcccttgacgcgacgagacgcgtcgaaacgcgtacataaataaattgcttcacgtctcatcttgcatatgatcttgaagctgatctgagccaaaaggatatgttccacgttggtcatggtaatcaaaaaaatcactatatattcactctgtttcgaactacgctcagccatgattcccatcctctttcttctaagcctagatgagtgacgaaaggtagggtgaagaatagtgaatatcaaggcatcggggtagagggatatgagtatcaaggtgcggtaggcaacatcggtcgaagccacttgtcggccgcctcaaattgatcaacgacgtgcttctgaatgtcgacattattaggagtctttcgactttggctcgccgccagcgatcggacagcagcgagaaccttaaataaccagccatgaacataacatgttagacatgtctattcatcatgacaaaagctgagcacaactgattgacagaggttaagaagtaactcacggcatcccagaacctaaatcctctctcgacctctgccctcgcattcttaatgcccacaaagttgtcctcgacaacctccaaggcctctttctttgcctccttagcctcatccgacccttcctctcccgcttgcacggcgttaccgtagattgcaattgtcgcatccaagtataccttaacgaggataccaaaaccagtgttgacatctgtctgaaacggaagagagagcgaaatatcgaggaaatcctctctgactcgtcgagcttcgttcctcagaagcatgtgcaacgacacagcttcgagtaaatgccgaagagagcgagaaagagatttgaggaaggagttgaacacaagtagttctcgggacagcgggccagaccattgttggttctgagcaggcatatagaaaagcgagggttgagtaaagtgataaagccaaatagacgaagccgagtgcaacaactcaccttgaaggtcaacggtacaatgctcaacactcgcatcactagtaacatcgacgccttctccgagtctactccattcaggtcaaccccaatcaatcagaattggcgcaaaagatgagaaatagaagcaaaagatttctagcagctagctcacctgtaccgaaactgggacctccactccacgccttgccactccaaagatctccatgaagaactcccgctcggatgagctccagtgccaagtagagcggctcttgaaatttgtcgttcacccgtgatgctttaattccagtgtgaagtgcctgggctagtgttccatgagtatggttctgattgaagaatctgcgaaacaaatcaagaagtagagtttgaggaaaacagattggcatctagcgagaagtggatgccaaagtaacataccctctgatatccaagaacctccagattacgttggtcacaatctcatcctttttctcgagaggcttgagatgcgcggatccgtctttgctctccttctcgcgatctttatcgtttgaggaaacggcggatgaaggaaccttaggtcttctagttcgagcggcgtattgttcttccgaggttgctcccaagcacaaagcaaaatcaattgtggacgactgtgacacgacgagataaaggtcaagagaggctgttaagtatcaaagtgatagctggacaacataattgaggcagacgggcaaaaaaagatgacccttacattctgtcttcttaactcttcttcgacaatcaaacaaggcacatgccatccaacacatcggtcgataagggctaatgtctgcttatcgttgtgtggcactggtcgaccgactattctagcgttgggaggagagttagaagtcggtgtgttgaaatagtaataggccagctatgaagagaaacagaatatgaggtcaaatgttttattctgatatagaggctgaatcaaatcaaacgtctatctgactcaccactggcttctttccccagaatgttggattcaatacagatgaaacaagtgccagtgccgtacatcttggactagtgtttccctcggtgatgacctcttgaatgaatcttctaaactctgtgctctctccgttatctaacggaggctgttcgacaatcatcccactcgtaagccagccgatcagctgcggcgaaacaaggccacgactgatctggaagtagatttcgtcaggcaatcgattggaaaagacctcgtgtagatcgttcgggatctcgctcgcggaaactatagactggtgtggttgatgttgtgagtgtgaatgatgctgagagtgttgctgaggaagagagagtgggagcggagtgcaccgtccttcttcagccgtgagaacaaagctgaatttgatggcgcaccgggcacggacgaataggtcgggataaccgagttctttgacggccgggtcgttcaaaaaaggagagatcgccgtcactccagatttaaatcctttgacggcatcgaataccgctctccacccaccaggcacaaatggagggaaagatggagtgagttctgaaccagagagaagtgcgatgtcgaggaattgatcttccgataggttaccaaggtctttaaggacttgggctttgttgacaaacttcagcgtcgaagcagacaggtcgagactgagaatgagccggtcgacagtagagttggtatagagaagcgcttcatgggatccatagatagaatgaatatacccgtgttggtgtttctgaaggtagacgagctgttcaagtgaagcaccataatcgacggtttatacatcggacgaaaggtacatcaagagtatcgatctagataaaattaagcggtacgtacttgggcagaggtcagataaggagcaacaatgaattcgaccgagcggtgtctgaagatccgaagcacaagcctaaatagatctctttgctccgtccagacggttccctctagtagcttgaccgtctcgtccaccttgccctcctcatagttctcccaagcttctcgcttgataccattctccctcggagtatctacgccattcttcccaggtggtcgtttggcaagcggcaaacctggacaaacaaagaccggtttgattcttaatttttcgagggatctaagatcagcttcaatgagcgaggtaatggcgagaggttgaccaccggtggtagcaacaagaggctctcgcgttgcaggggaagagaggagatggcgaagatagtgaggaagatcaattcccaaccgagtatcagccagggcggagagtggacaagtttggatgagctttcgctcagtgaggtaggctatttaaagaaacaacaaaaaatgagttagctgctgaaacaacagaagacaaggatagagagaaagatgttcaggatggacctgtcgaaagaaagagaagggacaaataagaaaacgatggatggaaaagacaagtaagaaacagcttgagaatttggacatcatgatggcacagatcaagtcatttcgtagatgataagaaggcatatcagctcaactggaacgacagacataccttcaaagttgcgtatcatcgagaaagccaaacgagggaagggaggggc

SEQ ID NO: 30 - DNA, 29012 bp, Xanthophyllomyces dendrorhous
ggtgaggggatggaaggggtgtagagaaagagaacgagagatgggttcgtgtgggtagatggcaagcaaggatgagcgtgatacaggcggtgtaaccataaagtatctgattttcaaaattatcatatacacttaatcataccgtcgcgtcgcgtcatgcgtcttcttacgcgtccggcctaatgagccaactgcaatcaattgattttccactcctttgaaacttggtcttcaccacacttctgtttcatccttcatcctcatctgatcgatcttgagtttagtacatactatgagtgatctcgagctcacagacgacaaggaagaggctcctttcaacgtagagtaagttctctttatcccgtttcgttcgatcgatcgattgaaatatataacctctgacatattatctctacatgttcatcgttaatcttcatccccccacaatcctccagagacccgatctccaccttgcccttgtccaagaaacgtaagattgaacaggatccagaggttgccgccgctccgcctgggcttgcaaaggcgagattagtcaaccgaaagattgccgctcaaacacaggagacgttcacggatgttctacaacgcttggctgatcaaggaggtggacagggagggggtcagtataatccctcgcactccctgattctgtcgtaggcatggcatcgcacaaaacacggttatctaagctggcataccttatcatcatgtttctcgttgttgtacaggtcctgtcgaaacatctcagtcctgggcccgtccacctgtaccgcctgtagatcctcgcggaaactcaataagtcagctttttcgttcctgttcttcagagcactcgaaacatgttgttgatttcattggtcttcattcatgtcctccttcttcctttctgaccaaaaagtttttcagcagattgatattgaggagcacaacgagcctaatgtgggacccagtctacgaatctttggagtcaacgaggtaagacaattgctttcttgagctttgctgactaaagttggagactgagcgtaaaatattttgtttcatctcgcaactactctagaatggaaactccattctcctccatgtcaaagaatttttgccttatctctatattgctgctcctcgaggatttgagaactcagattgtgcagcattcaccaatgcgatcaacgtcagtccgccttatattgcagctagtctattggcccactgactatcatgactttgttttacgtcgattagaacgtcttgagcggtggatcaggtcaggtagctctgtcgacgaaagtggagatgaaaaagtccctctggggttacaaaggagacgatcgatcaccatttttgaaaatcaccttgagcgatcccaaatttgtctccagacttcgtggtatctttgaaagaggagagtttgcttttcgagaacttctggatggacctttgacatcgtatgagagcaatatttcgtacgaacttcgatttatgattgacaccaaggtaagctagatcatcaatcgtatcggggttcacgagtgtttgctaagatatctggcgctgtttgtcaatggctccttgggaaatagatcacaggaatgaactggttagagattccagcaggcaagtacatcatccgaccagcaggcaggaaagtttcgaaatgtcagattgagatggactgcaagttagtgattcctctgtgtttcgaagcgataccatttttctttctcatctaattctactcttcccttgctacaatcaagatccgatgatctaatctctcatgcgccagagaatgattggtccaaggttgcgcccctccgaattctcagttttgatatcgagtgtgctggtcggaaaggaattttccctgaggccaacattgatcctgttattcaaattgcgaatatggttactcgtcatggtaggtctgatttctgtattttcttcgttcttttatcaatgtttgtttgctttgtactgattgacttatgttcctgttttaccgcatacaggtgaatccaagccttttatacgtaacgtattcacgctgaacacatgcgcccatatcgtcggctctcaggttttagagtttcagaaagaagaagccctccttcaggcctggtcggatttcgttcaggaagtcgacccagatatgattattggatataacacgacgaacttcgattttccgtatctgttggaccgagccaaggcgctcaaagtcggaaaattccctttcctaggaagactgctcagtacgtagtgttcattcttctagataaataagaaataggaaataatagtccaatgcttatatgatcttcgatggctttatgcaacactgatagatatccagacggaagccaaagacacccattttagttccaaagcatacggctcccgagattccaaaatgatcaacttagacggtcgactgcagctcgatttgctggttgtcatgcagcgagactacaaactgaggtcttatacactcaatgcggtctgcgcgcaatttttgggagagcaaaaagaggaagttcattactcaattattactgagttgcagaatgggacagccgaatcgagaagacgtttggcagtttattgtttgaaggttcgtctgagaagattgtctttttttctcctgagtgcgatcacgtttagactctagtacatgcggttgagagttttcgtgcttttcataatatcacatccacaggacgcttatcttcctcagcggctcatggacaagctcatgtgtttcatcaactacactgagatggctcgagtgacaggagtacccttcaactacctcctcgccagaggtcaacaaatcaaagttgtttcgcagctcttcagaaaagcaaacgaagatggatacttggttcctgcgatggccagtcaaggttagtgaatcatcctggcgttatgtctctactccaactgttctatcagcacgttgactaactgagactatcctttctcaaattcgcaggcacggacgagcaatacgaaggtgcgacagtcatcgagcctgaaagaggttattatggtgtcccaatcgcgacgctcgatttcgcttcgctgtatccatcaatcatgatggctcataatctgtgttataccacgcttgtcgatcgaggcacggtagagagactcaaactagtcaaagatgaagactatatcttgacaccgaacaaaggtctgtacgataatcaaggttaggcggcatgcgaagggatctcatcatgacaatgttgacctatttgctcttcatgatctgttcttgtagatctgtttgtgacaacaaagagaagaaagggactcttggcaattgttttggaggatctcctttcagctcgaaagaaggccaaggcggaactgaaggtagagacagatcctttcaaaagagccgtgttggatggtcggcagctagctttgaaggtatgtatcttttcttgtattttttatcttctctgtaagctttcatgttaatgattggatgggtcttcgcatcaactgttgaatttaccaatggctcaatagatcagtgccaattcggtgtatggtttcacgggagcgactgttgggaaattgccatgtttggctatatcatccagtgtgacggcttatggtcgtgacatgattgaaactactaaacaggtgagtcttcactccaactcttgtggttatcacctcacatgttctctcaggtcgggcacggaactgaattgtgtcttacatatgatgactacgtaggttgtcgagcaagagtatagtatggcaaatggacacgaacacgacgcgaaagtgatctatggagatactgattctgtcatggtcaagtttggatgttctgatttggtaactgccatggctttaggtatggctcccttgtttatctcgacatctgccttgtatgaatactgatcaagctgataattcttggcttggaatcgaacaggtgccgaagctgcagaccttgtatctgcaagatttgtcaaaccaatcaagctcgagttcgaaaaagtctactttccgtacttgctcatcaacaaaaagcgatacgcagggctttactggaccaggccagacaagtacgataagatggataccaagggaattgaggtacgcctgcatttctgatcctgcttccaatgataccgccctatactgatgatggtgtcggttcgatctatcttctctctgttcaaacagactgtcagacgagacaattgtcgactggtacaaacagtgatagagacgtgtttgcacaaacttctaatcgaccgggacgtcaaaggtgctgaagagtaagagatctgtcttttgtaaattaacagaagaaagaagcactttctaagtatatgcttgattttcgatacagatacacgaaacaggtcatctcggatttactacaaaacaaggtcgatatgtcgcagctggtgatcactaaagcattggctaaagcaggtatgtctctgtgtcatcttatcagtttgaatatgaagcaagcttatcttttgatgtctgtttcgaccatgatagactacgctgctaaacaagcccacgtcgagcttgccaatagaatgagagctcgagatgctggttcggctccctccttaggagaccgagtagcctatgttatcattaagggtgtcaaaggtgtgtctatatttttctacaaagatccttattttcttccttttgctttttctttctttgattattgatatgtatctctgatgtcctttgttcaaacaacttcatacgggtaggcgcggccgcttatgaaaagtctgaggatccaatatatgttctggaaaacaacatcccgatcgataccaaatattaccttgataaccagctttccaaacctttgatgagaattttcgaacctattctgggcgccaaatccaacactctatgtaagacttcttctcatctttttattctcttcccttttgaccttcagagctgactagaatcgacgattcatggtgaacaataaatttatctttagtggttggagaacataccagaaccatcagtattacgaccccaacaattggaggtttgatgaaatttgcagttcgaacggtaacttgtttaggatgtaaaacacctttgaaaacatcaaataaaggtacagtcattatctctttctctttctcttcatcttccgtttgtatttttttcctctttttttcccctatgaatttgggtcttaactctctggtttacttgaccttgtctctgggtcatttgtagatggagccgtttgcaacaattgccggccgaggattggagaactgtatcaaaaacaagtatgttgatagcgcctctgcttcaatcacatgaattagagaactcttgctaacgacaattcaaacttcctgctgttctccaattgacaatagcttgtgctcacatcggctcaccaagtaaacttcgcgagactctggactcaatgccaacgatgtcaaggttcgctccaccaagacgtcctttgttcgagcaaagattgtccgattttctacatgagaaagaaggcgcagaaggacgtaagtgatgcgatgaatgtgatggataggttcgataaagagacagtttggtagagtgtggcaatgttctggtttcttgattcatagtttgttttttctttacattttgtgtttttccttgtttctctcgtggttattgtttcatatcgtgatatcttctcttgacaattgttgtatcaatacgaccatatccatcgtctgaatctttgcttcttatttcctcgtaatcatgcgccctctaatctctttttcattcactttcaaagaagtcatgttgatatatttccgatctttcaccacttagtgactgtcaaagttcctgttttgaactcggacaaaagcttatcgagcaggagacatatataaacgatttcgcaatttactgagaaaccctatcaatgaagagacaagcaaagaacacagcgatggagaatgaaggaggcaagagagtttcaagagagggactagagaggcaggtcgtacgacaggagatagaatgatcgagggttttatctggagcgcgcccccacctggttcgagctcgatacgaccaaaagacacacgagaagacaagaagcacaattaattcatactaaggatttctccatgttcgttatgatcggcttaacccttgagtttaccccaaacaacgatgatgatcaggaagacttttgaaaggaaggaaacaagggtcagccttcgaatgattggatagatagttgacctcagaacgcggagaaaaggtagagtaaagataacgtaccgaggatagcgatgatgccgtatgttaaaaaatgttgttgatacatcctatcgtagtgtttaacaggagtcgttattaacgtcattgtggccaggaagtatcatgtcggatggtatatgtgtatagacagataacgttggatcgaagcagaaagaggacgagagaaaaggatagtaaaattcaagagaagggaagccattttcgtcttaaaacagttcagtttagagtccaaagatcagattatatggagaaaaatgaatgcgaagaaaaagagctgacctgaagatcattttcttcaacgtgccactcgctcgatcgattgatgtatctgcgctggccaactatgggacccatcacctgtgtcaaacaagagatctcgcgtagaagattcagaaacaaatgaagttgatcactcaccacatccctggaatgttcaatctgctccctctgacctctcaagttcctcaagatatccgctccaacgctctccgtctccaaagccagtcgatgagattcttctaatcgtcttgaacctgcaatacatcccaaattgacccaatccaatggttcctgttagggtaatgatacccaggcacatacagaaagatgagaaagacaaaccgtcagccaatctttcggttccttgtaacaatcgcgtccgctgtgagtagtctgtcggtgaatcggaatacggatcatctcgtaacgaagcatcggtgttgcccagcaggtcggatctgagaacagcctgtttcgcgtctctctagacccatccatagccgatgttgaaatgaaacttagagaggtaagaaatcaagagtaagaaaggtaagacggatgtgagcgagatgacgaacgaattgttttctgagcttctctagctgcgctttgtaggacttgaaattgagagtgtatttagaccggatggattgaggaatagatggcagctcgacttccatttgagatatctatcaatatagaaggccacgaaagcgttagccagccagaaagatacattctggatcttcgatataagtttccattcgacgcgtttctctctcctacttggtcttgtaaagaaaacgatggtctgggaagagtcgacaaagtgaacgaacaatttcttctccttcttctaactcggcctcagaccttctgattaaagctttcaaaggttcgcctgtcaatcctttcgactccgtctcgagctggaaggtcagcttgttgacgagttgttgaaaatcgtgcgagtaggactcgaagagggacgctggtgattggctatgtgtaatccatagaggtttataatcactctggtaagttagatagtcatactcaatgcagagatcgaattttggaagtaacagactgactccatagtatgagcagacaccggtaaaggttggtggttagagaatgtcctcatcaggataccagcgagatgggagacgaacggatggctgtccaggacgtacagtcgagtggcaactttcaatcacgtgactatactgtctggaacttgccgttttgtctgccgtacccatgaatgttgtctacttgtatcagcgtatcatcagaataaggtaagaaaagagacattgtcttttggtagatcacgagatagaggaagaactcctcctcccttcctttttgcgttcaagaacgaagaaataaagtaggaaaaaaaggatgccgatgaagaaagcaagaagaagaaaccaaatcaaaagaaggaaggacaagatgtgcagtggggaagaacggattgaatggaatcgatgggagaatggagaatggaaggctgaaagacgaaagtagaagagaagaaggggaacagaattttcgtttagtaaccacctcggctggagaatccaccccttccaccgctgccacctcgagaagagaatccgcctcgacctccccggtcgcctccaccaaatcctccacgaccccttggtgctcctccgcctcgagatgagaatcctcctcgggcgcctcctcgaggcgctccgaagcctcctcggccaccagctcctcctcgaccaccaggggctcctcgacctcctcgagctcctcctcggcctcctctcttctcaactgtggttcattgagatcaaattgccaaaagcgagcagaaatgcaagcatatcagacatatgtactatcaacaaaagcggctctaccatccatgtttccaaacactaacctttaccgccagcagccttgggttttggcaagaatctttcgataggcaacagcttatctccaccgatgtaaaccttgtcatccttcttgaaactcgaagcaaccataccctcgttcatcttgatcgtgaagaagatctcgttgatcggtccgagaatctcgtcgaccttaccaatctgagtcttgttctcgaggtagataggggcgttgaagtacgggactttggtgggcaagaggtttgagcaaagcatctcagactcgacagagtgcatgaaaagtccaacctctgtatcgtgaacaaagtaaacaattggatgtagcagttgggtagacagtaggcgatgaagagattatgcaaaaacaaattcgggcaatcaagagacacagttcagtaaagctcatttctgaaacagaatcgaggaaacataccctggacgacatcaggagggccgtaggactgctggaaaccacctcgtcctccacctcgacctgtgaattttggcagatacaaattgggacagaatacatggaaaaaatcgcgtcatcagtttaaaggtcctagcagccgatgcaactatctattgcacatatgagagcgactcgataggcaagaagggaatatcctcggaagccaagtgagagcctgaaggctgagaagaagaacaagcctacttaccacctcgtcccccaaacccaccacctcgtcctccgcgatctcctccacctcgtcctccaaatccgccgcgtccgctcattttattttggggtttgtagaaaggaaaggggagtagaacaggccaattttcggagctagtttttgaagaaggggtcgctaataaaaggaaaagggtatagaaatccgaagcaaggaatgattagaaggcggtaaaagcgacaaaagaaggtaaattgagcagcaatttcagttaaatcggaccctaagaagagataacacagtcaagaaaatctcgtcttacgtttgaaagggtgaagaccgacgaccaagagtgatggatgaagagggaagaggaagagaaagaataaactgtgagaaagaggcgaaaggagaaaacgactgaaagaatttttgggcgactgcgcgaaatttccgcttttttctttcctgcctggcttggtcgactctttgcactcacaccttctcttgaaatccatcggccatcactacaatacatacactggccagcatcatagtcttacaggcacaccatgctctctcttctctcttctctcagatctctctcgctccgaggttcaccttccagcctttctgtcgccgctccagcaccaataggtccttccatccgatcggtctcggttggatcgttaaagccttctcgaggatctcgcaagagggtacgtgtcttgtcattatgctttttctcgttctgtaagctatgtgtttcaaatacatataacctccattctgtttatgtttatttcgcacttagaaaatccgatacggacgaggagaaggtcaagggacaggagaaggaaaaggacgaggtaacaacggtacaggtgcccgagttggaaagaagtattcaaggggcttcgagggtggacagacacctttgacaaaattatacccgaaatggggtttcttcaacgtgttcgtgatactgtctctgttttttgcatatcctgtttttcgtgaatctcttttcttgtatcattgttactcacatagacttgcacaccttatatcggatcgacgtcttttcattcttttgtcaacagtggccgaaagttctaccagcccgtctcgctaggaacacttcaggagtacattgaccttcgaagattagatccgacagagacaattacggttgagcatatctacaagagcaacctctgtcacgggttcaagcaggccaacggtttcaagcttttggcatcaggggtttgtaccttctctctttcgcctgtgtttctcgtgcggttacttgagccactaaactttctcgctccttctctcacctcgcatctcttctactgatccgcctaagtttgaacaactcaagcaacctatccacatcagacctcatcgagcttctatcgctgctatcaaagcaatcgaagccaccggtggatctgtcaccaccgtctaccacaaccgactttccttcaggcaggccatccaccctgaaaagttcagaggccacagaaggattcaagaggctttaccgatgaagaagcgagatatcttgtactacacgaactggttcgtcttttgatcgttttgaaccgcctctttgtcaaattcgcgccgaaaggctaatctatcttatcatcaaatcatgaaacccatattttaaaaacagggagaagcgaggttacctcgcaaagaaaccggaagaagcggaaaaagagtcggacgcacccaaggagtttgtctcacctgctcctaagcagtattaaggttagagagcaggagggactttctccttgcaaaatacatgatatatttttaagcaacggctgggagtaaaacgtattcgaggcgtcgaagcgcgaaacaataagagcccatctcaagacgagaaacacctagtttggctgtccattaggtcgaacaaaatctatcatatgaggagagaaacagaagctgaaatgaaatagatgatgaatgatgaagagtcatgagccacgtgatgtatgacacagctttctcttgagattttctaaagtccatccctcaaacaccatccttcgcatccttccggccagccatccaaccatcccgaccgcctcaaacgcttcaaccaacaagtgcttttctcactctttaatatagattgcgcaagctagaatggcacgaacaaaaactcagaaaagagcagacgcccgaccggcagctgccacaacaactatcccctcaacttccaccgctgccgttccgataccggttgctggacagcagctcgatcagaacgttgattcgttactccgtttgtccttcaatagcagtctctgagtgaccatccaaatttcactaaatcccaaacaatatctcttcttcactgaacttagttaaatcacacacattactcgctcagcaaaactatgaactcgctcagcgattcttgacccgattgctcgcgttggagccttcaaacgcagaggctagagagttaataggtgtatgtgagcttgaactaggaaatgcggaagcagctcgagatgttagttctcttttccttctgtttcgttaccttgacaagtcccccggtgttaggagaaaatgttgaaacaatattcatttcttctgctgaatttcgacgctgtagcactttctcgtatcacttcaagcacctcttcaaacttcatctgcgccatatttatacctcgctcagctagcttcctctcctcaggaagcactcaatcactatgaagctgcggtcaagattctagatcaacagcttaccgagctcgttcagtcgaaacagactggagtggaggacacgaaagagttagaggtagctgaaggaacgatgaggaagcagatcagtacggccttagttggaatgaccgagatttaccttacagatctttggtgaggtcctacttatcatcatcctcatctttataaccaacaagtgaagagtgctgaacctcgtcacgttatacttcaaagctttgagcctctggcagaggagaaatgtaacttgctcctgcagaaggcgctctctgttctcccaacggatcccgaagcatggatttgcttggcaagtgtgcgcacgtctcaacaacgacctgaggaggccattgaatgtattgagaagggctgggcggaatggagagatcgagaactaggttcgtcaggctttcctcgctcgatctctcacctctctacagttctacgtatctaaacttgattttgcttcaggtgaccctctcataccttctattcagacccgactttctcttgctcggttgttgctagaatatcatcgattcagtgaagcaactactctacttcgaggggttctagacgaagatgatgaggatgttgaagcggcttaccttgaaggttgggcctggttcttaaggggagaacagatcgaagatacagaagaggaggtcgtaggaaaaggtaaaggaaaggaggttggtagtgaaggggacgaggacgagttaagtaaggtcgactgttgggaggaggctagggagatcttgagcgtttgccaagttgtttgtgtcatccttctcttcttggacttttgcttcgtccttcttgtggcatgaaggattacacgctgataccttcggtcttttcttaccctctctcccgtcatacgaaaaacagcttcatcaatcccaaaattatcctcagattgaaattcttgcgcacgtgaatgaaatgctcgctgcccttgacaaggcaggtattcgacccgcccaaggcgttgtcgatgaaggagacatggaagccatcgatggagagggtcaagattgggaggatgatgacgatgacgaggatgaggatatggcatgaatcgttgctttccttgtttccttgtgtcatttctagttcacgttcgaagaatagataagcagaatgatatacagttgaaacggcggaacagcggagtgaaagggtgggacatgagattgcctaagaacctcaagagagcgataggttcaaagcaagtcggaagtgtacaagtaagtgcagtcagatgttggtccaatatagaggatgtctttttcatgatgagcctaacaatcttcgatgcatagattgagatgcaatcgagttcaacaggaacgcttgactgccaaaacgtaatagccaggtcgagacggactaacctgtacatccttaagacttcctcttcatatccatttgatttgtcactcaattcttcagcctcgcttagggcgctagttcaagattgagaagatgacttgcaagtttttacactcatatcttctatgaagctctgcttcacttaatcaggagcgttttttctgactttaaaccccaagataggaacggaaccaaaggtctcccgaatatggacctcagttgtggtatacaagggttgggcttcgataaatcagatcaaatctgccagtgaccaaagaccaaatgataaccagacttttcatatgcagcaagcctcaactgagcgaatatccgactctctctacacctagctgagcttgcttacttccatcgagcgtccaacctaagggacctaaatcgcagtcggcacagatcaaatatttgagcttctttgcccctgagccaagagccttttgaacggcttctgaacgagcaatcgaatcaggaatattccttgagaacccggcgttctcgaatccgaaaggagagttatcgatctcccaatatgctgtctgagaggtatgggacgatgaggaaagaagcggaggcggtaagaacggtccagactcatcgtactaagagcgattgagtatatggcacccgaaagatcaagattcagcgtagtcacacatagtccgaaacatgacaatggacgttgttgatgacttaccagaccagcctgtccaatcacccacttcgcgtccccttttcttaataacatacacccacaaccatctctcggacagtagatggcgaatagattggtcctggtcgaggggtcaactagactctcttctgaagaaccagcctgattgaatgaacggacacccggacgagcttttgaagaagatgcggcaagaagagcagaaatagcttccggagggatagaatcggtcattctagctgatgtacagctgggtcctgctaatcctgatatctgcgttgatggtacacttctctatatccttaagcagctgtctagggttcgagcttcaaggaaacatgaatttcaagggtttcaaaaaatgacatgattacgtcatatcatcattcacgtgaaacttacgtaatcatcttcaagccatcatctcgatacgcccgtccatcacattcatccactttgttgatgctctctcttttatagctatccagacatctcagaataaaaacatattttcgacaagaagatgggagttttcactcatctctttgcctttattctcggtggattgacgttgatcccattgctcatttgtacgctttaacttctctttctggtgccagttgttgtcagttggctgaaataaacctgtccctcttggtcttaaagtcgggatattcgtatggacctcagttcccgtcggagatcctcatccttccaaaatcataaagaacgctattgagaaagaagccttgttatctggtcataccaccaaaccaggagcgatatcaacatccaaggacattcctgcctctggggtattcgtcaaatcatcctctcggctctcaaactggctgactgtccgaagatctttctctccctatccctctggcgcttcagagaaccccaaaccggcgaaagaaacgtcgtcggacaactcatactccgctctccttctcagaactgtaaggtctagcgcatctcaggcttcaaatacagcgcccgtaacgggctcgacatcatcgacaccctccaattcctcatccacaggtggctctacctctgccagtgtctcgcaatacaagcctccttccgactttaaattctgctgtctgaaaggcactacgctttttctttacgaggaccaagatcaaagcgagtgctatgctgttttaaatctccagcacctcaaggtgacgatatttcctgatgatctgaaggacgcagagatgtttgcaaaacggaattgtatcaagctatcatcattaaatgaggaggagaaattggacagagcaggagcgggcgagaagaagggtagcagctccagtctgccatatatatctccttggtacatatttgtcaaagaaagcagtctgatggaagagtaggtacctcttatgttgactttacaacagtgctgcgagagataatcaaactaaacagaaatggtcttgtatctctgcagttggtatctagccttgaaacacgcgtcatcaagaaatcctcaggtatcggtactcgaccaattatcaccggtattctctcaaaaggtatccctataaattccttcggatacgccttgcgctcgactcgaggttgacctttttccttgcacttgtggtggatgatgccttatcaggatatggcttatttgatcgaaaaacttgacacagatccggatcctatccctatgcgttggctaaacggaatgtttggacggttcttcctgggcattcatagaactgctctcttagaggatgtaaggttttctgattaggccttcgaccatgggatccattctcacgaactctttctattctgctatgcttggttctatcgaggacgcataggtaataatatctaaaatacataagaagttgggtagacttcaattaccctcatttttgtctccactcaaggtcagctccgtcgaaatcaagtcaccgcctccgacgttctcaaagccaatgctgcgagacctcaccaaagagggagaagctagtatggaagtagccgtgtgttggatgggagaggtcagaatcaaggttggtacagaggtcagcctgacattggtcggcagggtacttcgagtgagcgtcgttttagacctcgtgatcaaggagatagtaagcactattcatgcttgtggtttagttttgagttcaagttatgtgagaaggctgtattgagcatctgaaacctccgcggaatgccttcaaaattaccaggagggaaacctgttacttatgattaaaagtccacccagttcaagagtttggtatgggtttaccaaagaaccaaagatggttatcgtatgtattcatcactattgaatctatctcttgagtttgctgtgtctgattatccttctgctttctctcctctggatgatgtctaaccagaatgttgagccggttgttagctcgactcatgtatgtcctcggatccaaatacaacttcatgctagtcatcctcggaaatagatgatcaaacactgacgagattgttaatgataacccgctggtgatcatagatcaaatggagcatgattctcaaacctatcgagaagcagatccgggaaggtgtaagcgagcgcctaaacgtgcacaggtcgtaacgtatgaaactacgactgaccgggccgtcttctttgctctgttctggaacggtctacagattattgagtctgtcgtattgcccaacatgtgagtttgttaaaaagttacatattttcatgtatatcaggtgctgactatgtttatctttgaaaacagggacgatatcaactggttggttccacttctaacgcccgtgtgttcaatacatatgcttactaaatggacatcactgttctattcaggtttgactcgtccgcataccccaacaaccgaggagctgtatttgctgaagccgctcgcaatgttgaagatccggctctgccagcccctagccctatcgagaccactactgatgaagctaccctgatcgacaccaagaacactgatgcaatgcctggagggcttagaaaacgacctgcatctgtgatttccggagaattccccgttgaggaggaagctgacagtggaggctcaacacctgtcaccccctccgatggaagcttgcacagaagtgcgtcaacttctatcaaacggaattggtttggaaacaagacgaacggatctggagattcgaataaaaagccagtggctgttctagatgaaggtactgtaaaagctgttccgatatcttcgtcgtctagtatcatcttggatgagttctaccaaccttcctccgagacttcaacgatccctctcaaagctagctctgcttcaacagggagactgagcaccgagtccttacccgctcaggtaggttccactcgggctcccatcttcaatcctgctttacctcaatctgaacctgtaagaccaaggacagcgaccctacccatggaagatcgaacgctaaagcaaccacatgccagtaaaccagttaccgtgccagaatcaaccagtccggctcgctcaaccacctccttggtctcgaactggaaagcccgagccaacaatgtcgacaagcaggcgatttcaacatcattgaatcaagcaaaggacgtagccaagagatggggcgctaattgggcggccaaacggaaggtggttgcttcgactgggtcaaatgaagcggagggattgagaggggctcaaccggtagcgggaagaggccatcagtcatccctttcgttaggacaaatgcctacggatttgttcaataggttttcaagtagtaaagaggataagttggagagcgcgagtagtagccggacggatctatcccgaagttatcctcctataaatccggctcctagaaatttcgatgaagattcagacaaatcagttcctcccacggccagacatgttgcaccttcctcggcggatagtatcgtgtccaacagcctgcctgtcccaccccaactaccgaaacgagatcgatcaccttctttgagatcaaaacccacctctccacacgctcaggacccgaagaagaaaagtttgatggcccttccgagcggcgctcaggctaccgtcaagcttcaaactgattctgctcctgctggggcccacacgactgtttacgaggagggagttaatcgacgagctgctcccgttcgaacacagatgtcggctagcccgatgatgaccattccgaggatcccgctcagtcgaaaagcagatgtcatggcattcggatcgacagatgaaaataaagaaccgattggccagaaggataagctcagttcgatttacaagctctttcctaacgggaacgttgggtcaggagtatcccctctatcgactgacgaaaccgcggatcgatcctcgatagaggaatcgtcgaatatcctaacggatgcttctgcccaagcaatgacagatgatagacctcctttggtcgcatctgaagttgaatccacgaattctgcgattctcgccagtctcgaagcttcacctcttgcagcaaacactgtgatatcccctgcggttcaattacctatcccaactcgttctcgcacattctcatccgattcaattacatcttcactttccagtagcctgaaagcatcactaccaccttcagcaggtcctgtcgcttctgctggtcgaagaagagcgccttccgtgtctagcatcagtagttctacgccttcctctcctattgctctctctggaacaccgtccttctcattttcaacaaggacggcggcgacaataacagatgatctccagacgagagcacaatccgtttcgtcgggctctagtctggaatctggatctcagctcagtggatcgttgtcgaaagcagaagagacattatgggggatagctagacgagatcgagaaagaggcgttgctcaagtgatggaccccatcagtaatgaaacgacatctggtaaagtaatctacagcagaagcaccagtattcttgcagagatatcggatgattcaacacatacatccactcgtatctcagccgcttctgcttcacctagtcaattggatcgatctcttcttcctctgcgtgatcagagtgatcgaatgcctactccagatctatcatcacgacaacaatcgcagttttctaccgtttcatctactatgccttcagaccagctgtcgattgtgcaggatggggagagggaatctctcgaactgcgaccaggtttaggaaccagatctagatcagtctcggagacaaatagtcttggtgggatgtttaggtttgacgagcactgagagattggatacaatgtgtgagggagagaaagaaggccggacctttatctgaatcatgggatctcttctcttttctctatataactaaacttcatcgatatacaccatgattctgatccctttttccttttcttttgtcggttgaagtttttgtttgtttatttaatattgggcttgagtccttcgcgtcaaaggaggccattctgaaaccatcttcctagcttataaaacacgttgtattgtagcttgctttctctcctggtacagacatttggtcgcatcatcaactgcatgcatgactgatgcgccgtactcacttaagaaaaaaaaaacatagaatttgcgtattgaatacagtagaggtaaaatttcgactctcgctcaaacatcatcagtgatggtaaggaggagcctcgggtttgacaatctcccatgctttgtcgactctgtatgtgtaatgagatgggggacgtttccaaccagtccagagagttctctatcagaactaaattcgaaaaaggagaaagatgcgaaggaaaaataagagaagaggatacgaacgcatcaacgacatcctgaggtaaaggtcctttctcaaagtccttcaagttctggtctatatgtctggtcgagctagcgccaatgatgatagcatcttgatacttcggatcgagcgccgaatgatggttactccatctgatagcgatttctgctgtcgttaaattattcttctttgcggtctatcatgtagatttgttccaaggtatgagagtgaatgtgcaatatcagcgagaggaaacgtcaaacatgatcaaagataagtttattgaaacaattcgtacggagttgatcacgtccatggcctggaagtaaacgtccttccagtacctagctcgatacattgatccttgtctgtgaaaaattcaaacaaaagattataggggcgcagattgaataaattggatgaccttgggtggaaacaacgcagagaaggcaaccgtggacatacgatcggttaggatcgaaccgggatccttcctcgactttagattctttgttgaacccaccggcaaagaaccctcctccgaggctgagaaaaatcaaggaagagtgacggatcgttaagttttcgacggtcaagcaaaaagaacgatggacaagacatagtgacgaacgggttgtaggcctagagaaagatccagagcccacggagaagaccatcgtttgagtaagagaagataagtctagtgtctagttggataagctagatcgacaaatttatatgtaatccacttacatagaaggagataccgttctctcgaagcacagggaaaaggtctttttcggcggatcgtgtgatagcattgaagattccttggtacacagtaggctgaacatagttgttctttttacagatttcaacgatctgcttgacctcatcggctgtaaaattgctctgtattgatggagagatatgttcacttcatctcagcgaacaaagtctttgtgcaggtcttgtcgagaaagctgataaatgcagacgaaacaagacgtacaaggccaaaccgggcaaacttgccagctttgtactcttcatcaattcctgccagagtcttcaagcccaaacaaacgcgtcaagatatggttgcgtatactcccaaatcgactggctaacgtacattctcaaagggggtctcccgatcaggcgcatggaggtaatagatgtctactttggaggtctccaaagactctagagaatcatttagtgctcgatggctgataccacgtattcatcaagctgattatcagtctctttcatgctaacatgatagatatcgattaaatgaatggacgaacatgtcagcagctgaatgagtatattgaccttggctcaaaaacccttttcctcgcgcggaagggtaaactttggtcgagataacgaagccctgactactcgaagttagttgttgagatgagccgatattacgtctgattagccttctgcaagacttactcctctgccttcatctgcgcaagcttcttttcagatcctccaaatccgtacactattcatatacatcaaccgaggccggtttgaatctggtggtcagttagatcttgaaaagatgactgtctggatgcgcatctccataggcgactcactcctagcggtgtcaagctcgacatgtccgtatgacttgaagatatctagaatctcttgagccccttctttagtaaatacacgagcttgctccgcgccttcttctccgaaggtcatgcactatggaaatatgcatgttgagccggtcaataacagtgttggaagggtaaggaggaaggacgcagtactcacgccgaatacgactttgacgttagatttggacatgataatatctccagaatagatatgtaatgtgtttgaaggtaaagaggaacagagacacttgaattggcaccaaaagtcatcggcatatatatagtgatgaagctaaggtggaggtcgacgtcgatgtggaatgtgatgacataaaatggagggaaattgtggaggcttactctcctggatccattgtacccgttctatgtctacagttgaaccagccggttaatttgtaagacttgcgagatcatacataccggtagatcatatacagaagaacgctctaaggggctgctacattcaatggttgttcttgaagatacatgtcgtgatccgattatttaggttcttctacagagtgaaggattaaagactattctacagatgaaacgtatctataccaccatcttcttgcttttctcaatcggtcttctatactctttctatatactatctctccctcagactatcaccatgtctcctttgacgttccaaaccctggctcctaccgctaaacatacagcgaccataatcttttctcatggactaggtgatcaaggagcgtcctggttacctatggctcggatgctcgccccggcgttaccgtacgtcaaatgggtctttcccaacgctccagagattccgatcactttgaataatggacaccgaatgccaggctggtttgacctttcctctttggagaaactgggtgacccgagggaggaggacgagaaaggcttggtagatagtgcggatgcgattcaggcgatcatcagtagagaaggattagccgttggagataacaggatcgttgtcggtgggttcagtcagggatgcgttgtcagtatcctcgctggtctgacaaagggtactcaaggaaaggaaaaggaggtccagagagctctcgctggtgtcgtaggtaggtcttttgtaccatgtttctctccttcctcaagggaatgaaactgatcaaagtatcggtcggatcttctggcttttcttcaatcaaggactctctggatggttgccactcagggatacactgaaagaaagattccatgctgaagcaaagaacctcccaatcttttggggacatggaacggctgaccaagttgtcggctacaaatgtaagatccaagatctcttttctgaacgctttgccagccatctaatgtacacttgaacgaaaccctaccgaaacgaaacgtggtcaatatagacggtcagcaatccgtggaaattctcatctcacagtacggcctcgagaaatcctcaggccaagctggaaaaggtattcagttcgagagttacccaggattaggacacggaagttctcctcaggagcttaaagacctttcggcttggtgagtactatcccctttccactacgtgagatttcttttctttcctctcatttcctgatgcctctcctctctgtttcgcacataggctccagagagtgatccctacgatttagacaggccattagacatcacacaatatatacattattctaccggtccttcttgtgtattctctatgaagacaacaagaatgatgacgatagatatttcgagccaaagaaatcatggatgaaagcccctagtcttgatcgctatgaaaaggatatcgagacatagcaagtagacctgagagtatatcaaccttctggttcgacacctcatcccatcaatctctagtctggagagtttgagcgcccatctttcgagataattgatcgacctcttcaacagcagatatatttggcttggtagagtcgaggttccactcttttcgaagttgggaattgcgtaaattcaacagttcgtctaattccgtctgttcgtgagacaccgaaggtcgaaaagaaataacaagggagggcgccttaagtttgtttctttgcctttatagccaagagcagagaaggaggggaaggaaaggttccgagagagagaaaatgagaacgaacctcccatccgagttctttagccaatgatctacaacccgaatcacaatctcctttaaccaaaacgtccctccctcctttttctacaggccttttaaatccaaacccttcgtctcctgggaatcgagcttggcatacgatctcattgttgatgagcattcggggtgttgtcggatgaactctgtcgacaagtgaggcaaatggctgaagttcgtgtacgtgcgtgtgtgtatataaaaaaggtagaaatgatacgtcagttattgttcctttctagatgaggaggaaaggagagtcaaacgaacgtgtactttgagagaagttcccatgacgatcaatagatcacattcagacatatcctgcttacgaaccaaacccaacaaatttcagatgttcagaaagatcacatttagtcgatcaacatagaaaacacgatagatgaatacatactctgatgcagtcaaagaaccgatcgggtaaactctatactcgagaaaaatgagtaaagatgagaagatcagcacagtccgtcgttcatggttaaacatcagattgaaactcaatgttagaagagacactcctgaaaacaagacgaacttctccgtagaatgtgatgtccggtttgataaggccgccgcatgatttacagtatggtattcgactggaccgaacgtgttgctcgatcgtcatgctatctactggtttatgacaactgagatcatcaaagagcgtgtatgagatttttaatgagtcggctcgtccgaaaggtcgattaaacctgaagaataaaaggcagggcaatctaggaaagaaagaggctcactcaatacaacttgaagtggcaaacgatccatgagcttcgacaatgaatgaagaatctatcccactaattctttcgagcgtgtcgatattctgtgtaaacactcgacggaggtgaccatgctaaatgatacccgaacgaacaggagagagaaaagaatacatagacggtcaaatcagaagcgctttctctctacataattcgaaagggatggtcacagaccttttgaaggagtcgtatgaaaaagtgcgtcaacgtaggtaggaattttcctgttaactcaagcccgcagcccattcaagaaattagaagaatcagatcccaagagtcgtattcgatagaaatttgcgcgcaaagaggtcttacctgggtagagttctttggccagttcgtagaatggagccggattggatctaaagaactatttcacagaaaaatacaaagcgatcccaaaaaggccagtgatttcatcaatatgccgaaagatactagcccaaaaaaccgagttgaggatgaagaacaagagtgaagataggctcacattgagttcgaatattgactccggttcaggtagtttatacttttcaaggttatgaaagagcccggtatcgggcgatctgaagtcaggtatcccagcgttcgtcgagcatccagctcctgtcatgaccaccacgttttttgctgttgatggatagaacaagaaccaagataaagatcaatgcttgaatgggagaacagaatcataggaaataaaacaaaactaacctttggcgatgagtcgagcaaaccctttcaacgaccgttgatcatctgaaagaaatacgacaggcgaccgctcttcgagctaggtttgaaaatcgagaggtagagagacaggagggatgcgttcttgatcaaatctgatgtatcgggcaaggatgattttcgtggtcttctttctcgtgactagaagtccgggtgggaggcgagaaaggaaggaaagaagaaaactcttacctcggaaagacagccattcgtctcattaatttctctgtcaccattatcatcttcttcgtcgtcgtcgtcgtcgtcgtcttcttcatcgcttctatctttacctacttcctcgcaactctcactggccttatccttctctttgatccgctcctcctttatggtcgcaatctgatcggccgcggtcgtatgatatgtatccgggacagacggacttgtcgaatctatccggttaacatcatttcgaattcatagaaagcagaagagaaaatggagaactaggatcaacatttggcccgcaagaaagtttcgtcttggagcaaagaaagagatagcaaaagaaaatttggccgaccaaaaaaccccgtaggctcatccttattcaaagaaggcgaaggggcaggactgataaatgctcctaactgctgattcaagaagctttcgatccggtcgacatatgtcgccggtagttcgtgttgcttgacaaaccgagaagctgccattcgtgcaggctctaaatgtcagaggaacaggacagaggagaagtgtgctgaattagctcggttcttgagttgaaccggatgatcaaaagagataagaattgaaaagaccgaccactgggtgtgaactcaagttccaagtttggttgatcatcagccacatcgaccttcaagctgaattttgtagctaatctccaagcgaaatcgagcggcccccaaacggtcaaaatcaatcagtctagattcttgaaatatctcaccgccgggtagatgattcttatttctttggttggcacagaagaagagaaaatgaaccccacgatttagtttcgaactagtctctctcatgggactcttcacggcatctatcacggcctcctcatacgcctatcacaagaaagttgcaaacacccggtgacacatcgtcaatccactatcacttgatttacgtacattccacgcgaaaatgagacgtatacttcactcacagctaagagttcaggatcggcttgtctggctggatctctagaaaaaatccgagcggcataatctgacgcgccggtgaggatgtctccattaggtagactggcgacggaccaaacggagatggccgggtgcaggatggtttgaattggttttccttctgttgaagaaaaagggtaggatggggatgttaaaacagaagagtcagataggctgagtgagactcgtttcaaagacatagtcaaccgggaaggaaatacagaggaaactccaggaacgaacctctccaaatccggacacagtgatcttctccgcttgaggcaagatctccgttagggagcaagcagaccgagtagacaaacgagatatgacctgtgaggatggctactagttcaccggagaacgcccagatgtggatatttccatcgttactgcagctcgcaaactcgttatcaggaaggattgttaaacctcgcacgcaatcggtgctgccttagacatggagaggaaaaagaagaaaagaacatcagaatcacgcttcctcattcagaacattgagtgcgcacaggtcacctttaaaagttcgaatgggccggcccgatgagtcccaatggatgattagcttgtctgctccagcagttaggaaggatctctcgttttcttttctcccacaatgtttcccttctacgactagacctgcccagacggcctccttgtgtccctcgagacagaggatctctttccaggttgatgtactccagacccgggctgtgcaatcccaactggtcgagatcaacagttgatcttcttccggaacctggccggttgtgcagttcaaccctcgttcctggtctgtttgctcttcgtatgatgacggtgatggtttggtcaaatctccaggtccgcgcgttttgtcatcctgaccgggtcggtaattccacaaagggaagccactaagcgtcgatttggaagaagatttctctgagatgagctctttggaggttgggcgggaacgattaggagaagaggtagtggctgtggtagaattcggcgccttagatctttcgattggatcacatgccaccgacacggctgtctttgcccacgatggagccgaaattgacagactgcatacattatgggaatggcctaaaggagaacaaacgcaagcgagtaggaaaagagagaggagagcgggaaagacagataaaggcagtgtagtggtttgcgagttagcggcagatgcatgcccaaattagcaaagactttgaacctgggctcaccgacaagtgtgtgaagaggttgttcgcttggtctaatggcatctcttcctggggtgaaaccctcttcgccgtcgacgctagatgcccaacttcctttggtcggtgcctcatgaatcaagattagcgatgagagcgatccggaagcgaccaggccttgagtgtattacaagccaaatgaagcacgatcatgggatgagcaagcgcggatatcaacaggaagagtatgagagtgtgaggacggaacgacctaccgttaggatgatttgatgtgggatgtatatatgcgaccgaattcacgtaagacccgtgaccgagtccaactccactgagtttatactagagatggccagagagggtcgatgccgacgacaacggcgttcagtgaacaaggcttagctaaaagactgcttgaccaagagactaacctccctatctgtagctgaagatttaccccagaagcagacggcttcgtctctacttgctgtaaggagaagatcatctctaggcgctgctactgctttgacatcgctctcgtgagcctgattcgttgtgaaatttcattcaaaggcgatgaagacttgagtatgatcaatcgtgactgccaccatccgagcgaggagatcttgggagatggacctacctcgagcgtggtagaaaacttgaaggatgcagtcactgaagaaactaaattcacttgcgggctcatcaggatgagtgtgagtatacgtaggggtagaagtggaaaagaaagtgagagttaaaatcaagatattggaccaaacgtaaggccaagtgtaggtaaacgcgatagatatttttgggtgatagaacacgcatcatttccggctcaaccaccggcgtttcccttctctagtcagggttacaatggttagggttaatataaaacataaactaaatatgtgacattgctggttacaatatatgccacgttgtcaggcaaaaaacaaggctctagttacactctcgcttacgtcaatcggctgtcgatcgaaaggctgactaacgatcggagggatcagtagaaggcccatcgatagaccaggcctctggaggtaaaagaccgatggtaggccgatcgagaggttccatggaaatgagattcgcgtgtatacggaaccagagcatacatgttctcttaatcatctttgtcagttaagagtgtgtgtgtgtgtgtgtgtgtgtgtgtgt

SEQ ID NO: 31 - DNA, 3396 bp, Xanthophyllomyces dendrorhous
gtgtgtgtgtgtgtgtgtgtgtgttctatctcatcaagtggataccctatgaaggtctctttgttggactgtatggacaagttgtcatcgtcccaaggcagagattgaacagagacaacagaggatcgaagagggttatcgatgaggcttcggatacacgcagacgcggacacacacagccgcacatgcttctctatctatccaataccatactccatcattcaagccacacatgctatcacacacactttagacacgcgatgcaaaaccatcgagagagggagattgaacctcagggtaatcagggacaagcatattgatagaaatacgactctgtttacgtcggcacagaatagggcgttgtggttacattcatcgcgttacacttccaccgaggaagcgaacagccgtgtgtgcgtgtttgcgtccgtacgtgtgaaacctctcagctttctttctcttcgttctcttcgacctctttctatcctctctcacctcatactctcttcctttcgttcatccttgttcattcgttggagagcatcctttctgtctcccttagtctttcctctcttgtagccatcaccgaagttcaggccttccgttctttcacacactcacacccacatatactctggctctcggaaggttttctctttgaacgagatccatattcagacccaacgcactaccccacccccgtttttgtcagtcaacctttttcattcatcactcattcgccccagagggttatccataactgaacatctaaaatcaacaatgaacctttcctctctctttgttccctccacagatcaagcttttatcagatgtccgctcagtttgtcaagctgtccatctttggaaccgtgcgtcttgcttctttctccacctttctgttactacgaaaacactcagtcgtcccgccttcaagctttctctctttgagcctgtcgatctctcaacaatatggcttgctgaccgggttttatcgtccattctcctttctattcttcttatcgtccattctcctttctattcttcttatcgtccatgctctttctctcgccatctcatcgtgttttcggccttatcaattctgaatctctcaacgttgatcaacccatcctcatcttacgcctctttctatcaaactcttttttccatctacaaaaaatcgcaaaacatgccaatgctttaatcgccattcctcctctatgccactcaccgattcatcgtatttttcccttcatctttactcactcgtcatatgttccaccggttctatcggacggatactctccacccacatctcaggttttcgaggtcacttcgagatatgttgacctgtatgtgcccaacggctgtcccccattcatctcgtagatcgtactgaacgtcccgggtgttctttatgtgttctcttccttatcctctgttttcctcgactcacagtaatcccgttggtcagtcatggtcttcttctactccgcaccgctcagtcctatgctcattctcttttcatatacctacaggtatgggagctttcggtcttgtctggtaagcttatccttcgccatcccaagcatcggcctgctttttcttcttttcacttacgttctctttttcacttccttttctctcccagttccgccaaggatcagctcaccaacacctcggtggctataaagaaaattatgaagcccttttcaacgcctgtcctcagcaaaaggacgtaccgagagctcaagcttctcaaacacattcgtcacgagaacgtcggtccctctctcctcttgatgacccattccctatagactgatcgtttgctcgttcctggtgactatttctccttctagatcatctctctcagcgatatcttcatctctcctctagaggatatgtaagtttttatgtttcccttaatcatcgcgattgagccaagaaggaaaacagtttgtgctgcctggggactagaagatcgattctctatgcctcgctatctgatttttatcctataaaggggaaactcctatttatataattgcttatcttgcaactttccttttcttctacgcaaaccagttactttgtgaccgagctcttaggaaccgatctccaccggctcctcacatcccgacctctagacgatcagttcatacaatacttcctctaccaaatgcttgtcagtctttccttcacagctgtctgttgtgatcacttaaactaaacaagctttcgctactcgaaatcaacagcgagggttgaaatacgttcactccgccggagttatccaccgagacttgaagccttcgaatgtgttggttaacgagaattgtgacttgaaggtgtgtctctgctctatcaactctcacagaacttggtccgagtagttttactcacctacttctgcttccgtctcacttcagatttgtgatttcggactggcgcgaattcaagatgcccagatgactggttacgtctcgacccgatactaccgagcaccagagatcatgttgacctggcagcagtacgatcacgctgtggatatctggtcggtcggttgcattctggctgagatgttgctcggaaagccgatcttccccggaaaggaccacgtcaaccagttctcgatcatcaccgagctcatcggtactccgcccgacgaggttatcaagacgatctgcagtgagaacacgctccggttcgttcagtccttaccgaagcgtgaacgaattccgctctccaaaaagttccccaaagcttctccgcttgccgtcgatcttttggagaagatgctcgtgtttgatccccgtacgagaatcaacgccacggaggctctctcacacggcttcctcgagccctaccacgacccgaccgacgaaccagaggcttctgagcctttcgactggagtttcaacgatgctgatcttcccgtggatacttggaaggttatgatgtacaggtcagtactgggcctattttgcattatagtgaaaggtgaagactgacaaacgcgtttacttgttgttttcgtagtgaaatcttggattttcacaagctgtgagttatttggcttttgtttccgattgtctgtttacgagcgcgctccgatgttgattggcttcatcttctttcatttcatttctttcagtggagacgaaacctctggagagggtctggaagagcttagccaacacactgacgggcagggcgcatgaaaagatccattttatcaatttagcatcccagattactgtatctctcttgtttcccctatctgtgtgtgttgtgtgtacgtgagagattcattggctatattatctgttctacctacttctcacccttccccacgtccctcggtttcattccgttctatctcatttggatttggat

SEQ ID NO: 32 - DNA, 5602 bp, Xanthophyllomyces dendrorhous
tttactttatattctctccctatttttattccaattctattcccttgtcttgtgtctgtctgtctgcctggttatggctctcgatccggtcgacttttttttttctttcttttttctttcctctgctcaatcatcttctctgccctcttcactattcttatcgacaatcgataagaggaggagagctcgacaggacagatcttttcctttcttcccctttcttggatcatcctcatgcttatcttctttgtgagagagatcttccaggaagaagggaagaaggcagtactccagaacgtgggatagagacttggccagtgatgaatagacgatagataaatcatcttgagccgagaaccaagaatacacacacacacacacacacacatatatatatatacacagaggggccagagaaaataaggaagaggagaacgaaggaggcaacgttcgtactgtgcctgatgtttgacccaggatcctggatctccttcccggcgccgcggggaagggaggaaactgatgctcgggagggttttagactgtcataatctcgagcggacagctaggggacagttcggtctgtatcttttcactatctgtgcgcaagcctgttgtttcgtcgatgatgatgacgatgatgtcaaatctaaagataagaataagaatccccttcttctttatcggtcggccgtttgttacggacatcatcactttacacatctgggtatacatctcatcgtacattacaatacatactatctgactcccgtccgacctgatccggcctggtctaggcagagaatttttttagtcttttaaaaataattattattgaaaaaaactactttaccgcagctacctctctttctaggggagcgcgaaagagggtgcccaccaaggtagggcttcatagttggtctctgtacatatccgcaaacctgttcgtcgggaacgtcgtgtcaatcgacggggtggcaaagtcaacggcaagggaaggaaaaagaaaacaaaagaaaggaacaaactgttggctcgacgtagcgttctctatggttttgtcctctctgatcttgataaatctgttttgtgtgtgtatgagcgagcgcgcgcgagagagaaagagaaggagaaagagggaacgatacattcagcgtgtgaattacgaaagacagaaaaaccgcatgcccgatttaaagttgtcatcgttagtcccgccgaccgaccaagagaaggaaaggaaaggaaaggaaagagaagacgaaccgaggaaaccggatggaaagaccccgttcacccccgagaaatgtctgagcggccgggtaattcggagagagcgttatactgtttcagaatgtcccatcgagtgaaaaagaaaacgaacacaggccgtgtgtatcaggcgtttcgttcgtttttgatatacagtttagaagagacgaggaaaaggacgagaaaaggaagaaaggaagaaaaaaaaaatagaaagaagaacggactctgcgcctttgatctcccaaaccctgatcgttcgataagttccgggtgaaagcagaaggtagagtcaactggtgtctctttcggaacacaggtacatcgtccagagtttcttcgaaccgagaaagactgatggatcgatcagacagacaggaggaacttactctttgggcgcgaaccaataatccggtatcaaacctggtttaccccgaaagagccatcgaagagggaatcaacatctacaatcacatccggaacacaaaggaaaagggcaaaggacgcgagagagcacaaagaggctcaccgttcgtgtcgacgttcccggggacgtctcttcctgatttatcagctttccaacaatcggccgaaccttcctccggatacctggctttcatagctttatagaatgtatcggaaaatccgctgatgacgatgtcgttcgttcggattcccaaacaggttgattcaagggatatcagagagagcgcgcgtgcgaaattgaggctcatacgagttgagagagagaaaacacacacctcatacatttacaaacggcctctaacattcctgagtctgggttatactaagacatccaatgacgggtgaccaaatttgtgacggagagaaaagacaagggaaggcacaacctcgagaacagataagattgacggatcgagccgagaaggagaagaaaagaaacatatgcatagagagagagagaaaggtgaaagacgaacacatgccaagaggactggactccaccactttactttcctaccgatcccatgccaagcgcctataggtactaggtctagtgagtcaccgattccaccgtctatgtagtctttctttactttcaaccagcccagcgatctgacgtctggctccacgatcctcacatatcaagtgtgtgtagagggggggggaagaaaggaggaaagttcagtcatggaggagcttatcggagaacgagtagggaggaaactgacctggctgataagtcgctgggaggtctttcttctttccacctttcttgacgatcgccaacaagctaggaacgacttcctgtgattccgccttttcgacttcctttttgagttcttcttcctgctcctgctcctgctcctcttcttcagattccacgtcttcctcctcttgttccggctcgacatcgcccctggcggctttgcccgccgacctggggtcctcttcgtcgaacccgtcgtcgccctgtacgcccacgccatccaacaacttgatcatgatgccctccgcctttttcgcgacggcctcggcgaagaacgcctggatgtcggccgggtctgtcgagtcgatggattcgacatggccgaacgaggccgtcaacgtcgatgacgacagggagggggtgtatgtggggagaagcgttcgaaggaggtgtcgtcttattcgaagcggttggttcagtaggatctgtatgtgtgtgagagaaagagatagagagagaaagagattatacgaaacgcgcgacagaacagatcagatcaagtagggaaagagaaagagaaagagagaaagaagcacaactacaacgcacttctttgttgagatacatcagatcgaaagcaaacacaccgacgaggactttgatgtccttcatcttgacgtccttttttggtctgtttgtcagttcttggaacgtcctgaacgcgccttttgttggtgtgacggaaaaattggtgtttcgttggatgatcaacttgtgttctgacttgggtataaaccacagaaagaaactgcgacggaaagagcagcaggaagaagaaggggcttaagaagaaaacgtgggacaaaccggtctctttatcgacagcaacgatctctgcatccaacacgatcgaccttacgctctccggatagaagctctcttgatcgattctgtctgactgttgttgacctggaggttcgggtaattccgatcgaggtccgaccggtctggtgagaaggatctggacgagggtgatgatatctgggtatttctctgtcatgtcttccagatgtctggagaacagtctgacgaacagcctgtcgggtgtgtgaaggtggggatggggatggcggtgtgtttgaggaggagaggtctgatcgtcgggaggttgtaggtcgccccaccagccgcctgggccgacctcggctctgaccgcggtctgttcgtccggcctacagaccctggcgtggatctgtactctctggccgtcgagttttgcctcgctagtgaaatctagaccggtgagcctggtacaagcctcgcctagggatctcgtgatggaacccagcatgggcgagagcgggatgcctactgtgagcggaaccgaggtcgatagattctcgagtccggtaggggatgataagagggagggaatgatgtgtgagtagttgggatgtcggacgtatactctgcggacgagtctgagtgagtgagtgtgtgtgtgtgtgtgaaggagagggcgcaagaaaaggctatgagaaagaagagcagagcgcagaagaagaaaaaggaaaaaaaaaagaaaaaaaaagaaaagacgagtgaaagagcaaagagaccaaatacatacctttctgcctgctcgcatttctttctccaaacttctctgacggtctctccatcagagggaatcgatgatggcagctgctctgtttcgttcaaccgggcccgttttcttgaacctcctttcgatttgctcgcggcggccgagggaacgggtgcgaggttcaacagtcgatggggaggaaggaagtagtctgtctcttcaaggtctttccagtcgagatcggggaaagaaggtctggtgagggtgaatgctctcgctagggatgtcgtcagtgtcaccctgactgctccgatctgggagggaagaggggaggagaggagaggagtagtaaggaaagaagacttggtgagaatgcaggaaggagagaccagggaaggcgagaaaaaagaatgaatgaaagaaggaccgactgactctgaggttctgaacaagcgttctgacgagaaacctggcttcctctcccttggcggctacgagtaatctctggacgatctgtatggaagatgatgatggatgagagaaagagatcccggatcaaaggtcagttgtgagaacgagttacatacgatatacgataaggaatgtgaatgtgtgtgtgtgtgtgtgtgtgtgagagagagagagagagaaagcgcgcgcgcgcgcgcgagagggagagaacgctcgacggacaacgaaggaaatcacttacgtccgcctttgttttgacgacaccggtgcctttgagggaggaaagggtgaggatatcggcgtataccttgtgtacgacgagcggctttggctcgaccaacgtgcggacgttgacttttgcttcgaacgcgacgtcacctgcgtcaccgagcttgtcgctcatccttctcaacgtgggctggctcaggccggtggctgatttgagagcggcggtgaggatctgggtgccgatgcctagctcgtttggctcgtaggacggtccgatgtggttcgacatgaggtacaccgtgtggaggagtgagcgggggtcatggagtgtgatcacccggagcaggtttgtcaacatccggacgatcgccagtcgtttggtggtggaagcgatgggaacaaaggcggtctggacgatgaaacagtaggtgagccttccgtccggccaggatgatgtgtcgaccgctgtggctgggtcgaagaggagtggatcgacgtcaaggtccgggtatgcgtttgagcccgggatggtcttgatgggggaggaggttgggccgggggaggtaggttcatcgagctttcgttttgacgggaggcttgaagtgagagggtgagccttgttgtctttgtcgttctcttcatcggaagagacgaggtcgatgacggacggaacggactgggtagggttggagggttgaccgaagaacgaagcgacggtaggttgattgcttggtttctttgccttttgtttcggcatggtgttaggtgtgtgtttgggtgagccagggttagtgggatggtgtgtgtgtgtgtatgtgtgtgtgtgtgtgtgt

SEQ ID NO: 33 - DNA, 695 bp, Xanthophyllomyces dendrorhous
gtgtgtgtgtgtgtgagagacggatggacggatggacggatggatggatgaaatgaatgaacgaaatgaatgaacgacgagtgacgtcatcgcgcgtcgatctgacacggttggttcggatgcgtgtcccagagccacgtggagtcagagagagagagagagagagggaagagcatgcactggagtgggtgagcgcgtgtgcatgtatgtgagtgtgtacacgtgagtgtgcaagtggttagaatgagtgagagatgcatgtatacacagagcagcaggcgttgtatacagggatggacatacatgagagggagtgagagagtgtgtgtatagagagtgtatagagagagtgtatagagagagtgtatagagagagccaacacacacacatatatatatacacacactcacacacacatatacactcactcactcacgacgagcgagagatccgtttgggcgaggtgtgttctagcggggtgtccgttggccagtgcttggggtgtctgtagtcttttttgtagtcttctttgtagtgcccgtggtgtgtgtagtgtggtcgcttctctctctgcgctctctctgcgctctctctgctcgctggtgtgatctgtattctgtcctagtgtgctgtctagtgtcttgtctagtgtcttgtctagtgtcttgcctagtgtcttcttcagtgccccctc

SEQ ID NO: 34 - DNA, 2202 bp, Xanthophyllomyces dendrorhous
ttcttttctttgcccatctctttcaccgctctctcctccccgctctccgccctcgactcccggtctcttttcgaaatcatcaccatcatcctcacccgctctgctctgcccaaccccacttttgtctgactctttcccccgcccgccagccagccatgggccaaccgtccctccttggttcgcctctcgagttggccgctccgaaatcggtgtcgtcctcgttattgtccccgtcgccatcaccatcatcattatccccatcagtatacccgtcgtcgttgatcccatcaaccacctctccctcctcgctctctcctatcccccgatcgacatcctccacagggtcttccccctcgagctcacacaccgtcatgccctccgcccgttctccagacgggctcgccgcttcctcagtcccctcccccacagactccgcccagcctacagcagcctcagccctggcttccgcctccgccccagctccaggcgtcccccctgggaggttcccgtcgttcaccgtcagccgacatagccgtaactcgctctccgtatcctcaatggcatacccgttcccacagacatcgtccaacccgtcctcctcccgatcgagtccggtctcttcaccgtgtcaaaccccagacgtatccgcaccatcctcctcgtcctcttcccccttgcctcgatcaccgccggcgaccttcaaccatcactctcaaccccaccttcagcttcacccccagcctttgcctctcctcagtccacactccccatcgacctctccccctcgaccgagcagaccgaaactggccatagcaaccagcaccagcagcagcctcaccatcacaacaacaacaacaacaacaacaacaatagcagcacgctcctcctcttcagatccccctccgaacattcgttcgttcgccgtcgccaagccaccgagctccccatcgggtgatccttctttttcttcgtctggttcatccaccagtcgggaccccctccgctcacccagcccatcgaccgattcgacagagtcatctcccaaagcaccttccctcattctcggatcccaggtggtaggtctcaagctggccgtccatccttcccacgccctcccctccatccgacacgccccgtccgatcggaccagattcctaccctccaccgcccacaaaagagatcactccgctggccaggcatccctcctctcctccacctcgtcctcgtcctcctcgtactttgaatcaatcagtccgactaccagccaaccagaccaccaccacgccatcatcggttagcgcccgtttctcttgttccttctctttccttctcaaccgtgttctgatctgtccttgttttgttttgttttattttattctattttattttattttattttatttcatttcgttgaactttctatcttttctcttcaattcttctctcaaatcaatcttttctctccccgccctctagatactccgaccgacgactcgagtccagtctccctccgatctcccacccaacaacaccgtcggacgtcgtcccttcccctccatcccgatcaaaaccgatcaccagacgacctttccatgggttccgctcggccagatgatctccccgtcgaccggaaccgaccgacacagaccctcggaacggagcccagatctttgaccgatcctgcctctgcctctgcctccgcctttgcatctgcctcctcctcatcctgttcgtccagctcgacacatacctcccagacagacgacaccaatagcacaaccctgtccagcgtacacgaatcctccccagcctggaccccagagatcggatcccagtcgaccaaagaaccatcatcatcgtcgacgaccaccatctcccccacttcttccaccggcaggcataccatcaaaacaggcaaccaactaaccgaacaggccgacgaacaacccgaccagacccacaaccccaccaactctctcaacgttgatcttggaaagaatccggaccaaaccgaccgtccggcaaaggccgcggaggaggaggaggagagcgaagaagaccgaaagaagagagaggcgagtgtggcagaagaaaagaggagaaagtcgttgctcgttcataaactatgggacctcgtagagggcgaggtcagctatactgaggacctcatcacactcgttcatgtcagtccgagtttccttc

SEQ ID NO: 35 - DNA, 29598 bp, Xanthophyllomyces dendrorhous
cgtggtcaaccttctgttctctgaaaagttgatactccacaatcgtacaaataatgcccttccgatctactctcggccacccatccgttattttctcctctgctgagccttctcggccattcagcgggtcttcttcagatcccttggcaatacttcgacccaaatcaagctccttgtttgagcgggtatcacaaaaaccaaagcagttgacccatcgacgatcggtcattggcaatttcttctcagctctgacacctcaaaacgaattgaccaagatgatttcaatgtcttccatggccgaggtgagaggtggccaggaagtcaaattaagggatcgaaaacgtcgaaactcttcagccgatttttcttcttccaatccaactaaaacctcctctgtcttctctggcagccgacatttatcattcaacaaaggcccaaggaacaaattgaccgttaattctgcttctgcttctgcctccctattttttggttcatcggatgaggaggaggatgagaggtcttcgtctatgcctagagttagatttgccgacatctctgttacgacgatggcgacgacgacaatcaagcttcctttggataatttagactttacgcaggcaatcagatcttcgttagagaggatcgttgggaagaaccaaagggagcgcgagtctagagagcagcaagctagacttgtgtcgaccggtgagtgtccattcattcgtagttcttatcatcttgcgaaaccgcgtcccttcttcttcttcatgtcgaaagctgtgcctgaatgcttacaagaataccattgttgttcatttctgaatctttgataggtccatacttgcgatccgcgcatgtcctaacccagagctcaagtccattgaccttcgatcgaaccttctcgtcaccgaatccgtcgacttcgtctcctccacaagttgttaaatcccatcgaggatcatattatgatcaagaactggccgctctgtgcgccacatgggatcagtcataccgtttctttgaagaatctcaaacagtggatgatgttatctatcaaccgctccgaagctcgatcgatgtcacaaatttgaagcaaggccatgaatcatttactgccttgaggggtcaagcacctggcgcatccagtataaacacagagatatgcgacgaagatgaacccctctcgaaaggagattctgcccgatcatcggtcgaactcggtgagtcacattttgatgataaactgttaaaactacctcaatctgatgtatgcttttgattatatctataggcgagcccttcgtcgaaaatcataaatcatcgtcatcgtcatgttcttctctagacatcagcaatatcatcatgccagtttcctgcgagcccgctcctggtatctcaaccacatccctctccggaccaataactccactgttttcagacgaaccgccaactccagcgctatcaacaggttgttcatctgttcaatcgaacgatcatatccgctctccgaactctgtgttcgaataccctttcctttctgccgaacccaagctttcatctcagtcaccacctcggcctcccagatctcaagccacgatcaataagaaggcgcctcccatgacgagcactcctgctagacttctcttggatacttttgaagaacaagaaaacgttcagcatgtagctcatccaacttctcaaccctggatagataccgatcgttctcttccactgatttccatggtcggcaaagattccaatctagactattatccctgtcagaatggaccagtagacgttcacagaaagattcgagcgagtgctccctcgccctcgcctggtcgagcagcagccggcgtagctttagcattcttgacagttgatgagcctctttcagagggtccgataaggtctcgccgatcagaggggaagcttagggcgagctacttgagaatcaagggcggaaaagagaaggagacggtcgaccacaaagagacgagaaagaggaaaggacccaggcgggatgtcgcttggggcgctcgcgccatggaataagtcttcgatgagggtgtctttgttcttttccatgttgaatctgtctatattttgttttattaaaacttggtttgacagtccagtttctatcatcttggtacgctttcggctcgttgtagttcgtgatacctgtgttatctatttcttatctcttgtttcgatacagtgaaacctttctctctgcatactctattctttatgtgttgatctttgcgaagcggtagatatctgtgttcataccacgtagtggagttttgagtggaacaggtgaacttaagagtttccaaaccttgtcaggcgcgtaatgtttcgctgttgtctataaagtcctctttacagtcctctacacgtctttggatcatatctttttccatacgtgttgttctcttctctgacgagtactatcactgtatccaattagaaatctttcaaaaccactaacagcagaacagccccgataaccaacttgtgatgaaagacagaatgcagctgattgaccgccggctttttattgcacacatagagaacgcactagataggacttattaggaggaatgcttctcattaagacaacgtagtgatgcacatgcatgacttcaggaagaggagctatagatcgatcagggctttctttgtttgttcttcgaataataaatcagcgtagacggttcagaatgcgcacgcgaatatcaaaatgtacatgtaaagaggttgtctatcgtgaaagtcgtgatgcttagataaaattcttcagattgaggcgatatgggctgacagctgactgatcagctgtttttaaatgttcatatgcctcttcagtcatggtgatggtcattaagaggggatacagtatgcaacaaacaggaatctgattgaaggagactgtgtttcactacaaacgtattggaatgaattgtgcgtctgggtatgtcacattatgctgctagcgtcagccaaaaaccagccgaatattcaactggcatcccgtgcagtgccagtagtgctcagacgtttgatgttcaaaatgttggactgacgagaacgaaagacctccaggcttagtattaaatatgaggggaagaatacgtagcgcgctctttctagctgtatatgacaagatagcttccaacatagtcttcctgatcgctgatgacagtgacattcgaacgtaactatctctgagccaaagattccgatgttgtaaccaggcagctatcatctacagtgcacattgactgggtggttacatgtttcgtcctttcttagacccggctttcgtccaccgacaccaacccaccctttcttcctccgctccatcctatcgacctgaacctgcttttcattcaaagccttttctcttttttatcatggctcaaaggaagctacagtgtatgtgcctcatctcttgtattttcaatccaaattcaaggtcgatcactagagatcaaagaccatttgagctatctgtctgggtggatttttctgaaaccttacctgtttgggtgtccttctttctttctcctcttcttctggcgaatgacattggttgtctcttatttcagccgagatcgaccggacactcaaaaaagtgaccgagggcgttgagctctttgagtccatatttgaaaagatgaacgcctcgacaaacgcgactcagaaggagaagtgtgagaccgatctcaaaactcagatcaagaaacttcagcgactacgagaccagatcaagacgtggatctcgagttcggagatcaaggacaagaattcattaacagaaacgagaaagctcatagaaacggttagtctcaagtggttaacttcttcctctattcgcatctcttgagtaggtcagagagccttctgggatataaatgctctacggatgagacaaagccggaagatggtgaaacaacagggttgaaaactaccatcagaatctctgttgttaccctctcttgatcatttcttcaataaaattccatgactcactctctacccaaactgtgctgaccctctaccttgttctctcgtaccattgccattgaattccaattagcaaatggaacgcttcaaagcgcttgagaaggagatgaaaacgaaagcgttttctaaagagggtctcatccaagcagccaagcttgacccggctgagaaggccaagatggacactatcaactggctttcgtccatgattgacgagttagccaggcaaattgagcagtctgaagcagaaattgagattcttgctgcctctcagggccgaaaaaagaaaggttcgggtggtgagcgagtgggtgaacttgaacatctcaacgagcgaagaaagtggcatgtaggccgaatggaactagttcagaggatgttggacaatgggggaattaccgtcgacaaggtggatgctactcaggaggacatcaagtatttcgtagaatctaatcaggtaagttctcgtattcttcctgagtgcatatgtttggatgagctcggtagacttacccgcgtacttttcacaggaagaggactttgaagaggacgagggcatctacgatgagcttgaacttacggaagacgatgatatgtatggagctggggacgacttggtttcttcgcatgagtcggagccgatagaaggtttgtctcagtcttggcttcaatgttgtttgtgagttttcctcgtctttcctcacacataacaaattgcatctcttcttcttgtcataatatccatcagagccggtacgaagttcgaagcccaaaccgcatcaccaggacgacgattcaagtatgtcgagtggagtgacgaaagataggaagcattctcaagatgagcatacgataccaacaccaaagaaaacaccttcaaaaagtgagtgccgtaaatatcttacaagatggcatatctggatctgtcttgttctaattttctacatgtctgctaacatttgattttgcttttccaatcgcttatcagaaccaacactagattcgaagcccgccgagcgtaagagatactctgatagatgaaaaataaataacacccgccaactgtacgcttacgagtgacttttgctcttatcctacagccgtacctccgataccttcgccgaatttcgccaaacagcccatgtcctccgctctcaagacaggtctaccagtgacaccttcgccgcctacgtcatcaactcaaccaacctctaccaccgctgcgccttctttcactggtcctcgaccggctacgaatgctgttcctcttcctgcgatccgatatgcggcagctgctgcagctgctgtcgcctctccatcatcagttgaatctcctacagtgacaaaatcagttccggccaatgcaacgttgccaagtccggtgttaacctctgctacgcctgctcatcctcctacgaccaattcttctacttttgcgccgactgctgctccgtccgtatccacgccgacaaatgcatccgcacccgctgctgctgtcacaccctctgcttcaattcaagcgcaatcatccgcaccaacttcggcgcctgcatcatcagtgtcagctcctagcccctccctgggtatgtcaacagttttgagcccacagagtatcaaccaatctacaatagagtggtcaggagaagaaaagtcaggaggtggagatcagtccgccagacaggctcagacggttggcacctcagatactgctgctagtgtgcgttttttgttgagccttcttctctctcttttggagagttgtactcatccgtgtcacttgtggcttgtgttcttctcttcctgaaacaaactagtatccttcaagttcccaaactcccgctcaagcctcttcgacacttcaaccgccttcagcgtaccctaccgaccaatctgcgccgaattcaagcggtcaggttcacacatctcccttatcaggtctaacgtcgcctcagatggggtcgccactgaatatccaggctcaagtacaaagaggatctggagccgggccagtaggaccgcctccgatgttggggcagcagcagcctggtcaaacacagccacttgctcagcagccggtgggatctggaagcagaggggagaacagattacccaacgcgttggctgatcttgtgagtagtttcgagactgcaaagcagagatctgcctcgagaaacggaaatatcgatcagatgcactctgctcttgaggctggcttgcatgctttgcctcatccacaggacgccgagaagtgagtgctctttccttggcttcagtctttgtacatatgacgatgttgacctctttacttcatattcgtgcgaaaaaggcctcgatactatgttcccaagaatccttatcagaccccgttgtactatccccaggagccattcgtcgggttccaggataagacgatatattccaagatggacctcgataccctgttctacatcttttactaccacgcgaacacgtatgaacagtggttggcagcacaagaactgaagagacagtcctggaggttccataagcagtacttgacttggttccagaggttaagtcaaccccaggcgatcactgaagattacgagcagggcatgtaagttgaatacctttcgtttcttccttctcagtcaccgatgtggcagaaagcaatgacacgaccgatggctgacgggagctgagtcgtcctcatgaacaataggtacatctactttgattgggaatcatcatgggtgcaacgaaagaaggccgatttcagattcgagtaccgatggcttgaagagtattgattcatcttctatctgtctgtctctgctgtctttcgtatcccttccttttttctctttgtttttggtcacctgaggttttcaggtctttttttttgctcctttacccttacattctacctctttcgacctttcacttttatctgatcttctgggaaacagcaacttttctcttacaactttttctcctgcgcgtgcttccttccctgtatctctctagtacaaatctcaaattatttcaatctctttttaggtcccaaaaattacagtctacacacgaattgcccagattgaaatcaagaggaatgggatgaagagaagttttgtctgaccgaccaactggatgaacaaatgaacttgtaaaaactgctggacccaccaactctcagcgtcggttgttcatctgcatcctctccaacttttccatctttttagctttctttgcctgggtttttgtcaactcttcctgcttctgtccatttggcccagcgccatctccgccagctctggcttgagtgacagttggagaagaaccagatctgccgaacagaaggggagaggcaaatgtgtagactttgtagagcgcaaagacaggaacctatttatgtgagggcggggaaagcttcatcaggcggaggaagggattgatttccgaagaaaagacaaggaaaggaatgagatgaaaaagagagcggggcgtacaacgaggatgaggtagtagaatttgtaaccgaacaaaggtgtcaatgcttgaagtccacaagcaaagtagaagctgtagccgaacaatttgaatggatgtacgaaacagtcaaaaagtcatgatattgcttaagatgaagtgagaagaaagagacaagcagaagaagtgaaggacaaacaaatccaagacccattcaaccacgcctccctcattcccctcgagctccacacttcctctgagaacaccgtttcggtccctctttggttttccgacagttcggagaaacgagtaggcgaaaccggtcgcgaggaagagtagggtaagtaggtatgatggaccggagaagaatgggcgaggtcgaaggagaaaacggaggattagatgagcagcctgacgtcggattaaggtatcaaggcgagtatgagtacataaacaataaatcagacaagaaagagatcaagcgaggtaggtattaagaaggagaaagaacggcttaaacgaacatgtgtgagaccgaaagtatatgtgagcctctttagggctgcctgattggaggacgtgatgcgtttgctggacgcgttagcctgaagaataagaacagaccaacatataagtatccgctggtctgcatcatatcggtagtcagaagagtagcaagatgaagatctcagactcaccatatcttcctttcttgattgtatgtgtgagtgtgtatgctctttcgtttgtttcagatggccaagcgattgagaatcgggctgggcaagtggcgccactaaaccggtgtagatcacgtgtttatgtacagccatccgttagctaagcatgtggcgaatcggtcgcgtgtcagatgcacaaccgcgcgtctactttaaggacgcactggagagagcaccatcaaggttaaggtgatgatgagatggataatgtgaatgaatcattcagatcaagttcaaggtcaaggtcactcaaacaagtgtgagtatcgaatagcaatgagcaaggctaggctaggttagggtgaagtaggagctaggctgagtcgatggttacgtctttgtaaccacgtgatgagctgccccaggtctcactggcagcagcagcgacgacgagagacgactgaccgacggcatcaccatcatcatcaccatcatcatcaccatcatcatcaccaaaactatcatcatagcgacccccacctagacggtctctaggaaagagatacatgaggatacgtaacgaatctatctgagactgactctgtaagcatgtgtgtatcttgtttatccgtgaacacttcgctgatcgctcatctttttttctgtcttctctttatttgcccaccatctcatcggctcattccgggtcgaccttccatcatctagagaaatcagattctttttctgttccctgtgatccgttcaatccgcccttgtctagttaaacttggctcgtcgtataaattaccttcctccttatttgctccatccggcatctcttgttgatagctcggcaagcatcctgttcaatcgtaagtatttaaccttcctgtcttaattctctcgacgctcgacatatagtgggaaatttatccggcagaccttacgattgaataagatcactcatcactttatcgtatgctttctgacagccaaagttatactaattattaacctgaaagaaacaaccatacacgatgtccttcccaacgtccacctctattgatctcccgctttcgctcgaccctcgggaaccgccctccacaccttcaccccataagatccgtacacccaagcggacaacacctcttccctcccgaacaagctctccgcaccctgtcggtcaccacactttgtcttcttcaccactcaatcgatcggcatcaatctcatcaggcactgccaaggttggctctataggcggaattagtagggacgaagaaaagggaagcgacatatttgagcgggatattgaaggaagaggtggagagattgtcagtttagcgaccggagagctcgacgattcttcaggacctttagttcatgtcggtccaaactctccacgccctcatcatcaccatcatcatcaccagcaacagcaacaccatcagcgccagcaacagtctcatcatgttcctacaccccgaatatcagccaccgatcagttgttccccactgttcttgacgatgcaattgaggctctctcagccgtaggaaaccaagatgttcttgtagtcactccgtccaggagtccttctagagcggggtctccaggagggatggatagactgaggcgtggtcttggtttgggttcttcgccggacgggaccggcagtggaagtaaaagcccagtgttgagtctcggggaaggaggcagagaattgtgggatctcaagatggccgatcagagtgcgctcggtgaggaggtgggtttatttatttatctgtttatctcttgagtgcgcgtgcgcgtattagattcaagttcaagacttgaccgacatctgcttctcaatcattccttctctcagtttctctctacgtcttcgtcgccttctccgcctcactctctcccagctagcccacaccctttgtctctctcgtcctcctcccattcactccatcaggcgttcaactcgattgcgctccctccttcgtacatacctacttcttcaaacccacactcgtccccgcatagattagcctttatctctccactggatctcaggctgtctccgcctctgtcgacccattcgctcgccacattgaccgctggctcgagtttgatacatctaggggatagagagagtattacagcatctgcttcagcatcgaccccgtcaagtagagaaccctcggcagtcggcgaaagagaggcttctgggagaaatctcgaagacaggctcgagaaggtacacgtggtggactcttgaatctgagtgagggactgtctcaccgacggaagtcgggatggagagtgtttcgccgtctttttgtttctcttctcttcatacataacgctttttgttgggtttgaaggacgggggagaggtcatcctcgtgctctgttggtctaagaaatcttggcatggttctctccatccgtcaaaaatcttttttttcaggcggatccgttcatccgttcatactttcacactttcattatctgtccaaccttctcttctccttcgatccttttctcctccttcggctttttgctccctatttttttctttcgcagatattcccttctctttcattccatccgtccgctccgttgcatccgtcgtgtcacagaacatgacgaaatgtttcgactaaactcaggcgttccatattccctttctattcccttgtgtccacgccatgtattcctcatctcaaaacgcggaggatatctgtttgttcgttacttttctcttggtcgtgattgtgatcgtgatcgtgacaatctcctttgatcgttgatttatgaatggttcgaaagaaacgagatagtgtgaaagatgggaggagaaccacaggaaagaaggggaatagagagacggaagaacgggcaaagatatgtccactctctatgacgaagaaaagagaaagctataagaagcaaagatgaggaatgagatggataccttattggcccccgctggtcaggtttgcagggaaccctgcgaaatcagtctgatcctgtatcggttgaccttctctctggaacgaaatcctcaaccgaagtctgacttgactctattctcatcaagtccattcgaccgatcaagaaaagaaaaggagaagaattagtcgaatcgagggttgatgagaagtgaaaaagagagcgaaagcaagagacatacaccgacgggagccatgattcgcatttgttgagtctcaatcgaaccaggagcaacatctgcgttagacatcgcaagcatttgcagttgttgggtctacaagacgtttcatgaggaaggtatgagtcagtcattagtttcaaaacactgcttcaatccttgtctaaattaggagaaggcgagaactaaatagaaaaaataaaaagtataggaaaaataaacggactcgaggaacggcagcctggaaattgacaccctggattgtaaccccatccagagctgtaaacctagcgaggatctgaatgacaccctgttgagtaggcgaagccctaggtgtcaatgtaatcttcaacccattcttctcatacgcggtatacgactgaggaccttgagccggtgctgtcggttttggtggcgcaggtgcaagtgcaggagtgggagcaggtgctgtagtatcaaatagagagccggaaacattcggcggtaatgtcgatgccgtcgagggggtagaggtagcagaagaagagtttccaaagagacccatgatgtcatctactgctgaacgagtcgacgccggctgggctgaagaaacagtagaagctccgttagccggggcggccgagccggaaccaaagatgtcggcgaggaggtcgtgagtattttgaaccgaagcggacggttgggaggacgagggttgaccagatggatcggctgattcagatacatcgtcgcctaggaggtcgagaaccgtggacgtatcttttgtggtttgtgtcgagccaactgatcggcgctcacttgcagtcccacccatgatggtagctttgatctctggcggaggcattctctctaatacgccgtgcatgatctcactcgcctggagcaaactaccatactcgactgatctctgctgtagctctagatcctggatgtggtcgtatccattcaacaaccttgcgattcgtccaatttgatctgaacccggggtatcctctgcgaatctggcagagagcttgacgagagcagtgagaacaaattgagaggatagtgtattggtgtatggagagttgaggacagaattcaagagatcgatgatatcgctctgggacacgtgcttgacctcttcgccttcctccgccctccatcctttgagcaagacatctccaaattctccaattagccaaacagatgccaaagtcagtgactcttgcgaaatgtccgagagcagagccagataaagcttctggactgtatatgtctgaagttccggggtatggcagaccaatcgaatgaatgccgataggatttcttctcgtacaaagttacccgcctagaaacgtccgcgcaccaaagaagaaaagactcttcatctcaaccaactatacaagatgcctaatatcaaagaatacaggagattctctcagttaagaataagatgaacgtacgagtttaagaaccctaagcacggtatcgatatgccatctcttgttaggtgcgaacctctcggcagccaacgcaatttccgtcgtcattcccagtttgaattctgcatcagccacctccaggaaagccaaaagctcgcgaaccatgattcgaacgttttgttcgttagtcagagcgtagcacagttcaagagctcgtcgtcgaatggaaatatcaccatctcggagacagtccaggatgatcggccggtgtcgctgaaccgaagaagtgtcgatagtgacgaccttgttgagcgtgttgagagcgacatacctgaagcgcgcattgagtattccagggtttaggtcaatacttcaaaaacatcgatgatatttatgaataacaatagacgaaccggatgttgttatcgcgattgcttaaaaactttccaaggatgttgattgccatgaccctcaaaccgctgtctgcctcaatctccaatacggctaatacagtctcatacaggatcgcatttcccacattcttcgatccgtccgtgttggtcgcgacctacacccatcatttccgaggaaagagcccccgattagcgaacgctctgagcctagatggaaagaaaacggagaacctggatatcgaacgaggatgtttacgaacctgtgctagaatatcgttcatatcctcactcgctttggcatcccctcttccaagtaaccttagtagcctgaggatcttgacctggaggaacggatcggtcactccggatacgtcatgctcgggcgaatacccaacggtcgtcagagacttcaaatgctttaccaacagcggaaccgcctgaagtccgccagggacggagaacgaagatgagaaagccgggatgaccaaatagatgaattatctgacctagcttgtcaaaatcatagatgggaagcatacctttcggaattcatttttgcattcctcgtccgactgacacatctcaatcacaagcgtcactccgctcaacaagacaccatggtttctgtcttgaatcagacttctggccttgctaatgaaatgatcaatcaagtcaggcactctccgaacgattcttagagcgcagagagcagcctgtttatagagagcgatcaaaccaaaggaaattatccaacgaaaaatcaaaaggagctcggaaatcacgtcacatatattgaagagaaacaaagagactatctttacctttttccgtatgtacgtgttggaacttccaagaagcttctccacctcattacaaagatcccttgacatttcctctgatgagatgttggcaaaggtggagagggcaagcccgacggcatacatgtttgagtgattcatatcgctttatgatcgtagcccgattcagcaagaaagaggagtcgtggagtccagaaatgaacagaaactagtcagagctaaatggaagggagatcccaagcaagtctgaagcaaaggagcaagagaaaggaaggatctgaatgggacgcactttttcagactattggtgaccaacgtcaaaacttcctgattctcatccaacaacaacattgttcctagataccctagtcgcttatccgtgaaccttggactggccactagctttagacactcaatttgaccgaaatgagctgggtaacccaacatgtgaatgtacaatagtttggcaatgttgtgatgtctggagtaggcgtcatcctctttgaaggccgttcggatggcagcagattcttgggcgatgagcgatcgttcatctgctagtgtctatagtagcagaatacatcccgggagtagagaatgaaggtaggagaaagtgtgagaactaagatcgggattggaatatatataagagattaggtgaaaacccgaagggggtaaaaagaaaaaacgaaccttggccgctcggagagctttgatcaaagctagatacgaagccaataagacattttttgagctcttcttagctcgtcctctagtgaagcatagatagctcgagagggaagaagaagatagagaacgagaacgagaagagcggatgatagaagagaaagggcgagacacgtacttttgaggttcgagtaagccatcttcagatcccgttcaagtatctagatctatcaatattgataacaaccccagacaaatagtcggataagaataatggaaggggtataagaagagttggagggtagatgtctgatgaaagaaggactgaaagagatgctggtgggaacaagagagaggggagagtaagagaaggttcaaggcaagatgtttgtttcactccaggcgagatggagttttccctttcttgcccgtgtaagactcattttgcccgcgcgttcggaaacacatcatgttcagcctacattcattcatactcgcacacatgtagaacacaaggattatacagaagaaagaaacagagaggaagatgaaacgtattgatatatacaatgtatacaactcatacaatgtgggaaggcagaaagagacggatccattaacctcacacccagtgctgtctggggaacaactactcggtcagactccagttccaaccacctccgatgcgaacctcgtcaaacaccttttgctgcatctctgtctcctcccatttcatcttttcttcctcgagctttccatctctgaggcatctgccaacggcgtctgcctgccaatgcatccctctgccagacgtgatggggtaattcctcgtagttgatttctcgggagaatgatcagtcgcaaacaagtggattgtgaaagagtttgggtagcaagatataccgtgaagagtcaacgtgccgagtgtgccagtgacaacgatactgttaggtgcggtcggagtcgagatcgaacaagataccgtagcctaagatatcgtgtgaagggggagagggaacagatcattaatatggacccctaggtcatagagtagaacagatgtaaaggacaaagtcgatctacgaacttgagctcccagcttctcatacttcatgatatagcttgtgattccgtcgacacccgtcctgggatcgaaaattatggacggactgatatctgtaggtggtgttcgtccattctttgggtgctggaataagaacaaggtaggccaaaggaaagagtctatagcgtccggttgacgatactgatgtcagttcatttatgagaggaagacaagcaaagaggaatgaacgtacagggacctagatcaaacagggcacctccggccagtgatgggttcagcagtcgatgttcatgaggtagatctgttatgaaaacatgatagaccagattatcctattagtcaaatcgagcattgccggtccgagctatctacgtacgtgaaagagatatgatcttacctccgaaatctttatcaaaccgagaatcgattcgcttgatttccccgatctcgcccccaaaaacaactttttgagcaggctcgacgataggctggaaatataaataatttggaacgtaagacgtccgttcagtcttgacaacgcacgattgaacatgaccgagacagccgatagaccgacctggaatcgcgtccacacggcttccatcacaaagagctctttctgtttggcaagcgcaaagagctctgtcgcttgtttggccgagattgtgaatggtttctcacacaggacattctttccggcgttcagtgcgtcctttacgttctcatagtgctgaggatggggtgtacctatgtatacgcattggacattctgatgaagccattggaatgagataaagacctatgagcaaagtgaatcgagaaaagaacgattcgtttgtaacagtagcaaggagaatatcacgcgtacagggtcgtcgaacaaatcttgataggttccataaggagtgacggtgtctttatcaacgatgtgttgttcgatgaaagactgtgctttgtcaagagaccgcgacgcgacagcggtgatcttgtgtgcgatgtctgtggttcctcgtctatgatggataggtatatgcgtataggtgggatgtaagcaggctgaaacggacatcatatcagtcaacatgtggtaagacaacacttactcggcgggattcagttgaatgtcctggggaggagagtgatcggaccattagctttccgacgctaatgagggcaaaggaggataacataccttgacaaaactttctgcgatcagcccggtagagatgataccccatttcacagtatatgagtttgtagacgagggatttgacatggtgggataatgggataatgggatgataggatgataggatgatgatgtgatggggtgatgggtgatgaggaagagatgaatgaattgagaaagatctacctctggggttttacttatggccttcagaaatgatcagatcggttcttccacagcaacattgtccatatagtcatcttatactctgcaaagatgtatccaaatagatacgccgagcaagaaacgctcccacgcaagtaccatcagcctccagtcctcctcaactgtatacatgacatcgaagataccatcgaagtgatggggacggcaaacgacggggggcttacgaagttagctagagcgctccatcggacttgttagggttctaaagtagccggaattatgcgttggctacaacctcctgccacgtggcaagacccgaggttgatcgaagtggctacaaattactcgacaccgcttttatgtcgatgcgtatcaccagcttaggtgcttgaaagacacgtggaacatcatgtggcaacccataaacggcacggcacggcaatcattacgcgtgctcggcagacggaagaatttggagttttccattgcctctttcatccctcttttgaatcatcaacatcctcacagacggttttaccttctctctttctcttttctggtgtgatctctccgttggatttctcgttacatcggcgcattctcaaacacacatacacaacagttctacccttcttttaccttcaattcacttacaccaataaggctgggaaagccttacctcggtctcaggtctccttccataaatgctcatcctccccaaagtatatcccttccgtacactttcgtccttttccagagtcctcaacccgtccaattcgacagcctcatcttcttcaccttccatctcctcttctacttcctcgggacctgcaggacattctcaccaccatcatcgtcaccaccaacaacatgcaaatgtccaccttgactattcatcgccatcccaacacgtcattggaggtggtggcccgttcactagcaacgccttccttctcggaggaggcgccctcacgaagatcgataacaggccaggtacctcgttagatgtaggtgactgggctccgagaatgggaggcagaggtggagcagggaggaaaaagaaggatcaaaacgacagcaaggtgagtgttcctttctttctcgctatacctatgttcgctcatgatagcctgggctattagagttttttcttgttcctcgttccgagcacaagctacacttgactataaactgctcatctggatagaaccaatcgctcataatatatcctcttcaacctttgatcacttacacccaacacagggccatggcatacctctcataggctcgacctcttcatcttccgatccatcctcggttctcgacgaagacgactgtcaaacatacaacagcatctttgctaaaatccgccaggccaactcggatgctgctgtcgttccgccaacttctagttctcaatttggtccggtctctcgatcgactcccattctgcctaccatcatttctgcacatcgcgccgatcccatcgagatcagaacggtcgataccttggaggaaagtctgatctcgaccagcacttcgaccatcagaaccaaccctccacggtctgcttccgagacgatgctccgtcttcccgaagttcaacgaaagctgagaagcgcgttcagtcagacttctgagaacaaatccgcaatggcccgtgcgcataggaggccaagtaggctaaggaggctctctggcaccgaaacggtaattaataaactggagccgacgatgaaccgtcaggaggctagtacagaacaaccaaccgaaacgaccgagttgaactctagagcgccagaagtgaatgtccgatcgagatctcctcttcgtgctcctgcaaaaccaagagtccgatcatctagcttcccttccacgatcctccttacccctcgacttgacttcacatcggttcctttgcttcgtcgatcgcactctctctcgaccagttcaaaatatcgtaccccttccgccggcgagtcagaccccgagctttcccctccttcggtcgtcatcaatgatgagggtgacgctgtagtgcttgattcgtttaatttcgatgcatctgaacagacttctcagccgttattttcttcccctgcccacacggacaaccaacctattcaaccaatctcccaaacagacccgctgaacttgagccaagctcatgcggttatctcctccacttcttctctacagcctgcacccggaatggagaacgttaaagaagacggagcgccttgggaaattgtccttctccctcccattcaacgaccgacgtcgactaacatggacccagctgaacattacttccagaacgccctcatcaatgccatggatgcgagggatgaacgagctttccgtctagctgccgacgcctactgggactctcaaacacttccgtttgggtccgatcactcgaacgtcccgcttcctaaattgacggttgagacgattaacttgatccttgatggacttcgtcaacttcgaccacctggtgcaccaatagatgagatcaagcaaactttcaaacggatgctaaatgctgatatccctccagacccaattacctatttgactcttctcgagactctatttgatcgagaactagagatctcggacgccttggtcttccagaagcgttgtggagaaattcggccgggcagtttcctcgctcatccaccagcgctcaacttcaagcaacaacgtccattagaaagcttggtccgcgaattcaaccttcctcaagcgatggacatctttttcgccgcctccaggttctatgtcgagaacaagaaggtcttccctaggttcttgtacggtaaagcggccgaggccctcggtagatcgactaacgtctctagattggcaaccagtttgtataaggagataagatggttgatgagtaaagacatcattcctacctctggctttatcagcactcagatctacaccggtttgctctctgccttcttcaacgaccgaaagttggactcagctgcacaacttttagtggactttgtagacgatgacataaatggcaggataggatggatagctgaagatgaagagtaagtgtctttcttggtctggataggcgtctgggtgtttcttttttttatttgattttttagcgatcgctaatgttcacttgtccgtggttcctttgttctacaaaaaaggggacgagccgaagaaaggatcatgttctggaatagatacatcgaaggccacttccagactggtcgagtcaacggcgcaatgcagcttgttcaaaatcttctggacggctgtataagccctcagacgagcgttgcccccgccattcgagcttccactctgaatgtagtgatcaagcagctacttgatcgcaacgacgtcacttctgccctgtattggttcgatgatttcctacccgatagccctaagaaacatccatcgacacctcagctcactcatcaggcttacgaacatttcctcgttcatgctatcaagaagggtgattgggcactatacgacaagacgttatttgcagctctaaccttctcgcctgctggtttccaacctcgacccgtcgatatttctcaaggaattcagatccatctgttgcaaattcatcctgattccacccttgaaacaatggtaaagcacgccgatcggatacttggtttgattacgaaatgcgagcagtaccgccagttagaatatcttttacctccaaacttgtctcctattttgctcgctttgttggtcaaggtgaagaagacaacggttttcgaggatgtctatcgtcggtcaatcctccactttggtccggattcgactgaagcgttcaggttccaagatagaatattcgccaacatcgtccatgatctgacaaccgaaggaggtgtctttgttgaatacaccgataaggagaaactggacctactcggaacgctcgttcgaatcggagtctcactcgatgtcccacttgatgtttctcaccctggtgtggccgaacgggtcctaggcctctacagcaaagccgttcaggatgtcgacggtcgactcgacaagcttggtttgagcgcatcgactgtttgggccatcacagaatgcgcatccgttcaagatgttcgatcaacattccctcaaactggtcaggcaaacaataccatcggttttgtctctgcgctcatcaatgctaggcgagcgaccggaatgacttaccaaatcaattgggcttcggcggcaaggactttgacggaatgtcacggggttgaatacgcttctagattgttggcgcttctaggaccggatgttctccagttgttgggtttacctcctctccgggtttacggatcgggcgcagcatatgtgccttcagcggatatggctccaaacttgacaaaccaaaccgagccagcggcagccacggaacagagccaagacaccgtctctgctgttgatgctacccttgtttctgaagcgggccggcctgtcgctcttgagactgagcttcctgaggcggtctctccattagaaacatctgagggccaatcgagcgctcctatcagtttgaacgaacaaacggcatccgggcctgctcctgtcgtcgttgctacatctacacctttacaggccactgctgctccttttgtacctgggtcttcagtggcatcggcatcttcgtcgtctagcttgtttgcttctacccaagactcagccgaatcgtcagctgagcgatcaagggaatcaaccattcccacatttgatactcccaacgccgacctctcccgacgaacgttcttcgtggactcaaaccttactagagtaatcaaccttcatcgtgtatcttctgccaaggtgactcccgttcaatcataccaggccctacgagcgggaatggcaaaaaaccttgtcgcccatcatatctgtctgacacatctagtagaagcgctgggtagagcgaaggagctcgagaagatggttgaagtccttgaattagctcatcatgtactgttcctcactaaacctgatgatcttgacagctgggtcaagatcgaatcgaacgcaatcatcgctttcgctcactgtggagagatggaacgagccgctttccacagaacaaacatcattcaagcaggaggagcacctagtgctgatgcctacgccgccctggtcaacggagcgaaagataccacggatgatgccgctgtggctagagcgctgtttagggaatcgaaagaattgaacgtcaagcctacgttgtttttgtacaacacgatcatctcgtcgttgtcgaaagcaagaaaggcagaggaggccatcgcgctcttctatgaggttaaagaggttgggttgagcccctcgactgtgacttatggagctgtgatcgtgagtccccatcagatcttttctttatgatgggaggggtcttctttattgaattctgacgattccttcctggtgctgatatgtagaacgcgtgctgccgagttgggaactctgagcgagcgattgctttgtttgatgagatgacttctcagtcgaacttcaaacctcgtgttcatccttacaagtacgtcttgtttcatcctatttatctttccttcaggcgtttacttcaaactcactattggtctcttttctcccgccctgacagcacgatgatgcaatactttatcacttcccacccggaccgagagcgtgttttgtactactacgacgagcttctcaaagcaaatatatcaccaacctcacacacttacaacctactcatgcaagcttacggatcgatcgaacctgttgatcttcgagctatgcacaaggtgtttgaggccttgatccaggctcctacagcagacgctcgtctagagggaattcattgggcaactttgatcaactgccacggaaatgtcaacaggggttcgtttaaatttctcttttacttcagattaggccggaactgattgagtgacatattctctcttgaatcgacagacttggacaccgccttggagatcttcgattcaatcactcagcgaacagcgaatgctccgacgtttggtaaacgacaatcacccgtcctgcctgatgccgtctgctgggaggctctcttcaacgctgtgctcatgcagtaagttctgcattgacatcattttattgcgattggcatggatgaaacagttacctgacatcgtgcttctcttctcgaatagcaaacgatttgatgttttggagaaatacttggacaggatgatcgctaatggcgctaaaacgacgacgtatattcagaacgtcttgatcaaaggatttgcctcggagaatcagattgaacgagcacgagcaatctttgagcggatgcaagatcccgccatgggtatgtgtttccttgcctttcatgtcttcctgattccctccctttctggttttgaagcgcgtccgggctcaccctggatacttttgattgggactatgataggtattgctgccaacagtaccgaagttcctgcaggtgtcgtttataggatgccttctacatatgagacgatggtccgagccgagttaggttttggagagagacatcgggctgttgaactctgcgagcgaatggaagctcgactatgtacgtatctctccgtttctatcgtgttctctcaaggcgctctttaactgacttgttgatgatcaatattcgtctaacggcgacctagtccctccttcggtcatgactcatgttcggtctttgatcgctggcacgccgagtgctggaagctcgaactctgagcccttggcttgactgagaggttgaagatactttactcatatgatttccatgtcgctctactgtattctcttctgcttgtttctctgatctttctttgctcattttcgtcttcatctctccttatgcctatcctttccttccttctgtttcgctgaacttgaaggccatatatagtttaaacttgcttcttttccttctttcgaaatttatcaacctgtttgtttaccgagccttttgactttgtagaataggcacggatcttgactactagtgtctgatatgaaatatgtgtttcctaacgatgtttcttacaaaggagagcgaaaagtactggtagagagcaggaagtgaatgagagaatgaggcggatcaccatggcaacccgataattttcgattaccccttcataaaatatccttgtatcgacccacacggttcggacacctatcctcttcaatacctatacagcacacagcacacacctcgttacatcttaactctttcgcaagagatcaattcctgtttgtataatccatcccatccttttcgtttccgaggttctagaacaaagttttcaaaatggtacgcctaccttcgatgtctgctacaatctatcggattggcttctttcgatgcagaacgtcggtctctgattgtacaacccatgttgttctttcccctgcttacgaaatttcatgtcttacggggaacagcttcgaagacaagctagagagcgcagagagtatatctacaagaaggcaaatgaggcacaggagaggtcgacgtatgaccgaaagcagaagatgaaggacgcgttggcagcggggaaacaactgcctacagagttgagaagggaggctagggaaatcggaaaagacttgaagtatgatgaagctcaaaccggttagttggttctctctgctttgcatgcgtgctgttttcgccatagagagagtgtttgtgtgtatgtgtatgtgtgcgttggtggggtcaggactacccaacgatgtggtgtgtctgggctaagtaggaggcagaagtagaggtcaataaagacattctggctaaagacatatgtactaactctttgctcacttctctttggtgcttggaagacccgacggaccatgtggacgatgagtactcccgagcgggtgtgtacgacccaaagatcctcctgacgacatcccgtgatccatcctctaaacttcttcagtttgctaaagtcagctctctctttcactgtctttcctcatacggattttcttttggcaggctgactgatctcttttacgtggttttattgtttaatcaggaaatgagattggtccttccgaattcgcatcgtataaatcgaggaggatacgtggttaaggatctagcagaggcttgccgggcaaacgatatcactgatctggttgtcgttcatgaacaccgaggtgtacccggtaaggcctttccttgttctcctccatcgaggattttttattggattctttccgtctccacatgctaatcaaaccatcaaattatcttatcaaatcttctctgcttcttgttagacgccttgatcgtctctcactttcctcatggcccgaccgtctactttacgctccacaacgttgttcttagacacgacattgcttctcatgcgacatctaccgtttcggagcagtaccctcatctgatctttgacggtttcgagagcagattagggaagagagtcatggatgttttgaggttcttgttcccggtgccgaaggaagattcgaagagagtgatgacatttgcgaacgagggtgactttatcagctttaggtcagcctttcttctccctttgcctcttggcttttgatttttcattcattcattcattgcattgcaacaagtaaaagaggaaccgaaaccaactgatcatgtgggatttttcttcatatatcaattaacacgaaaataggcatcatgtcttcgcaaaaacgtcccataagtccgtcgagttggccgaggttggacctcgatttgacatgaagcgtacgtatcaacccgtcctcttccatcaactacaagctatacatttgtctaacacctcttttcctcttcttcgctgctctattgatgccttacagcgtacgagattagacagggcacgatcgaacagaccgaggctgatctcgaatgggttctgaggcaatactcgaatacaggccgaaagaaacagaacttatagatcgaaatatgtaatatacatgaagtctttctcttttacctcccttctttcccttttccccctattcttgagctatatgtgtgcaacactcttgtctgaatcttccggaaacggatacagggagactcggccgagtttgcgaaaattgttttcaggtaatagacctcaaggcccatcacaccaaacccatgtctcatgcgggctactacctatcctcccctcatctctcgtatctttctctttgatctttgttccctctccacagaaccagaaagtgtccacgtatgccgagacgttcgctctcgtttcagcaggcgcagttgggctcgggattaaagaggggacgataacttgatgggtaggtaggtttgggcgctgttctgtcggcgatggcgtgtgttctgttcgatgcagcgtaaatgaggttgagaaagaaaggagtatagataagatacgtgatctagataaatggcaagcaaaagggttgagactacaagaagatcatgactaacctaacggctggattattccgacccagtcaacaaaactctcgaccaatactctcacgtccagctttggatatgtatccctctttcttttggacggagtgaacggatcagattctgatagaggttgatcgatgggagggatgattatgggtagtgagattgacaaggcttgagcatctagcaggaggagttgagtagcgggtgtactgtaggaagagacaagaataacgaggcagatgatagatcaaacgtatgtcggccgtgatgaatgcgagagctgtgtaagacttactctggtggccggcgctcattgagatgatcgactgtagagatagccagggtgaggagggagccatattgggattgatcgacccttttggaagagacgaacacgttacaacttatcagtagtttgctcttgcagaatctaaaggaaggacttattgcgtacgttggtcttggtctccactcaggctcatgatctccgtcttgttccacaaaccctccaaagaatgaggacagctcatgtaagatgatcaaccgaggaaagctttccagtcgcgtcgggtcttcagaccggatgtgaatgggtttacgcgtcgaatctgacacgagcgtatcatcagtggacaggagagagaggagaagtgccagatgcgtcgcagtaggcgcatatcggatctgaacgggagcagcagacaagaagatcagctaggatgtaactagagctatggctaatgaattcatacaccatcaaacgcatgacgtatagcgtccttcgctcggagagaaagaagagagaccgaaggcctcaccttcactctgtcgagcgttttggacagtcgagctctcccagcctctgttttgaaccaaagatttccatctttcatgagagctgaagaccattcgttttcgttcttggagaggatcagtacactgcccttggaaccgtccttgtcatggctatcacctggttgatctgtagacaaaagaccaagagctatatgcacagcggacgatccaggaagcggaccgaggatggccagcgagttcggagccgaggggaggttatatctggggatgtaattcgtaggagacgaggagtcgtatgaagcaggaagaacggtatgcaggctgatggccataggagagatggagagagagagatgtgagcagagtgagcgaggtgggactgaacgaaaggttgatcgagatcaggatgtttgtacggtcacgtgatatgaatgattctgttttcttgtgtgtctgttgtatgtagccgggagaactctgtgaagacgccgagatggatgcgctcagaacagtagcatgttacatgccggcagttggaatctagtagtaagtgggaagtgaaaagcgagatttgagaacaaaaagtacgagttcggtggagacattcacacacatccacacatccgagaaggccgacctcacataagataagataaaggactgagtgagttatctgtgctatcaaccctggcttacagcctctacgctgaatgttcatattgttctctgtcgtcggttgtctcaagcataacttgactaagcctagatttactggtccttaccgctcatactgaagcagtcgcacagacagaaccagacgaggtgtatttgcggatacctttagctggccttgagcaagcgtagcagaggaagaggatggtttgtagtctgtctccgtagtagaacactacgaaacacttcaaatacaaacatacgccacctgtctaatccatcaatagagcacgtccctaatgcaacactagaaaactgctgcgtaccctgaggcctggcttgatctaggcgacttacgtaattctcaacaaaaagatccgtcgtgaacccaccctggtgaaaatattcacgcacggaccccagcctgttgcgttgaagaaaatctttttttccctggtaaatatctggtcgtctcttcttcaagtcggtaagcacactcaatttctgtttgttagatgtctggtatccgtgtcgtcgctctctttggagagtcgagatgatcagatgctgatcgagtcccgatttattttgtttttccttgattttttgcgggttttttctggctgtctggtacgacgatgtgttggttgtttcgcccttggattttttttccttgggatcattcttgcgttctttcgtttgccttctgggattatccttgtcgtgcttgtgtgtgtgtgtgtttacgtggaaatcgctggatcaaacgtacttcctcgtctttttggccgcgtttcttgtgctccttccgacatcttgtctcgaaaacctacgctctcgacgtcgtttcttttctccttcccctctgcccttagtcgccatgtctttccagtccaagattctccgaacggccaacgcccctaccaccgccccggatgaggtcgagcagactgtcgcccaggccatcttggacctcgagaacaacgttcccgagctcaagtctgagttgagggctctccagatctcggccgccaaggaggtcgacgtcaagggtggaaagaaggccgtcatcatcttcgttcccgtccccatgctcaaggccttccacaaggtccagcagaggtgagccttcatttgctctgtctggctagcttttgaaaaaggggaagaaaaatttggtatcggtgctggtgccgggtagaactgggtcattgagaggagtagccggaggggtgatcggatcgtgtgggcaaagagacaaggaatcgattttgaatacagacgactacacatcagaaatcagagtcgtcttgcatggggatcattctctgcccaaagaagaatgttcttctttggacctacttcagatcggtttatttgttgtcatcaagatactgacaggtgttcttgttttttctttctttttttttttt

SEQ ID NO: 36 - DNA, 4066 bp, Xanthophyllomyces dendrorhous
cccccctcttctctctcggcgtatctctttcgacttaacctttccaacaaaggccgagcactttacgacctacgaagacttctgcacaggccacgagaccgccttagccatcatccgtctgtttgagaaccgaccggaatgggcagaatacgaaagacgttgtacggacatcgcccacagacgacctcggcccgacctcggttccatcctgttagcctcctacccgtctccatccgaaggcccggtcgggtcgagaccggatcgaccgccgatgaacccttcgttctcttcctcaaactccaccaccggtacgctcaccccatcgagcgcccccgtctcgccaggcctcttccctcccccggcgatcaacctcgacagaccgtactcgaaactgatgctcagagatctcctcatcaaacccatccaacggatctgtcggtactccctcctcctagccggcctccgaatcaagcgcggcgcgctcgaaggcgatcagagtgatgtcgccggcgcccagacagacaccgggatctcggcggatgggatccatttcggtggagacgtactcgacagagcggtcgacgtgatgaaaatcgccgcaggtggggttgatgaagcgacgaggaagaaagtcgcgatggaacggacgaggatgattaaaaacaggatagaacctcatatcgttcgtacagtgtttcctcttctttccttcctctgtctctctctctttctctctccttgtctacatcacctcatgcttggtctccatgccaatcttcgtcactcactctccttctctcctccccatcagcatctgacaaggacgatcatcgaggctctaggcgactgtctcttcgttggttccctcgaaatgatctaccagccgttacccataatggtctcgaaccgtcagaccccctcgcccctcaaggtcagatatctggccgccttcctctacgccggttatctcatccttgccaaagtcaggaaaggaagggactatcaggcgttccattacatgccattaagaggcttgagaatcgtcgaggaggatattcctggtacttgttagtgttttttttttctttcttgttgcgcctgttccgtcttcccttttttttttcttcctttttttttccccttccttcgttccgctcatctcgatgtcacattctccccggacaacagtcttcttgccgtactcgtttcggttgatcggcgaaggattttactttgagctggccgccggacattccaaagaacggacgctctggctcgacaagatccggttcgcacatgcactcggaccaccgaacgccacccaattaccatgctccattcccgaaatgctgttttcttccagactccccctccggagggcttcccaaggcgccggcctgtcctctctcgaccgcgcctttatcagcacgctcggtctgggtgggatcaactcgaaacggctctcgctcaacattacagaaggcttcgacctcgcgacgtcgatcgaatccgacgtgtttgacgagtctgcctcgaactctgtctcggcttcaccggcgacgacgacggtgcccctcccggcgtccccccaggtgtccaccacgccttcgtcctcgtcgtcttcctcaccgaaagcgctcatctccagagcgctcacctcgtcctccctctccttggccggtcactcggccttccaacacggcccgcagacgaatcagccggtctatctctcccaccatcaccaccacctacagcaactttcgttcgtccaagcccaatcgttactccgccggaacgcttcctatagagcaggggtcgacaaagcgttgggcgacgtgttttcggatagctgtgctgccgctcgtcaactcgcccagctggatggttacgtgctcttccctgggacgaacccacctacgaacgtccgctctcgcggtgcagccgccggcggtagtgacatcggtggtagcggtggtggcaatggtggtggggttggttccgccggtgccggtgccggcgatggaacctttggtggcatctctggcatcggtccgaacggatcgtcgtccggtggtcaggaaaaagaacggtcgagctcgatagggtcgaacgtgagaagaaagatgagggacggaagctcgatgagaaggcggagtacgtatgtggagacccagtcgtccgttctgaaccattccttcgggaacactacctttctcgatccactcaatcctttcggaccggtaggtttaccccccaccaccgttatcaccaacaacaccaacggtatcacggccagcacctcgatgaacccgtccgtcatcggccaaaccggctcgtcaactttcagaacgtccggcagcacagcggcctcgatcttgcacagagcaaagtcagacatcgcgctcaacaaaccaaagtttctcagacggtcgaccgtgtttgaggtcgaggagggctcgaccgaaggcgttctccccaacgtgccccccgtgccggcgatcgaacctctgtctgccggcggtagatcgagaggcaggacgaggacgaccgggtcgatatccaggtcgggctccgtcaataaaccagagttcgacggggtggcctccacgtccacgtccacaaccacctccacgcctgtgccttctgtgccccccagtcgtcaaaactcgaccgggaatgaggctctgtcctctcccgctccctcccaaacgtccgggacgaataccggctcgtctttcaaacacatgaggtccaccctcaagcggagttcttcaatcttcgaaggctggtactcgaacgccgggttcaactcggatgccatccctcccgggcctagttcgagttcacatcccacaggcaccgcccacaaaggctcgccccaggatggttctttaatctcttcgctctcgaccttgactcttaattcgccctcgagtcctagtaagtccgccggtggcttttccgtcaaggacagggacagggacaaggacaaggacaaggacaaggacaaggacaaggacaaggacaaggacaaggacaaggacaaggacaaggaaagagaacgcgagggtaaagatagcttccttcgacgatcgctctctacgatctctggcaagagacgatcgaagagctataccagcgtggcctcactctcgccctctagtcttgcgcctttcagtgtatctactagtccgccaaaagtcgaaccgatcccgatcccgaccccgaccccggcgccggacccgactacgaattccatgctcggcgtgaacggaaacgcccccggggatgggacgttactctctctgacaccggtgtcgccttttcagatcgagatccctgcagaattcggtgggcccggtcgacagagctcgcctgaagactcgacgatcacgctgccgatgatggcctcggcctcggccgaccagaccgtcactcgaccggcccattccaggacatcctcttccggtctgtcctctgggagaaactcgatcgtctccgtcggctccggcagaggttccctctcgggcgcgagtagcgacgagggagccgatgcgttggtcatcccgaccagacgacggctcaacggcgttaggttcttcccaaagtcgttgcagatcacgccgatgcctccttgatcggtcttgctttctgtttgtttcttttgtttgtttccgtctgtttctgttttcgttttcgttttcgttttcgttttcgtcttttattttttattttactttattttttttgaatcatccctttcccttcttttccgctcgttttctttctctcttttcgtctcgttctgatagatagtataatctgctcgacactgtatcccgtccccctttttttgtttcttttcagtttcttctctttctttcctactccctcgcttttcttcttccttggaaatcctgtctgatacgctcttaaactgtctcttgaattgtagccactcttcctctctttttcttcaactggatcaaccatatatgcttaccctgcctaatcttatcctttctgcctttttctctccttgtcctcttattcctgtcactaaatc

SEQ ID NO: 37 - DNA, 11216 bp, Xanthophyllomyces dendrorhous
ggaggggacggtcttgttgacgtgagagttacctcggacaagaccctcccaaccctctcggacgacgtaggtgtggcagccactatggaaacggacgcagaaacaaaaggagattgagaaatggggtacgaccgtgaaagcgcaggcgccaagacacgattcagggaaaggaaatacttacgactgaagacccattcgaacgacggatcgcacagcggcgttcatacctaagagatcatcagatgagggacagagaaaaggacaagaaccagagcgtatacgttagtagatgagcacaagaaaaagaagctaacgttatggataaaaggctcaggaagccaaatatgacgaaccggcggaatctcctccagaggtgagaacggcgagcttcctcgggggagcgtcatcctcggtagcagagaaaaactttggaggctcgatactcataggtagaaacaaaaatgaaagtttaaaaagatttgtctagagtaggtaaatgagatttttgggatgagtgttataagttgtatgtgatggaagaagcgggaaaaaagaaggaaaagaggagaaaaaaacgaaggggacagaacgaaaacgaaattctccccacaagcccgtcaggagaggaaatttcctgcggggttgggtagatgcctgaaggaaacccaaagagcctgtacaaagccttggataagcctgggatcaaccgggatgggatgagtgatgtcatcagtcagcccactgccgctcacctctcggattgcatagcctggttacagttacgatgtattgtcaaccaaccctagcacatttacgcttatgtaccggccattaaccttgtcggagatggatggggaatccacccagagggagaacaaggaagaggcgacaacgttcggttctttcttccctttctctgtttctttggacccaggaattcgatatccaagatgagttctgagaagaacgtgagaagagtattatacatacaaaaaagaagaaaatgatgaaaacagagacagacaatggggaacaacacgttaaagatgggcgcacatacgaatgaacaatcagactgaacaaactgatcaaaatataacttttatgccggcgttttcggggtcgatcgatttggtcgtgcgggccgaccgggttctattactctgtacgtattgctttaaagaggacaagttctttgatcttcttgtctgcgaatgtcattccctatccgaactcttactgccaatctaccttccactcgcatcgttcgttcaatctcaaaaatgtctcccacgcctgactccttctactctcttgtcgtaagttacggttctgtatgcgctctgtcttgagaaccatcggattgacgttgtcctcgtatgcgtcttcttcattgtgcatttgtaatcgaaaactaggccaaccttcctaagaaaaagaccatccctttttctgattacaagggcaaagtcgtcctcgtcgtcaacaccgcctcaaagtggttcgtgtctatgattatgatccgccttgcatcatccgatataaggtcaacccttctgaaaccatcttctatctgtctattttccccataaactctggcagtggatttacccctcagtacaaggctctccaagctttgtacactaagtacgccgaccagggtctcgccgttcgtcctatcttctcttcatccagaattttcaactggatgggcacttagaaagaatactgatcgaactgctatctgttccaaacgacttgtagattgttggattcccttgtgatcagtttgggaatcaaggtacgtttggctgattcaatatatgcttcgtctatctttatatttgccttggccgtcaaactcaaacacgaaccaatataaaatgctacagaacccgacggtgatgacgatatcaccacggtgtgcgagatcaaccacggagtaactttcccacttgctgccaaggtacgctctccctaattgggatttcagtaataatctacatccaaaaccgcctctcttatcatcatctcgaagtatgctttgtccagtccaacgtgaatggtgatgacacgaacgaagtgttcaagtatctcaaaaccgagaagccagggcttttgggaacaacctccatcaagtggtcagtcatcgctctcacacgtgtttgcgcctctgtttcaggagagctatcttattgatctactctgttacgtccgtacataataggaactttaccaaggtttgtccaaacgccctcagtcagaggttgtatgccctagacgagctgtctcacccatctctctcgcttacatacgtttattatagttcttgatcgaccgaaacggaaacgttgaaggacgatactcttccaccaccaagcctgtttgtgcctctctttgtccttcgcccgtcattcggtatcgtgaaatgacgaacgatctctcttttccttgcccttataaatctgcgaaacaaacaggaaagtatggagggaaagattcaggaactccttgctcaaaagtagactttcccatctcttctctcttgtgtccggttaggaaatgtttttctcttcttcctcctcttctttttctctgtttctttgtgctcccctgctcctctcttgtctgtactttgctctaggattcccttctatcttggttctatctatgtataacgagacagattgatgaaaagaagtaaacaagtcagaccatagatcttatcgacatgtacacacttgagcccacttcgaatgaacgagaacaagcaggacatcaaacaaaagagagagaaggaaacacagttcgggcggagaagaccaagagatgtttagtgtttcagctcgagattatcaggtgcggagtagaagccctccttctttctttgctcggcaatcaggaagaacgccgagccctatattgaacaaaatcactcattggttcgttgagtctccaaagtcctctcagatcgaataaggagcaaaacatgaggtggaagaaagaatggactcacatcataagtcgtccgcatcatttctttagtaaccaatccgtcctcaggccaccagaggaggtaagttgcgaaccattcgaagaaagccgcgatccaaccttgtccgaccgatagatacacaagcgcatacatatgtacgttagtctcaaattcagcataagaaggaccaaaagaacagacaaagaggcaaggaacgaaccgattggatcagcgatacctctgtttccatagatcattcgaagaccgtccgagaacgtcagccctcctttgttctcttcgtcatatctatacaaccatcgtcatcaccaccatatatatatataagcatgatcataagccttagttgatccttctatgctttgggacgagatgccaagcgcgcgcgcatgaagggagagaaagatgacttgcttgctgaagatcgctgcgaatttggcaggaacaaatcgaccctgtaccgaacgaagagaaggctttagcgaaagcagtaaagaagagaagccgagatgacgagagaagaaagatatcggacctctgtatcatatgatccggtgtcactaccatgtttagctctatgaatggtcggcaagtaaactcggaagactttttgacaacggtatgaaagccagagatcacgatgagcgttcgtcgtcttttatattctagtcctgctcactatgcttagaacagggagggaactcacatggatctgggatccagcttgagttggtgaagtaggagaatgagctatgaatcagaaacaccgacatcacacaccaaatgatatggtatcccaacctaccctcccaaatttattatttccacatcgaaccatttctaatcagccaccgtgccatgagagagaactaagagacgtaagagagtgggctcactggtgaaaccctcgaaaggtatccagcggccagatgacaccatctagatctctatcccagaataagcagtgttgctgcaagacgctgagatctttgtgttgttctctccaccctggtgtcccatccggagtctcatcgctcactgccaagttggcccttggtagatctgttttgtttcgttcgaacgatagtttcgatcaaaatgatgagttcgtcatcattcgtgaaaaatcataagagaacgagaaggacgaccaagggacccagaaagacagaaccttacagggtcgatcgagcctatcagccaagtcggccggttcagccgccttatgagcagcgagatgctgaggaagtaccgcgtcaaactgactacctggcgctaatggagtggatcttccgtttgggtcattcattctgggactattagatcgataggcttgggattcaagtccgataagaggaaagaagagtgggttgaatgaagggtgatggggaatacgaatcggacccacaccgattggaggccttcctgagtctgggcgtttccctgagatatctgtgctcggatggatataggtcgattgagttttcactgtcattccattccgttcatgtgaatcattcgcatgaatcagtgtacagcatctatcattcacattttaatctgatctatacctcatcaatctcatcaacggctcattatatatctacagggtatgagaaaacggacggatagatagacgtttcatatacatacgagaagcaggctttcttccttcgacgcgtcatcggctatatcattctttcattacgtttaaccctaatagttctcgaggatcgccctgtctgttttaccttaaatctatctatggccgaccaacgtgtgtccatttcaccatcgatgtctgatttccgtggaggacatgcacgagtagaagaaaaaagagactaaagaaaggcaacgattattattgagagaaaaacacgatggccgcccggttcaatctattactcgagcactggtgcccagacgagaaaggccaaaataagagagcgaatcatagtagatccgtagcagcattcggaagacctagtcgttgtcgttctctagcgatctcgaaaaatacggagccctgtagttccggagtagagtaaaaaggacgcttctcattcgtcagctctcgacagaaagatcaagactcataccgataacagcattagtagacggaagaatcagaggaagcaagactcacgtcgtagactgtgcgcatctgttctttagtgataaccccatcatccggccagaacagcacgtatgtgatgatccatctagaattattgagagaaccccaagtgatgggtcagtaatcgatatcgacaaaactcttctgggaaacgaaacaattaaaaggcagaaggataggacttgctcgaagctagcagcgacgatcccagcaccatcggctatacatctatttctgtacaacatccttaggccctgccaaaaagtgatccctccctttccttcgtcatcatacttcgtgaatatcgcctcaaacttgttgggcacgaatcgaccttctgtatcaaatgcgcctgagtcagacccgtgtttagcccgatggatattcgcaagtgttatccggcagactaagaatgcccagaggaaaagaaccatgttaggaacagcgatgcaaacgagagaagaaaagaaataccaaagacgtacaaggatcaggaaagatactatttcctgagaagaaagaaaacccaggattgatgatcatcatgcccaggaagctcatgatgaggttatatcccaactgtcccatcaccacccatgcgctcggttagatcagtaactttgttttcccggacacgaagcacagaaggggattatccgtttgaaaagcgaagataaggacagacctgtctgaaccctctaaatgtgtcagtcatccagatcactccatccccatctctatcccaaaatagacagtgctgctccatcacgctctgatgactgtgcttctctctccagccgggcgttccgtctggcatttctgtgctcacagcaatgtttgctctcggaacatctttacgtaggcgcacataggaaaacatcaaatgtagcgcgcatgggtgagctctgcgtacttcttctaataaaacgagaataataagatagacgccgggagcgggaacgaacagggtaaatgtagtttctcttccaaccctacaggttctttcgaatgtctcttcatcgccacatggccctcaatgactgtcgagaatccggtggattgatccgacttctgggccaacgttgagacctgactcgaggtagaagaagtttggatggtggtctctgaagaagaagaggtatgcgagagagaaggcgacgttaacggagggctaagtgggagctcattctcgtgattctgcttgcgtatgttatcttgttcgagatccatcttgacgagtgcgtgaatgaacgtagagaggagagagttgagaagtaaaacagaattccttatatcggtgtgctctcggtctcagatgtccatcgtggccgagtaagtcagcatagtcagtcgaccggcaagccgaacacagtccgagatcaaactcgcaccctcatcgacttgatccacacggttacccgatctcgatcccgatcaaccgtggttacggatctcgtagccactcacgctcagcgtcattgccaagaactttgattcacagttagtaaagaacgatcgatccagaatccaagcagaatgtttcctctctgtctccttaagagcgagaaatcattcgtgtatcaaggaacatcagaagaattgagacagacagagtaaaacgtcgggtacatgtcgctctgcaatagactacacgttgagaaagaaacggagaaggaaaaagaaagaacggcgtagataatggcgacaaagtaggagtagacacttgagggcggttggttctacttatgagacccagactgcaagaccaatagattcaaagagatgagtgtttcttctcacaaggcgaatcaacaagacactgaagaacagaaatgatagaacttacatgccaacgcgataaccgagtaaagtgccatgaggactagaaggcagaaacaagaaggaagaaaggttaaaataagctcagacttgaaaagaaggaaagattgactgactcaatccctcaagccagttgcttgttccgtctgcaatgagaacgtgaaccaggatgacagatacaaacaggatgattgtctcgaaattagagaagaagagctacagggatgatagataataaagggggttaagtatggtatacaagcagataatcttgttaaaaaagagagcggaaaaacgaacggtaagctctcgacccatagcccaaccgattatcacgagcaaaggaatcattcctgtggaatagagcgcaacagaaaacttgatgagcattccaatctcgacggagaatatcgagattattacatgagacaatagacgaaccagcggcgatctgaatgctagatccgacggctatacccatcacaagctccatctttcctttcatggccatccatatagatgtaacgtgctcggctgagaagcaaaaaaagttaagagtaatagagaacgacggcaacgagttacaataagtatcaaggtctatgtttctatatcagtcgttcgtatgtcataaccgaaagaaggactgaccagcgtttcccactagaggaagtaagatcagaccaacgaatgtcttggggatattccactgctggcacgtttcatcgatcgaactgacaagatggtctagcagaaacaaacagggcaacgatcttgttaatgctggcgcatttgtttctgaggagcgtagtatagaaatggtacggaccggcacagaaggcagttaagatggtgaccaaggcgagagcgataccagaggcccagacacctaggtaaaagtgaacgaagcacatatgcaaacggtcaacatttgattgcctcgttgataggagcacagacagcggacaaacccatcgagacctcttcctcctcgacatcctcagtatcagcttcgaacagactggcatgactcttaagctggaagtagaggtatgccaagtagacgaagaacagcacgagggatgttcccctcgagagaagaagaagcccggtttgaggcgcgctactatcggtttccaaaaagttgacgatcgagcttgaggcggaactgtcgatcttggaagagtggtaggccgcggggacgaccaaggtgatgcacgaaagaaccagaagggagctcatcctatatcacaaacagaggaggtagcggcaacaacgacgtcagcgcccaaatgacggccagcgtagacggtgtaagaaagaaagaaagaaagaaagaaagaaagaaagaagaaacccacgtctgagcggccgtcacttggaagtgagactctgcaaacttaaatccactggcgaagaaactcataccgagaacgagaagaatgttgctaagctgatgtagcagagaaaggttcgatcaaaaatcaccaagtgtccagaaatagtgatacatgcaaaccgattagcatggcgaatctcggtcgatcacgctcattcgctatcagcacgagaagagagatgtacgtacgatggatccgagcaaactagtctgaacgaggcgaagctggttctgctggagggcgacgataccgacgatgagttcgacggcgtttccaaacctgcatacgtcatagcgcatggaaggtgaaacgattgatcgtaaacagcgaatatggccgagaaatgaaccaggtcagtacgatgagcggagcggatgccgacaaagactctgtgtcctttatctagaaggtttgacgggaaagagattctaacgaacgtcgcgttgagaagaccgccgatagtctgaccaagaggaatggagagctgctcggttgcatctccgagaagcttagccagagggacgatagagatgaaggaaaagacgaatcgaacttgagcactacgtggtagaaaaagatgagacgtaagatagagagacgggtgttaggtatatgtgtcttgacaacatgaaggagagtcagagagagagagagggagagaatgaagcaagagcagagtgaaagaaagagaagaacgaccgagtgatccaaaacaaatcagggaaggggaaaaaatcttcaacggacgtacctccatcctaagaaagtagcaaggaaggtgaagggaacagcgatgaggaggatgttgaaccagctgtagagaagatgtttagctgaggcgagagcggtaggtgcaaccttgaccgggtgcctatgtgggttcccagagagaagaggggtatgttcgccggaggctgtttcaagcgcgtaatagaacaggtcacgatggttttgtttacgagtgacaacccaagatgagcagatcagcctggatgaacgatcaaaggcgaaacggagcaagagaaggtgaccaacgcataacgataagaaacttttgaaaagggtagtattgactcttgatgtggatgggagatggggatcaccggagaacggacacgaaaagaagaaggaacaggtaaagacccgttctgcggtcgtaaggccaagacaattttcgtagtgcacaggtatcatggatttttattacgaattaaatccgtagctctattaggaatttcatcgagcttctattaaaaagtccattcgaatcctcatcggcggatcacagatagattggataacaaaaaggagtggattaggtaatcatcacgtgtgttagctttcgcacagcttgtgtcaggaaccagagttaggtaacatatacacgacagcgtgaccatgctcacattccattattcatcatgccttccatttcgttatgctccttctcctcaccttatgcgcttgataatccttctcagctacgttcccttgattagtgataggattagtgatatggattagtgatctgttgcttgataatctctagttgataatcctgtagtttagtaatcgagtggcaaccaggtggccacttcatcgtagctagaacacataaaaggatcgcgtgcgcgctccttcaagatgtggttcttcaagttaggatccttgttaaataacctagtagctaccagtgctattcaatcacgattcatcctctcttccctgagcctggaagcctaaacctccacgcctcgagcatccctagtcaactacagtcaccttgcgtaaccctataacccggccccttacagcttgtaacaatatcgaaaaaactacaagcttgtcctaatgaacgcctaatagccgtctgaaactttcgtattgggcagcatcatggttacgcataaccaccgaatctagccacacccacacctcttcatctccactccttctctctttctctccctttccttttctcattcatccaggcgttctctctttcttcttttctttcttcttgttcttttctggtgtccttcatatctagagaatatctcttcacatggcgttcaataataattctcggaacatgtttccctcgttcgatccgaattcacccatctatccgaccccaggccagccctcaccatcccaaagccaacaccatctttctctctctgcaaacgcgtcccaaccggcagtcggaaataatcctcttgcagctcaacaggcctttctcgccaggttttccaccaatgctgtttcgccaacggcaaccaacccaaatgtcatatctaatcccaacactcaaccatctcccaggccgtcttcgagcaactcagccttctcttccgctctcaccgatttctctgtcggaccgacacaaatccaacagacccaacggacaccctccggcggcaacggtcagagcgcacattttctacaacaaagagcagcgaaccagcaacagcagcagcagcaagctgggtcatcagcatccacagggatcaacccgaaccagctaggtccacagagccagcaataccagcagcttcaactccaacagcagcttctccaacaccaacagcttcagcagcagcagcaacattttcaaaagcagcaacagcagatggcaagaaataactctggaaacggggaacagtcttcaggagcaaatttccctcccagcatggtgatgaattctgatactatacgccaggtccgtcccactcgttctatctgctcgttcgcacgcgtctttcgagacgcgtctttaccatccaggttctcgagctcttatttctctttttttttttttttt

SEQ ID NO: 38 - DNA, 10380 bp, Xanthophyllomyces dendrorhous
ttttttttttttttttgtttgttttcttccttctctttcgttttctacctgcgttcatcctctggtcaaatcaaaaaaaagatcacactcacctatacactcacacatgcacacaccctcatacacctatacattcatacaactatatacattcatacgttctcatgacctctacctacgcatgtattgtttctttctttctttctttctttctggccgtttcctttcctttccttctgttttattctattctatccctttacaacttgattcgatatgtgttctagcagctctcttctttatacgagggtatacaaccggtgctgaagaaaagaaaagaacgagaacgagaaagagaaagagaaagagaaagagaaagagaaagagaaagagaaagagaaagagaaagagcgggaagacgggaaacgacgaacgcaacagaacgaggaaaggaaaagaagtaagaataaagaggatgagttgagaagtccaagaggaaaaaaaaagaagtcgttgatggtgatctcatcggtttccccctctctccttttttttttcctattccttctcctttttacattttacgttgattccttcgacttttcccttggattcttcacttgacatctctttacacgttcaagacacctactccgacgtgaaactctcgacacctggaacgtccagaccgagactaaccagaagaaactagcgagaccaaaacaaacggagataaaaacagattagacatgacgaaatcaaaatcaaccccggtcaccgtcctcaccggatttctaggcgcaggcaagacgacgatgatcctctcgatcttgaagcagctcaagccggattacaaggtgtgcttgttgaagaacgagtttggcgatgtcgagggttcgtctctgtctttttttttctttttgtttgtctttcttgagcttttgatgtattgtagaaagcccctggctgatcaggtttcccggtatttcgtttcgttgggggatactttacccgccgccgacgccgacgacgacacatcacaatcagtcgactcactcttgacggattctccttcaatttccggggtcgaagaggttcgtccgaccgtttcgccgcttgttccgcccaactgcctctcgccgtccttcgtcggcttgggatgaatgaatcgagagtcgccaaaatgctcatcatgggttctgctatccacacaaccccctctctcccccccttttaatctccttttcatttgttggacggatcgactcgaacggacaaaagatcctgaacgggtgcttgtgctgtgtcatggtcggtcagatgaagaatgctctgctcgagatcaaagagaaattcaaccctgttcgtcttctcgtctctttactaaactctccctgttattttctccaaagaagaaaagaccagcgttcatcttgagctgaccgtctctttcgtttcgcgtcgatgcggctctctcggaatccgtatatatacatatatacatatcaaaacaaaaaggaccggatcatcgtggagagctcgggttctgcgttccctgctacgttggcgtggcagattcgggagttagaaagagagactgccggtggcttaacgctcgatgctgttctcaccgtgatcgattgcagtcagtctcgttcttttcttctcttacttttttccctctcatgttgtttcgtcgagtctgttggtttgcgctttgagaaaccagctttgttgacgagatatcgagatttgtttcgcggttgatcgtttgggaatttttttatttatttcatcctcaaagtcaacttcacgggctacgaggatacgtcgcctacggccaaaatgcaaggtccgtctgtccatctggggttgaccctctgtattctctcgcgcgcacaaatctgacggtctcttttgtttgcttcctttccttgcttgcttgcttgcttgcttccttccttgcttccttccttccttcctttcgaaccgtcaaaaagcgaaatacacggacatcatcattcttaacaagtgggatcttgtcaacgataggcagctcgacaatgttctggatcatctttataccctcgtacgtttgtcctgtttcattcgtgtcgaacccgactaggaactctttctttatttctcacctaattcttttttttgtgaaacccccccgacaactcccctttcggcgcggcatccatcatcaaaacagaacgacgagacgcctaaacttcgacactctgaagccgacccacttacaccttccgtcctgtttggactagactcaaaactgttcctcgaacgagagaccgaagaagccgaattcaaagctgccggctggcaagaaggaaacagcagccataacgccgaggtcgagacgtttggagttttcagaggaggtgatcgatcggcttggcctaagcccaagtcgacgactggaaaagcgcacgttcattcggcagattcagggtgttgtgtcaagagcgagtcgtcagaggtaaaccaacctgagggggaagaagaagaagaagaagataaagctgatttgatcgattgggcaaccgtcaaggctttcttggataccctgccatcatcgatctacagagtcaaaggtctactgaacgtggtggctcccactgccgaaggggcttcctcggctaacatcactccgttctccgcccagccgttaccgccatcaaccgaatcctcaccggcagatcccacagagaccaccgcacaacgacaaccaacgacgacaacggggcgagggatttacatcctgaactgggctttcggccgttacaccctcacggcccttcctgcggcttccaagggcacatacaaaggcgtccaagccagattgacgttgatgggtgagcgaggggaggtgagaaagtgggcgagccggatgggagaggttgtccatggggtcttcctctagatgtgtttcaaggcttgacgttttatttttatactgtgtttcttttgtttcaatttgtcttcgttagatagataatatagattttcttttgtccacgagggggtcggttattgatagatgtgttgttattgtgtatgtattaagctgggtttgtggagaaactaccaggtgatcgaggagacgacggcgaggcaaggcaaggcaagaaggaacacagtctagagctcggtccaagaagcttgagggtcatccggatttttttcattcgtcttgtgctgagagacgaaggagagtgaagacgcggttggcagttccagtcctgccaagacagacgctagttgtcttgatgtccgaaggagaaaccatggatgagaacaagcgaaagacagataggaaaccccacgaaggctcacctctgttctcccgctctggtctctagcatcttgatgatctcctcgacctgatcctctcctacgtctcctcccggcagcgttctcgcgtactcaagagcatgatccagctgagattttatcgagccaacgatactcgcgatttctacattccttgcgtccgaccgggacgcgtcggctggatctttatactgggaggctgagatcaggtcgagcagcctagaaatagatggaaggattgagcgaggggattccaattgagaagacattatgaatatccggctgttcgtgcttcaagaggatggacggatgaatgtgtatgtgcagtcagatgggtgtatgcggtcaaaagagaaaaagatgagaataatatgaaatgtccctaatagaagactacaaacgtcctctaatacgagacgctgcgagcaaaacactacaaaacgtctgtaatgcaagactacaactctcatctagtcttctcgtactttctctcgaccggctttgttccatctctgtttagcgttcattctatttctctctttaccaccactcacaccataccagcacccacactcggctggctggctttcctttcttggattgctttccgttcttgttcttttcattttcccatcattgttcccttctctctgtggatctcttttctcttttgctctctcgcggcctttcttttctctttttgcttctcgacagatccagacacgtccaacgcttgccctgacaaaccataaaatcaggctttacctctcttcgattcgtcccttctggtttctttattcggccatccctctctcacttcataccccgggcttgataggtccaactgtatcacttctttcatccattctttgtctagatctctctttaaaatagcaatcgtcgcgtcatggtcgcctcatcccatccgacccaggcgaccacgttaccggatcctatcgtcaatccacacagagggttcaacttgtcccatcaaaaagtctcggtcgatgtctctcttgctcttggtgtcctctccggtatcactgagctgaccatcgtgcccacgtcgggtgacctccgaacgttgttcctgaacttccgtcaaggtcgcgtcaaacaagtctcagtctactcgtccgtcagaccaccggatgaccctctcgacttttcgtcaccaaccactgctgccgctgccaccgtcgcagagtttacccacaacgatcctctcgcctctctttcactctccaagcccacagacatccacacctttccagaggcgaagcgaaaggcctttgctgccttcgccgaaggtgagcagggtgagctcgcgatcaggcttaaaccgagtttgctcgaacgacaccgaagggatcctagtctgatgaccgaggatgaaaaaagggcggacgcaagacgggaacttgagaatctgtcggagaagaacggcatcctcatcattcagcctgctgggactaaggtggagaccataacgctccttgacttcgttcctttgatcgtcagaatcgagtgggaagtcgcgtgtggaggtgaaggtcttgcctggtttggtcgaggaggtgataacgattgggtgagctcatcttatatatatatatatatatatgtatttgggaggagttcggtcactttgacaatcgggcaccaggtctgactcttttttctttcttcggttgggatgcttccagcacgtaccgcatatatacaccacgccaaccacacctgatgctgctcgttgctggctgccgtgtgtagataatatgtgggaacgatgtacgtgggaactcgacttcatcgtgcctcgaagatgggtagatgatccatcgtacggaaagaagaaacggcagaaaggcaaagatcgggcgagaggcattcttgctggagacgaagagaggggcgaaggagaaggaagagcggttgtagttgcttgtagcggggatctggtggaacatgtgagtcttctgatcttgttcataccccgatatgatcctttgactctatcctgtttttgtctatgctaacatatgtctactaatctatttggctcctgaaggtctcccacccctccgtttcaacaaaatccatctttcgattcgttcaatcgattcccacgaccgtccagcatatcaccttcgccgttggtccttttgaagtactcacattacctccaacgccgaaccctccgcccacaaatgcgtcggccgccaacccttctgccactagcgccgcgaatcctccgtccccgctagccaacctggcctccatggacaacccaatacctgccgaggaagaagatatagagccagaagcagcagacgtccaggaagacgacccttcatcttcatctcaacccccgatgcacatcttcacgctacctggcacatcacatctgcttcaacattcgaccgcgttccttagaaaggcgatgagcttttactcggccgagtatggatcatatccgtactcatcctacaaccttgtgttcgtagacgagccgctcgaggtgtgcacttccggagcaggcatggcgattgccaacgtcgacttgttgtttccggaagatgtgatcgaccaggcttacgagaccagacatcttctcgcccacgcgctcgccttccaatgggtcgggatcaacatcatcccgaaaatgtggtcggacacctggctcatcaacggtctgggactatacatcactgggcagtttatgagaaagctactgggaaacaacgagtatcggtttaggctaaagatggatagagaccgttgcgcccggatggataacgggtctcagctcccaatctgtatgcccggttcaaccaccccaccggacgcaacgattcttcctttcctcaacttgaaatccgcccttgtgctgttcattctcgatcgtcgattaggtaaaacgggaacgtccctcggtctctcaagagtgatcccaaaaatctttctatcggccctgaccggcgagttgacgaacaacgtgctttctactcaagccttcttcagaatgtgtagaaagatcagtggagtggataccagagcgtttgcggaacagtgggtttggggaagtgggtctcctaggttcgacgtcacagcggtgttcaacaagaaaaagatgttggtcgagatgacggtcaggcaaaaggtgccggcaaaagatttcgagaaggacgatcttgtcagagaaagcttttggaaacccaccagagcgttcgaggttggtcgactttttgtcacttttctctcaaaacaagaaacagaaatcatctgaagtgtgctctgagaggagatggagtgaaaaaagctgatcaagagcttgttccattcttttcaatcacaaaaagggtcaaatgacggttcggattcacgaagccgacggcacgccctatgaacacgttcttgatatcagagaaggtttcaaaacgtacgatgttccattcaacacaaagtacaagcgagttcgacgaaacaccaagcgatatctcgctcgaaaagcggcagcagcagctgctgccgccggagatgccgatgccgctgaggcgatgggcatgctcgatcttggatttgatcttgcaatctgggaagatgaaaaagagagagaacgatggagggtagcggattggacggaggaggaagaaaacacgatggtcggagcaccttacgagtggatcaggttggacgcggattttgaatggatagccgaggttgtctttgatcaacccagtttttactgggttaatcaattgcagagagatcgagacgtcgtagctcaggttgaagtgcgttcttttcatcttttttttcctctcgtgggtcctgaataatcatcatctaaatcgaaattgtccttcttgtccaactctcgcatcaaggctatccacgcgctgaggaacaatccgacgcccgtcgtgactagtacgttgggtaaaactgtgcttgtgacaaattacttctatcgagtccgaatggaagccgccgacgctctgcaagttgtacgtcttcctcttgccaatctttttcctacatgaaagagggttgtttctcaatttcgttttcaaatcttatgacatacgctgcagccctcacataaagcgcctaagaacgatcaagatcatctcggtctgttcctcttgttcaaaatctttcagagcagatactgttatccaccactggatggcgaggaaccaatggatcatacggcgttcaggtgcattcccaagcctaacgacttttcagattttgcagaatattttgttcgcaaggttcgttgattcctgtggcttcatgttccatcttcaacaaatatagcctcgttcttgtaaaacttacgcatcattcttctacattccttcctttttcctcaaatgaaatcaaaaaaacttcttgtcaggcggtcctcattgcactctcaagatatgtacaaacaaggggttcgtccagagaagcgattagttggccagttgttcgacagttcttggtagatctattgaagtacaatgataactctatcaacaaggtcagcatatttgcagagaattctctcatgtcgtatcctactgatagcagtctgatggttttccgtctctgtcttatatgatgcgcgctcagtactcggacagctcttatgttgccaccatcattgcttgtctgggctactgtcttgtccttacagcttctgtcgaattgggcggagcttcaccagcagctgctgatttatcgaaaccagatcatcgaacaagtatattattgctcgaacaggcggcggaccaagtagatagatacatggagatggatagactggtgccttcatttcataacgtcgtcacattggctgggctggaggtttgttcgatatcttcgtattgtcaacttttctgatgttcagtctaacagtgtacgacaattcttctggctatctcaattcctttttcgctctccgctagtggaagatcaaggcaacattagcaaatctaattcctaatgatgttcgactgtttttggtctacacccggtgagttttttgcttggtgcggtccgttataaactgatacaagaactcgttgctaatctaacatttttttgaatttgataacacagagagggaaactatatccccgtacggttaacggcttttgattgccttcttctctgcctgggtcctgcgtccaaagcggaagttgctagttatatcttccgagtaatcactaaggatttatcccgtcttgtccgtcggcatgttgcttctgccttatcggaagcctttattatcgctctctccgttggtagcgtcaagttgtctcatacgccagtgatcgtacagaactcggccgaagcggatggaggtggaagtggagcagtaagtggagacggaggcccaggaggtggaataaaatcaaaagttcaggtggacgaggttgagtcttcgttaaaggctctgaagaaggagatcggtcggtcggctgtcatgagggagggcatcatgggagtaattgcgttagttcggtgttcaacttgaaacttgttctctctcctgatgccactgagactgaattgtgaatcttgttttgggaacggtattcaaccagttctcctgaagtcgattttgatgtccggtggtctatgattcaattagccgatatgctcgtccgtccggcagaagaaactatgcccaagctagtaattcatcttcaacccactcctgcggtggagccgaccactccgatgttgacgccgaggatcaagctcttcgctggaaacggcaagtcactttatcattttatgtactcaacaaaatgttgcgctcgacctgctagttcatgcattgacaaatcagctcttttttatcatcttcacgatttctagccccacctacacctgtccaagagaatatcgaatttgcctcagcgatcccaacaaacccgctcaaggtcgtcatccctcgtcaaggttcccaggagacaattaaagtgaagaagaagaaggaaaagccgaagcctgtgatcaaagcctgcaggtctggcctatccgagatggatttggtggcctgtcggtcgatgttacggaaattggttcgtcccgtttgatatagaagcgattttgtatttattcctgctaaccggtaagcggttgtcaaatttatgataggaaacgcacaaatcatcagcttactttcgtattcctgtggatcctgtacgagattctgcactagagtaggtcatagtctccgtttgacaggcattccaatcaatgtcgtgtttgttatcatatgctaacaagcaaattcgatttcgctggcctctagctacttcgccgtggtcaagaatccaatggacctctctacagtcaaggctaaacttgaagatgggcaatatccaaatcggttcgcttttgccacggatgttcggctcatcccttcgaattccatgcattacaatcaaccagggtcccacttgtacaagcttagcgaaaagttcgacgcatatttcgagaagcaatgggaaattttgaacagtgagtctcgaccgcttccaacggcctagattcagaaaagtgatcacgatgtgatgttgattaaagtaaaagctcaccttggttcatcgtctatcgcttcttcagatgttttgtctgccaacggagatggcggacctgtcgtacccgctgtacccacaccagcacccacgcctacggtcacggctgcgcctgtcacttcaaaggtatcgataaagaaggcatcgacgatcaatggtcagcctgtagcttccatgcctccccctcccctaccagcttcagtaacccttccgaaaagcactatgaccgccatcaccccccttcctcggccaatcatcaagcttaaaacaaacacgaccccccttgccacatcaactgatctgcctgccggtccgagtcctgcaatcccttctgtgccacctctggctgccacagcgggctccaacaatgcaccagttcctgtcgagggcaaccctcaatttgtcaatccccttgcga

SEQ ID NO: 39 - DNA, 29310 bp, Xanthophyllomyces dendrorhous
gaagagcacgaaacaaaaggtcaagatcatgacgccgtcatcgacgcctgggcctgtatccaaatcaacaccttctcttaaggtcaaggctgtggcgacgacaggagtagacgatttgctggatgaagagcttggtctcctaatgggtagttcgcctcctccggcgactcgcccatcgaacttgcctgtcacgatccaacggcctccttcgccaccttctgttacgactggaccacctttctcatcacaagccccgtcctctgtcaaaggcgtcaagttgacgtctgggaagatcaagctgaagagtgtggagagcccggcttcaattagtgtgaagccgaagttgaaggaacctgagatggcgaagatcaagttgaaggaacccgaggttgcaaagatcaagctaaaaacgcctgacgcgatagcatcgaacttgacctcgacatctgcacctacgccagaaacttccaaaaaactcaagatcaaggaagtgttgtcaacgacgagcatcccttcggccccggcatctagtttagaaccggccaagaaattcaagcttaaaagcaaaacttcagcaaatacttcgccggctcctgctccagatcccggtcttgttcatctcgcagaaagcttgtcaaaatcgcattcaagtcccgcgcctcggccctctttaccttcagcttcatccattccttctttctcgcagctcccgcctccgcctccgccacctccctcactgttactgccaccattgacaaattcacccggaatgttatcccctcttccacctccgccgctagctaaccaaccactgagtgggtcttttgattcgtcaagttcatacccacctgatcggccgatgggatcgatactcccaccagcaattccaaaggctaggccgagtccaacgttccacaaaaacaaggaccggattattgtaaagagagcaagaacgttgatccagtcggtcttgcgcgttccggctgctttcattttcgcccaaccagtcgatccagaaagagacggttgcccgacgtattatgatgagattaaacgtccgatggatttcgcaacgatggacaacaagctctcgaagggtaaatatgttacctggggtgattttggagctgatatcgagctgatcttcgcaaagtaaattacacacacccttctgaaaatgagtaggagggagaaaatgacgaacaattactgacttcgttcattcttttcattagttgtcgacaatttaatccgcctgggacgggccctaccgagtgggcggatttggtggaggaccatgtgcgaaaggtagaatggccccgagctacactgaaggagattttgccagaggagaaaaaagagttaagcgggatcatcagcaagctcattcgctggcatggaagtgaatggttcagagatcctgtaagcccttctgaattgactatacgactaatcaaataaagagatgaatgctgatcgtttcgtactcatcgttctcaattcttgggaactaggtggacgtggttgcgctcaacatcccagattatcccaatatcataacgcagcctcggtccttgtctgtgattaaacagaatgtccagtcgaatccgttatacaactacgacctattcgagacagacatgcatctggtgattgacaatgccaagaaatacaacggtccggattcagctgtgggtcaggcggcaacgaggttggagaattattggaggagtattgatagtgaaggaagtaagaagcgaaaggacgcgagtggaggatcctctgggggaggaggtcagatgaaaaaggtcaagcgctagtgcgttgtgttcttgtatgatgtatctttatacgatgaatgtactctgttaaatgagcagtgtatcatgtagaagttgcactgcactgtataaaccgagtcggattggctgctgcgcgttttgccggggccacctttcgcccatatgcgatctctcttttaccatctaacatccatcctggccatcttctatctctgtattctgtttttttttgtctcctctcccctctcctcttctcttccagatggcacccagattatcctcaggtgcgcattcaaatttgagtcgagtctggactagatctcggtcttccgatggggaaaagactatgaggaatttatcgtcgtgtgagttttgttttctcaactagtcagttgatttctcttctgtttgaaaaaattaagaaccattcgttgaagcctgtatccatggcaccattcctttccccaaactaggtctcacgatgaagtatccatcaagtgttttgtttggccaacgtcttctctccgaccattctaaaaggtcttcaacggccttcggttctaccaccatttcctataaaaccagcacccatttgccgatggtgagaacgactgctgcctccgactccctgcgcatacgttcttctcaaccatatcgaaccacttatcaaactagacaccaaggagtgctgatgaaaccgcgaacatacaagccagcttcatcatccacatctcatgttgcttttgtaacagcgacttctcaatcatcttcatctacatcttcgtcactgcaaaaagtccagatacaaagtcgacccggacgttcttccttttcctcttctaatcgattagatgcttcatcgaatacgcaatctctacccggtcaagtgtcaccctcttctaggtcttcaaaactaccgcttccccctccgcctcgaccatcgcctttaccttcaccttcacctcaatcaaaatctataaacacgactgtacctggtctattgggagtcgctcaattccaaccacttaattaccctagctcttctctttccacgctatcatcatcaatagattctcctaaatcttctactggccttcctgatggtatctcaccatcaacttcgtctcatcaagcatcatatgtggcctcctcggcaagtcaccccccaatagaatttcagcttttaaggcctctcccagtatcaagagaagcagaaaggaggaggaatggtccgaaacatctgcctactctgaaagcaagtcgaagaccatttgagagtacgcctctggagagagaaacgttgaaggataaggagaaggagaatcagacggatattggaaggcagtcggaagtggcaaagttaagaagtgaatggcaaaaatcacacctagacccaccatcgtcgctagatgacctaccctcggtcggttcgttcattttcttccatcatcagcttgaaacgcgcataacttgacgtcagatgagattcattgtgacctttcctcggcgggaattttccagatggatcgatcgagatggctcatgcaaaactatacattcaggccttgaaggatcaacaaactgatctttttaaaaggtttgttcatcatctttctttctctttgatcatctttcgtatgatactgaagcctattcgctacttgtgctggttttactggtttgattgaatctaaatggtcttccagatttaacgaaaaccgcgagttggtattgcgcgcgctgaacgggttaccagactcgtctatggatgacgccctaaacaagatttctggtcaaggtagataatttactcgaataattgagcaaccacatgcaagaacatcgtttctgccgtaagctgatagcatgttcggtcgcctaacatgatctaccgacttctcacgtctagacactcttcaagacccagtcaaactgctcgcacccgaaccaattcgcaagctatggttagcaaaaagcgaaaaggatgtaagagcagtgttaaagcaggtccagaatatatatcagtctggtcgggttcccgctttacctacattttatgaggacctatctggttcgtcaacaaaatgttcattcacactgaacagagttcagcaatactcatacttcatacggtgtttacgttcgtcttttaattctgtttaaaataaacagtcgcctgcaaacgtctcgaattatatcatctgttgggtgaagtcgttatgtcctcggataattacggtttagaacctgctccagcaaaatatctctcttctcttcgaggacttctaaagcatctaattgataaggaatcctcgatcctcgattcaacctcacctcccacgccgacggcatctggaatctcggaatccagggctttgccgttctctcgtccacgtgaccattcattagagccatcatccctccgattgaccattcctctgctcgaccaactatttgttcaactcccgttcgaccctgtcctctgcgcgctgtctcttaaagcgttgtctcttctatctcttacaacgtccaatgcttctcttcgatttgcttcccttcaagagtctctcctaacttcagatatcccctcttcatggacggtccggacgggtaaagatacatggtggagtggtctcagtccgggcgaaattaagttacattcccgttggttgttggaagcactagattcagtcaggtctttcgtacctccagagttggctttgttgtggaaagcggggataccaagccccggactcgattttcatcgtgctcggttgagagaagttttcctcttggtcgatcgagcaaaaccaaaaccttataccatcactttggagcgtttgaacaatgatgtcagcaatgacagtatcaccaacaacaaacacaaaggtcgacatcaacatcgatcatcatcccaagaggacaccatgtcggacctaggtctacccaaagctctcccacttgttcctcgactgattgaatctttcctcgattcacctctcgcatcacatcattctgatccgatcatcgttcttttttcactcgggatcaggatgaagatgattcctgacgaatcagcattgagagagatacactggacgatcagaaacttgcccaagttggcaaagtcttgggacaaggtaatcgcttcgaccagtcgtcagatagaaggggcagggtggatttcgaaacaagacagaattgtagctgaggcttgcttggggatggtcgaggaattgttgaatgaaaaggttgagctgtggcagaatgggctttcgctcaggaaaaatgaagtgggatagagaatacaatgagctcctttccagagatcaagacaacacattcgaaaagaaaaagagatagacaaacaaggaccactctttatcatcaacgttataatacatgtacatataataaagtaacataataatgacaacccttctttgacacctcgcctcttgtgacgatacaaagacaaaagggtcccagacaggccaataggaacaccagtcaaggagaatctaaagaaaggaacttcctgttggagggtctgctttcccccttctcctgtcttgtcatgatctctcatcctgagccgtcgaagctcttccccttcctgtttttccatttccttcccttcctccaccatgacgaacattttcttccctccatccaggactcgttgagcttcttgctctttctgatcttcttgcgtcggcctgtaacagctgttgctgttgttgatgttgtagctgttgatgataatgctgctgatgtatcgacgcacttcctccccctccatttcctccaaatccgcccgcaccagcacttacaggggcaactgaattatctttgatgaaactctcaccaatgactcttccgggtgaggaagagacgagcagataatgacctgcagaaagcccacgaagtgtagctgttgatgtttttctgcctcttgaagagggtctggtaagggtgatagcggccggtcctacagtctgattgtgaccaaatgtaggtgtgtgtgatcgtacatgggaggaaagaatggatggagaaggtgacgacggtctcgagtgaggaaagagagaagggtgataagatggagaaggtgatgaagggagggaaagaggtggatgcggagctgaagatgggaatgacggaggagaatacgatgatggagtgaggaggtagacacctaagaaagtgatcaaaagaccaaggatgaagatgattgaactgaaaaagaaccggaacacaattatgttttcaggtcccattcctcctagtttcgaacaacaggatcacaagagggagacaaaccggctcaatgaaacatcatcaaaatccctgaagagaatactagatccgacaatggccgaggttgagaacagacaaaactgtgttggcaccacaactttcgagtcaaacctctggagtgccttgttcaggtatctaaaaccgatgcaagaatcacatcaagtcgagagcaacaaccgatgagaaggacaagagcgcctctatccagtgaatgatttgaggaaaaaatataccttagttgaccgatgcatgtaacgatcaaaacagctaggattgggtagaaaatccatttcgaaaagacgtccagccagagagtactaagcagactcgaaacagctttggtcgataacactgtttgatcgatacgagatagtttgcctccttgatcagaagttgattcacagagaaatgttactgtcagaccagacatacctgtgaatcctccaaggagagcgcacaagccaacatctatcagaaggaaccgatcgtcccgccccatttctgaaaatacaatcaaacagcctacacctagggccctatagatcgaacttagttcagctcagtaggctgactccaaggtgactttagacgatgagataagagatcgtgaacgtacatgagccccgagtaggcaacgaagaacggttgtttgagtaatccgattaagacgtctggcgtcaataccgattgatcatctctcgaggccagcacaacgatggaggctccaatgatggccaagaagacaccttggatgtctgaactcctaaacgtctctcctacggtaccagaccgattcaaaaataaacagacaaagatagaagatcagcagcgcccaggatgaaagtcttgagaggttagaacgaacctaggataaaaggagcaaagacccaattggcgaccaaactaacagttcccaacggcgctaccacactcgctggtgcataagcatacgatagaaagttcccaaactcgcccaaggtcataagagacagtccggcccaccaaactttggatttaaagtaagacgggccatccttctcagaatatgttgatctcccctctaagatccaagggttgaaggtcgaatcatccccgttgtcttcttcctctacttcttgatcttcctcttcgttaaggtctaccagcgattcactgcaaacacctgttcttgtcgaggagagaagggaagtttgctcagtcggtacacagggatcaccaacgggtaaatccgaaggaaggggtaaaggggttgaggaggctgaagatatcttttcatgagctagtttctgaaggttgagagccagagagatcagaatatctgttatcgaacagaagagaaaatcaaatgaggtcgagaacagtctttataagtaacgacgattaaattcaaaagggaaggaggacactaactgcctgaaattgaaaagagtacaccgatgatagtcgcctgctgagtggcatccagagcaagcatccttcctcaaaagaatgtgcacaaaggaagataaactgaccaaaagaggtcgaacgagaaagaaggaaaagataaacaagcaggccggacggaggacgaaagatttatgacgatttaccctttccttacgcttattcactcgacccggaattcatgcagttacgatcaaacatcctcacatcttacagtcactttgccggtcatcgtgatgttggttacttggtttgactttgatggcaatctacattctgtattggttgctatgatggtatacaggaagtgaataccaattcaaaagaaaaaagatcccagagcagacaggaactagacaaagagtttttacaaagaagcaagaggaaaataggacaaaacagaagatatcatcgtacacgtcgtcaggaaatcgcatgcttttgggtggggtgagggaacagagaaaaacaaaaaaggaaatctattggaaagcgcctcgttctaggttcaacagagatgaaaacatgggaagatgaagattaagattcgaagttcgaaagatagtcaaaaatcgaaaggatggtgaagaattgataaaagagaaacagaaagagaacaagatgtctaaatgcaagatctagtagagggttgaacgaacgaagctaaggattaactttttaggaaaggcaatgcgtgcgaatattggggggaatggacgacacagacgaagagagaatagacaaatcagatggagagggacgcgaccgagaagaaacagtgagaagggcaaagatgaaaaattagaggcagccagggcgagatgattgttgaaaaagaatagtctacattcgattaccaccaagagtttcctcctccctgctgggggggaggtcctccgtaaccggaagcaggagctcgaggaggggcagcagcgaacccgctagaaggtgcccctccgaatccaccagatcgaggaggaggtcctccaaatcctccggaccgaggagcacccccgaaacctccaccggatcggacgtctcggttaccccctcggttgttccttcctcctccacttcggtatcctcctccaccgaaagaagactcgtgagcaatctcgttcaaccaggacgggatgtcctggttagcctcccgaagaagctcgataagctccctggcgattcccttatttcctcggttgaagaaagcggtggccactccggtgttaccggctcgaccagttcgaccgattcggtggacgtaatcatccacatccttaggcaaatcgtaagaaataacgtgagtgacgttgggaatatccaatcctcgggcggcaacagcagtggcaaccaagaaaggggttcgaccgctcttgaaggtgtgaagagcgtgctctcgctcccgctggcttcggtctccgtgaattgaggttgccatgagtcggtggtgacacaagaaatcgcaaagcatgtcggccatcttcttggtctcggtaaagatcaaggtcaatccaccagcgttggtggactcctcggcgtggaggatatcgagcaggaccgatcgcttgtcgggatcctcgacgtactcgacccgctgggtgatgttctccgaagtagatccaactcgtccgaccatgaggaagctagagtgaacaagtcaatgaggttcaacttatgtatcgtgaacacggccgcagatagaaagaaagatgactaacatgtactccttcaagaagtctttggcaaggaactggatctctcgagggaaggtagcactaaacataagagtctgtcggtcattgactccaggcatatcctcctgctggacgattcgcctgatttgggctgttaatagatgaaaacaataacacggccacagatacgttgagtcaaagatcgaaattaaggttcaacaaccccgaatagaaaaagaggaagacttacgttcgaaacccatatctaacattcgatcagcctcatcgagcacaaggtacttaacgttagccaacgagattcgtcccctctcaatcaggtcgaccaatcgaccgggagtagcgcttaacaagtcgcaacccctctcaatctgcctgagctgtcctccaatgtcggctcctccgtaaacgacggccggcttaacccaagatcggtagcagaacttcctagcctcctcatgaatctgagagactagctctcgagtgggagcaaggatgagggcagtagggtaagcctttcggcctcggtgtccattgaaggagtcaccagcgctgggaggagctcggggtccgttggtgaaggaagcggaaaggatagggaaaaggaaccctccagtctttccagaaccagtctgggcacaggccatcaaatctcgaccctgagccacgatgggaatggagtacttctggacgggggtaggagtagtgtagaaggcataaccgatgttctcgaggagaacagggtcaagaggggggttcgtaaactgggtgacggggtcggggacaccttgtccggtagcctccacagggattgactcgtacttgtcgaaattgattccggtgtgctgtttatcgtaaaaacagaaatatcgggaaaaatcaaacgaaaacgcgtaaacggatgtccatttcgactagttcgaacaattggtaaggagacgaccaacctggtgagtcttatcatcggcttctccgaaaagctccttctccaaccgagggtttcggggtccagggacatgcttgccatcccgccacgaaccatcgtttcggtttcctccgtatcctccacctcctccagagttactccatccacctccacctccacctcggctgtaggaaggtccgttgctgaatccgttcgatccagcgccagagaatgcggtggaagaactgatagagcaaagtgtgaaaggcacggcaggtgcgtaagcaaactcgccactagaaatgaaaaatgaagataagtgtaaacatgtctactaacggctggttgatttggggagggggaacggcagcaggtcgggaaggtgctccagaatttcgcatgtggggaggcacgtaggccggtctagtagggttgagtccgacagtgcctgatgtcaatgaagaaaaaatagcatgaacacgagttcagtacgatagtcaatcaagagaacaaactggttctcaaaagaaaaagaaaaagaaaaagaaaaatcctttttgcctcttctcaaaatggtcgccacacaaaaaaaaattccacccaacctcttgaggcaagaggtgaagggcagtacatgtatttgtgcgaacgaccagagaagagaggggcgtaaaggagacaggcaaaacactcttgaagacataccgaacttgttggtcagtccgttgacatcggcggaaccgttagaagttccgtttccgtttacatggttgttgctcattctatgtgtacgagaatgtgttctgggtatgtgcttaaagggtgagtgggtgagaagtggaaaaagagcagaaggaaaagaacatgaaaaaagaaaaaaaatgcgtggtggattgaatgagaaaatgcacgtggttacaaatcaagtaaccatcacgtgctagttctacacggataagagataacccatgttagaaaacgacgttttgagattgtcttcttgatgaacacaaggtctatgtatgcgttcatcagttggaagggttatgatgttattctcaatgcctatatgcgccaattattttgtcctgtgtctatcttctcccacaggactataatatcattaatagagctatcatcgtaaagctattgtgcaagaggaggtatgtgtctagctagcagccactttgatctgttttaaagacaacacaacttcacagaaaatcagacactgctaaaggaaagagttgaaatctcagaacaagatcaaacacgcaccgcttcaatgactaccgtcttgtcgccttctgaatcgagatagaacaaccaagtcgtttctgacttgtcctctagtctgaatgagtggaggacttgaatctcctcatacgcatctgagatatgaaggtgatctgccgaaggcagcgcaatagtattcaacggacgcgagacatcctagaatcgaacagaagccattgtatatgagctaataagcgttattgtctttcattcgcgaacagagtggagaaaagttgagggacaaacatttgaatctttaaagataagtagctggaaaggaagaatgtgaaaaaatcgacgacgaaagattagggtttctggagcttgaaccgtcagccacttttcgcgatcatgattaagattaccccaaaaggtacaggttcagaacaaagagagatatcagttcccagctagacgatacagacggaggaaatggagacaaaaagtactcacgccatcagccacgacacctccagatgatctggcgatcttgagctctttttggattctgttcaacgtttcgatctcctccgtttgtagcagagcatgttcattcctctttctctgttcttcgtctttcctgtgcctcctctcggcttcctcaattgcaagtgtacgctcccgagccgactttaatctattcgcagcttcttcttcccgacgagcctgtcataatccattccgaaacaccgttaaacaaggttgactacgaagcctcacacagctcagctcaggatatatgagacgtacgatttctatcctttgctgctcttgctccttgagccttcgtcgttctctgatctcatcctcctgtctagtccttctcgaactgggctcgacaagactctgggccctttcaatcaagtctcgatcaacttccctccgtcgttgttcttgatccatcaaccacccaccactcgtcccgcgtagcctaccaaaactatttcttctctccttctgtcgttcctcttccttcttcaccacctctcgatcctcatctaagtcagcctgagctcttaaccgatatttgtcaaacgtaacaaacgaatctctcagaataggtgactgagaggtgtagaatgttttttgggattgaccctcctggcgttcgctcgcttttttgggtgttgtcatcattgctgtcgcctccgccagcgaggatgatgcaggcgcagaggcactgcggttagatggggcctgaggaatagcggtagatgagaccgtcaacgatgtcggatatttgggtcgatcgtagtagcttatgggacgtatttcagtgggcgtattgtcaagaataatctcatgaacttgttgatcatgatcgtgatcatcgtggttttcaggagattgagtcataaaattcttcaacgaagaccagttttcgccttcgtcgtatgcatcttcataggtacacgagagcactgaatctgttgacgcgggatcctggttggaggaagtacgcattcctaggccaagacctgcgttttcagacggtcgattgagttgagtactcagtcttctgaggattgtctgatggaaagcgctctctatgggctgatcagaggtcgaggatgcggaagaggaaggaagaggaggaagagactggacggatgaaccaggcagaggacgatgtccgttggagaccgagcgtgttccattcttgtcagtaaccccgttagattgtgaggtctttgatccaactcgggtgtctgagaatatagggagatttaatgtttttgatacaccgtcctttggaggaacaggaggtggagttatggtgtcaaatacagagccactttgtccgtccaaactcggtgaacgttcgttggaagaggtactccttccttttcctttccgtcctaagattgatagatttgaaaacagtgggatggacggtcgagagaaccggactgatgatgaatgttctttgggagagctgggcggagattgaacagaagaatcggaagagtaacccttatgagaacttctcaacctggatactgggttatcgttttccttcgagacatcggcaggttgaactgctgatgatgatgatgatgttattgttggaggagaaagggctttgaccggaaggggaggtttggtttcgataggtttaggttgtgaggtatgactcggatcagataccttggtgctcagcagacttgtaacagggtcctggactcgttcctgtttctgagcttgaatggtattgactggtccggaggacgagccctgagaaactgggtgagcgttgtgtatattgatattagagaaattcgtcgatagcgggggcgcaaggtttgggtcccgagccagacgatcccgggtgatttctgaagaggaagaaaccatgaactctatatggtgaggctatcaagaacgaggttcaacccataccggttgaagccacgtcaataatcagtaccgaacgttttgctgggactcgcgaaaacaactcacatcaaatagatgacttccaactagtcgtccatggatggttgctcttgctcttttgacgccccttaggtgatacgaaatatcgttctgttcaaaaagagtcccgatgaacgtaaaacatgggaataaaagaacatacccgattgtctgtccgacataggtgatataggttatcatacgaccttctctgaacaacgcgtaagctacatcttgatcaactttgtctaagttagtttgaagatcaacgattcctcctgagcctgccttggtcaacacaagtttatctctttgagcagagtagctcagaataagcctattgtaaattgcttagaatatctaatcagctcagcggcattcgaggtgaatgacaggatcggaatgactcaccaactatgtagttttggtccataaaactcatccacagtttgaatgactaaaggatcagataggtctatcgacatcgtctttgttggtgttattcaatctatctgatgatattgaagatgaacgatcaatggggtatatgctctgagctctataattctcttgtctgttttgagaagatgttaatctgccaggaatgatcatcaaaggcttggggtatcatggggtgattatgatgtacatgggcagatttggggtggaagcttgtcagcctcaagcacagcttgaaaaaaataatacaatttggagttatgtccgaactttcaactttcctctttacgaaaactcactcttcaccttcgattatcactcaaataatggacgtctctcagcatttaaaagctcacaggttggtctattgggcgccttcaccgaccttaataagaacactaaactgaagttatgatccttcttcttcttttagccaggctgctatccgtgaagccgaggagagcactctccaggtggatgcaggtctcttggccgtatatgatccaacgcctatcaacgaggccgaatacaagtacgttgtatatctgaaccgaatcagatgaaaacacgaaaagagacttataacctactactctgtgtcaactcttctgctttcttctttcccctttccataaaaaagcatggacaaggaagcctatttgacttctcacgctttgccctccttgcaaacccttctgtccacactattctcccttcctacttctcgaacatcctccggtcctctcgccacacttcctccggttcagacaatgcttccacgagaaaagtctcttcccaagccgaagccgcctacgaagtgggagcgatttgccgccgagaagggaatttcccatcgaaacaaagacaagatggagtgggacgacgatcgacaagagtttgtcgcccgatggggacgaggaggtcttaacaagaaggtcgaggagcaatggatcaccgaggtcaaggtcgggcctgatggtaaggatatcgatccggcagtgacggccaaggccgaccgaaaggcccgaacggcaaagaacttgaggcaacaggagggaaatatccgagctgccgcaaagctggagaacaaaggaaagggaaagaagggtgtctctggtccagctcctatttcaatctcggagggccacgagttgggggccggaccggcgggacgagctggaaaagagcacaggaagcaggagttagaaaggagggtcatggtgaacaagctttctactgggagcatgggcaaggtatgtcgtcacgtcttgttgtgttggctcgtgtcacattgcgcccttccttttcaatcggttattcactcctgataccttgaatatgacaaccatcagtttgacaagaagcttgaaggagagcccaaagtcaaggggatcaagcgaaaggtgcgctctgctatcctctactctatatcacttcttgtgttattctttttcttgccgttgtttaatgcttgactgttgcttgctgaacatagtttgatccggtcacaatttccgccaaacatgagcacgattcttcgatgaacgttctttccaacactcttggtttaaacaccacctcaaaacgtgtccgagcggaggatgcgagcgagggtgttgtcaatgttaggaaggctattaggttcgagggaaagcgagaagctgcctccagaggtggtcgaggtggtcggggcggtcggggtggaggacgaggccgaggaagaaagtaaagactgttttgtttttggaaatgatacttatggatggactgtttgcttggtttgcttggcctcctgcatttccttgctgctgatgctctgtgatgtctataactctgtttcgttcgtatatctgtccgttacaccaagaagtaaccggagaggcaagacacaagaacgaagatcggcttgaatgtgcttacctaagcaggcttgtttgttgatctttctttcttcttggctttccgttttgaactttctcctctcgcaaggattgttggatcccgttctcctttctttactctagcctcgttttcgtctgtttctttcttctttgtccatcctttaggttttctctgattttaagcggagtagattggattttgtggtcctctgtttcaaacccgaagatgttctctctagtacccttcttggccgcactcgcgctgttccctacaaatgcattctccctccggatcccgctcgaacgagccgtccgaccatccgacctcggctcaccgttcgaaaatctaaaccaagctcataatgctcttgaagctcgctatgcccgtttcttggctcttgatggcgatgatacgcgacagtcgttggagcgtcgttggagagatcgagcacaagccaggagactcagacgaagacagattttgggagaggaggcgagcgatgatgaaagtctcgtcaaacgagcagatgcagagatttcgttgacgaacgtttattccgatgcgtgagtcttcttcttcagagttgacccgaaccgtactttccgaacaaatatctttcatctcctactcccgccctgccttctcatcaaaagtattttcagcctaatcgttaaatacctttacgtatgtttcaattgaaccagaacgtacattgcggccatccagattggaaccccttctcagacggtcaatgtcattgttgacactggatcgtccgatctgttcgttgcgagtacggaatgttcgggttgtacagactctgcctatgagtttgatgctgctaagagctcgtcccttcaaaagtaggttgttactcttgaaaacctcttaaactccgtctgggccaaatagatggtctgctctgagatgttccgtttattcagcgtgatcggattgaacattgatcggatattttgttttcgtcttcatttttattccgtccttcttcgtccgtgcgaaaactagatcgtctacgtctttctcgataagtaaggctctcacccccgacctttctttcctcgtcattcacgttccagaccatacgagcctgatcattgtactcttgactgaaaccaacgttgaatagcctacggctctggaagcgcgcagggtgttcttgcaacagattatgtctccatcgattcgttcaatgtctctcaaacatttggtatgttttacagattccatctcacttttcgcagttcattcgtctcgaagaaaatctgactctaaattttacataatctcatttctgtgcacgttggttttgtttgacaggcttggtgtcgaaaattggtaattctttgatcttcagtcctctctctggtatctggggattcggttttcagagtctatcccagtctggtgccatggtatgttctcctctattcttttttcttccatatagcaggatcttgccgcattttatctaaaccggatgtatgaataaatattcttcgcgatctgtgggtattgtaacaactcaaacagccttactggttaaatttggtcaactcgaaccgtctcacggacaccatcatgggatgctacctcaccagatcgagctccaatgccgtcacttctgacgggggagaatttactctaggatcgattgattcttcgcggtacacgggggacatcaattacatcaacatgccttctgttcgcctctcgcttatttgttgactcttctctccttttctatgactctgacgctttaactgaccatgtatctggggattttggttcaaatgtttaggggacgcaaagctactggatcgtagagatggactcaatcactgttggctcaaccaaggttgctctatccggcaagaaggttgcaatcgacactggtcagttccctcaacttattttctccttggcatgttgcacactaaacatccttgcctttatttcccgatttgtgatctcaacaaactcgataacatgttcataggaaccacgttgatcgtgggtccttcggccgacgtagctgccatctacgctcagatccccaactcccagtctggcactgggggtcaatatgcgttccgtacgtcgtactaagtttcttctacagccgttcttcttttgagctcagagctaatctgcttgataaattacaccttatctcgtcgtgtagcatgcaactcccaaacggtcgtctcgctcgtttttggagggatctcgtatggaatcgatactagagatcttaagagaggatcgtacggtggtagttcgacaatgtgtctagggtccatcgctgctacagatcttggatctagtgcgcctatgaattggatcgttggagatgtctttttgaagaacgtctatactgttttccgatattctcccgcctcagtcggttttgctgctctttctggatccagcaacgttgacttcgtttcgactgcgacagtcgccacatcttctgcccgtccgagctctacaacctcatcagctggaacagtatccgctccatcagcaacctcatcaaactctgcttcttcagttccaaaatctagcattggatcgtcaacatcttttatgcggacggttctgacaagctcatcgggcagctctttgggttcagccactgctacgcctctgagttcaacgacgatgaccactgaccagtctggatcgagcgccgctgtggtggtcgttactggtggaatcattaccgatcggctgcctgccgcttctgctatctcgtcaacgtcagcaacgagtgcatcggttggggtttcgacatcgagtggagagagatcaaagctggtggttgggttgaagatgtgggtgggggctgtagtaagtggagcattggtcaatttgtctgtcatctgagtcggtcagtcctctcttgaggtggaacttaacagccttgtgaagaacgacactttctcttgaccgtgatactcttgcttcttcttgctgtcttttctctcgccaaattctattctgttttcctgtcaatcgttcataacaattcttacaatctttactcgcaacgcatctatttcaacttatccatgtcgtcggcctctcctttcattcgtagaagtttttcttctcgcattagttgtcatattactgtctactgtccttttcttcttgtccatgttcctgtctagtctgtcattcttttcattatactatcaatcaacctgatcaatcaattccccttaccaactctcctcttcggccctaccggatgatatttcgttcgctctctgcaaagatggccatatctctctttctcttctttctgatcaggtcttctcgtcgagataggttgatgttctcccttcatatagatggactaaaccgattggcttttgtctaaacctctcttgtcaaatcttgtcaatctctgtcagacgatcaaacagacagtaaagaacaggtctaacttgagtttaggaaatgaagatgtctgccccaaaaggattgacagaggatacaaccgtcaaatgaaacacgcatgcatttctcgacatgtacatgacttcgtcttgcgtacttttcttcttatatacatatataatatcacacgactcgtcctgtatgaatagacaagtagagaacgggagaaagcaagatgaagcagattggaatgagacgatcaagctccgaaatccaacttgcgcgctacttttctctctcgttctccttgtcctaaactctgcccatccggtccacttggcggaacctttcgttttcgagctccagctccattatcattctcgctaccgtttccattaagctttcctcccttggggttttgtccttgtaattcaggatccattactctggccacttgaacggcaggtagtggtagctttgagggatgagtaggataaggttgagtctggaaatattgatgtgctagtgactagagaaggtccaagaatataagttcgcttttttccacccgatttagatgttcataagagaaagggaaaaaaaggaatcggagccgcacttgtctagcatccaatcgttgataaggatcataggccaacaaagattttattagatcgaccgcttcgggtgaggcggctgagaaatgaaggtgccagggttgcttaggtataaccggtaaaacaacataatctggcaaggtagtatggccctgtattacgaaacagcatgagaagaagaagaaaattgataataaacaatagttagtaatccggacttgagtcttcttgagattcttatgtgaactccgttagaagaggagatatgaaaatcgaacaaaccggccagtcagcttctgttgggcttcccatcgcttgccagatctttttgagctgttccaggtcggtctcgcctgcgaggaaagggacgcggagcatgagctcggcaaatatgcaaccgacagaccacatgtctaccgcgctagaatatgctcttgctccaaataatagttctggaggtcggtaccatctttcgatttggttgcatccaaatcaatatccaagaagaaataaagtgtgactgagtcagaggcaaagacggccacagaggtatacttggagaggaaattagaaaagtactaaccgagtgatgacctggcaggtcatttttccactgccatcagagaactctctagctagaccgaaatctgcaagcttgagcgtcccgtccgcgctgatcagcaagttatttggtttcaaatcctgtgcacataattcgattttgaggatgtcaatatcataccatcaccatcatcacctgggaagtgcgtaaaacaagcttatagacactcactcggtggagaaccccgttccgatggcagaactccaagcctcttagcatcatctgcatccagctcttgacatctcctggcataaagatcagggacttgttacggatgagatattcgaggtcggtcgtcaggaattctagcacgagatttaggtttttctttgatgggaacaccgagatcatctagtgtatgaattgagtgaaaacagcagttgaagacagctcgaagagagcaagagtaatgcgataagcatcatgggcaacaatcaaggacaaacctcgatcacattctcatgcttgagttctctgagaaacttgatttctctaatggccgacatatccagcccatctttaaactggccaatcttaatctttttgatagcgatctcccggcctgtcgctatttctttgcctgaatagttggatcacaagataaaagacaggcattcaaagtccggctctgatggtgatatgatgatggctggaataaagaagacatcatacgtacctcgaaaactagaggggagcggacggggatatatagaggtcagtttcgttgaggaacgagcggaacggtatatatagctcaaaccacactcacacactagcataggtaccctctcctacttttgccaacttgagaaagtccttagaagacatctgatgtgactgcgatgtgtgtgtgtgtatattcgagaggacctatatgggtatgaatgtatagtaacgactttcaaaagagccgtttatgcaagtcacgtgatagatattcattcaacccagatccgactggttagacatcgaaggaaaccaccgcgaagccggttctaatctcccttaaactcacacgatgtgctcttcttatcaaagtcgggtagagagatgacacatgcgaacctattggtgatctttcgtcagctctgtgctaagaaaaaaaaagaagaaaaaaaaaacagatctgatattctttcctcctgtcattcattctgttttgctcgaggtaaaaaggtcaggatttagtcatagtctttttacgttgctatttcgcatctcgcctccaacactgatgaatcttaagcagcagatgaccaagtattggttcttaattctcttgtcaaagtgtgtcgaccagtgggtcatcgggtattttatctgttgcgtctgtcttcgccgaccacaagtggttcgatgccgagacgcgtcgagtgtcgagcttctcctggacttgattcgagctagctatctttgtcttatccagtagttattatcgttatggcaaatggtgcatacaactgtcatacgtagaaaacagttgagtcattcgatagtggaaatcaggcaataagaatggagagcgcatattcggtgttcagtcgtcgttccgaaacttccctctggtgaccgagcttagtaggcaagaacggaaagactacgcgcgagcgtctcttgatcttaggaatgtttcaataactatggatttcataataaaatgctgaatcagatattttcatccgtacccgtggctcttgacatgtaatacagcctatgtagagacttttctcttgtgatacgtgtgggcattcattcaagacctaggtgaacacgcgacaaccaaattacctacaggcggtatgtgtggactaattatatgatgggctttatttatccgagttacataagccgcagaatactaaactcgacgcaaataattctctgaacaagcccgccaatcttcctcgacttctgctcgtccccctagatgacttctcacttgctcttgctttcgttcattcgtacttagaagtgaaattgcttttttgcagcactcttatgctacttctactaatcctgtagtggttgttgcaggccttggttttaactgtgggcccagcggtggtcgcatagagtaggaatctgcatagttttctgctgcagctgagttctgtgccgttgcattctatcggctctatttttaaatcttacgctcttcctgttcttatgatggatggtcgacttcattcatatctccgtgctttcgttcttttcgctttcttcttcgttccgaacaacaactctctccgtcgtgttttcactcctctcttggccaggctttaccgttggtctcgcgttcttcgtagattcttgaagaagtacaggttcgtggtttcactgcatttaaacatccgctctatctttatttttgacttgatcactcagaatttttcttgatcgatataccctggcctatcagatcacaagattctctatcgtttctcggtcagctcgacatgcgcttgcttggtttcaacgtcgcccccttcggtaacacttatgagctcgtaccgacatcacaggatgcttttccggtcccaaactcgtcaaagtcaacgacgcagctgaacttctcacgaacaccatggcttaccgctgcaagggttagatggacaatcggcgccatacccgccctttctctcttagcactcttagggtgtctagagaaccagtcgatcgccttgcccgcctcggctccgaatgagcagacacccattcagtttacagataactctgctgtgccagaagaccactggcacgcgaccgaataccttctcaatcatcctatcgttcaacttcctgcagataaggccgttcgatcatcaataccgattccttatcaggcacccagttcggcctgcctccttcatctctacactcttgcagatctcaccaaattcaaccctgcgctctgtccctgttcggaggttccttcaccgatagatgtggtagtcacattcgtcaatggttcggacccgttcttccgacgagcgtacgacaattcgatcactcatggagagaaagcccacgatgctcaaccggctatcaaacgatactcaaacatgggcgagatgaagtactcccttcggagtgtcggcagaaatctcgctggtcctaggctacaggcaggctgggtccgcggtctcggaggggactacaaagatgagagaatcgcagatgatcaaagactaggtcagatcccgacctggttgaattggaaaaatttgcaacagaaagcgcatatcgcaggtcaattgacttctcgagcggaagacggattggatcaaggtaggaagctcgcttggcactttcactcagagatttttctaggagatgaagaatggactaaagaagccctgccaaattttaactcgtgagtggcctcccgtctgctccgaacagccctgatcggcaagcgtagggcagaaagctcattaacattatcttcttatcaattcagattcgccatcgaatcacaaatatcgaacattccttcactcaacccaaacttcatcagcatgaacgacgacttctttattctccgccctctttccgcttcagactttcacaccgacctgttcggtccagttctcaggttacaggacaatttgaaggtgaccggaaagcaaaatgccagggtgggtgatcctggagaatggggaggactagaatggggagcgtatatccttggtgagtcgttggttctctctttgtttgttaaagcaacttatcaatctttaaatcacctttgtggaaactcaggtcggagacatccgaacaatggactagagtatctcaatcacttgccaaaaacgctgtcccaacctcatctacatgagcttagtctgacatttcctcaagcaataagtgacgcctcgaaacgaaaatttcgaaggcagaaaactggaggacctgacgtatgttctttcctccttgaaataaggtgtctttgttaacccagtatcacttttttcttggatgatcataacgggatgaaccagattgagatggccttcctccaaacacattacattcgacaacgatttcgtgaagcccttctatacgcatacgttgttgctcgccctacacgttccgacggatcttctatttggggtcggatcgagcgggacgaattaatcaaactaggagtggatggatggagtggtgtaattggagatttccagggaaagggcgaattgaacaaggacgtgttcaaatcgatcttgagcactgcaaaagaggagaccgccttgagtactgacttgttcttcggttcgtctgttccgttttcttctcttttctgtacctatatggactaaacgacaacaacaacaacaacaaacatctactgttttctggtttgaatttggtctggtcatcatggctttttctgtattcgcagtctccgcctctggactcccacccaatagttttggtcccaaaaccaaacgatcaatcgatctctccagttgcctcggtacatggtggtctaacagtgaagaggaaatcgactcggttgagatgttcaagcggttggcatttgagagggtagattgtggagatatgtgttcgttcagctcctccgttctcttttttaccgaagttgtctgggaagttaattattggcttatggactgcgcttgataaacacagtgatctcttctatattgtctctgtcagccgaacctggcctgacagatctccttcctcgacctgatacgttcttcaatccgtctggctcagaatccgaggctgagccgccgatctatcaagttcctcatttaccgctgacgcccacatgggaggaagctgactttacccttcctgcactctttccctcctggtcgggattagacccgagaggagtcgatctaatggattggacggtcaggattttgggccggtatcgattctctttaggtttgttttttctctcttccttgatttcctcaaatatgtttgtgcgcgcgtatatggattgttgactgacaacgaaggtgaaatttccgacgtctcttctctttcttctccataggacaaacaccttcttatttcaagtctatcacagataagagctctgtcccccgagttatgacacacatcaatcaacacccggacctggcgctcttggcgcttaatgatgatcttagggattcaacaacggataatgatcgggcattatatgtggcccagatcagaagctggggagaacagatgttccctggggaagaatggtgggagttttgaggaagttcaccaaggagaacgagagattgtttagagttttcttaagtttatctgcatgtagagattccacatatttgtatcggtataccatgtttagattgtttattaagagatagctacgatcagtgcgtgcttctttcgttccctagcgcgagaatgtgttcaggaaagaggaccaagttcaaagtatgggtatcatgatgtacaataatgataacagctacagaaacccaacgagaagggaaacataaacaatctggaatgatagagaggggagaaatagaaaagatgaatgaggctatgttttagacgatcaatcccatctgtcgttcctatccagagcagtgagctccttttcgagctcctcaacctctgatgccagtctctcagccttaccctttatcatggcaagctttctttcgtcggctgctgttggtcttgatctaggtttgggttttggctgactggactttgatgaggacgtagctcccgatgaggatgagttggacgctatttgagcgagcttaggaatcaggaggggttgggtaatggaaaaacagtcaagatcgtgaagcggttgtcaagactcgacacttattattcaaactagaaacccgtaagaaagaaaactccgaacttttcgcttctttaagacttctctgcgttcccaaacggccaaacctctttctgcccgactgatgagctcatcaatctgaggttccatctcgttcgccagtctttgtttctgagcctctacaaacggttctggaacgaaaaggtatctctatcaacgtttgtttagatgcccaggtagagagatcgatcagaaatgaacaaggagacacaagagagagttcagcaggctttcgcgcgtttcttgaagacatccgaactcaattatcatgaatggactcactctagaattctccatcacgtgagatagtcgaggaaagtctgagacggctgattgcagaatttgaatagacgttttctcctgttttagagaggatgtgtatccaagaatgaggtggtcagtatctcggttgcctgatgtgtttcggtatgatgtagtaatatttgtagaacgagaaaaccaacatgagctacacatgattcggtgactctaacacactcagaaaggaggtccagaaactggccacctgaggacatcgctgtggaacaggatcgagttggtttgtgggtagataataaacgataaacgaaagaacgacggatgctagagggcgtgtgttggaaagagggaaatgagaggatgttgttgatcagacgcgtttgacttttgacaattaaccatcgtccatcgttcagctcgacctgattccggaaagatggcatcccatacaaactccgttccttttactcccagaccatcatcctctgcatctaatcgctcgacccattcaagatttagagcgacgggtgctacattgagtactcgcgaggaaaacaaggtgattacatcctttctatcagcggactgaacacgcatcctatctgaacccgcgtacagtccgtgcgtgttgtcccttgctgatccatcgtttgtttctccttgttcatacttcttgaccattttatccatagatatctcacacattggcgtccatcagaaaacctgctcgtccgtcaacgctctcaaaccaactggaacatgctgatattccccaacaaccgttccttcgtccatcatcctcgtcttcttccgtcgcacccggctcaaccgtccggaacggattgatggctccgccgcctgtcccatcagctacctcgaggccaagatcagaaagacagtcgacaggctcatcatctggctcatccagaaggcctcttacgagcttgtcatcaatagagcgaactgtagatagaaagccggatgagaccggtcgaaaggagagtaggagggacgatatcaaacgatccgctagggatggcaaagagcgaggtacgtgtttctctccatttagacctcgctagctctgatccagacgagctcacgacttaccctgtaacctctgctctccatcatgtattcacgaagaacatgtctctcctctctcaacagccccttcgcctccagcggaatacatgccagagccttcaccttcacctcctgctgacagtgagaacttcccttttccttacacaacagggcgttcagcgtactgactctcttgttccgctctcatgggcatgtttctatctgtagcttttttagagaaaagtagccttttagggaagagtgaaccattagatattcaggaagcaatcgtcatgtgcgatttgatctctgtcctcaaggtgtgcattgatgtatattcgtgaatatgctgaccaaacgcgtagcttccactgacattttcgaaaatgtgttatggaaaatgaaaacaaaagggaatagaaggtcatctggtttcgtatgatcctgggtatgaccccttggacgaaggagaacgcataagaggccccggctgggtcatagatggtaatctaggtatgaacacaaatcccatgaataagcttcgtttcccagatcttatcatctcattaagataattcttgtcttgcttttcgttctccattgtttcagatcaaagttttgcatcggttcttagggagattcttcctatagcctcatactacatgggtgtcaaggccttcgtcgagtccaggtacgtttgatgtatctgtcttcactgatatatcagttaaatctcttaaacttacatatcgtgtgaatgcagatgctctgcgtcatgtgggaaagtgaatcacgctcttgggagaggaattcaggagctcttactagagtacctcctcctcttgactcagctgcaagatttactcgacacaacgccttcgctgaatttacggaccatgtactaccatcttcgaccgacaatacattcgctttcaattctccactcacttgccaatacgctttttcttgccgacgacgacgatgacgacgatgaagaggacgaagaggttgatgacgatgacgacgatgatggtgtgttgggagtaagaattaaggatatccagggactagtaggtgaaggacccaagatggggagaggtggtg

SEQ ID NO: 40 - DNA, 13854 bp, Xanthophyllomyces dendrorhous
gtggtgggctggtcatgggcggggaggtcctcgaattaatatgggagatacattggcaaagcgggtaggtagtctttcctttcggttctcttccttggtgccgcttgtctcaaattccttctgaatgaccttctgtctgacaatcatattgaacccttttgatgacgatatcgttggtttttcttcagagacccgatagcacaagatatttattcaaacttgttccttcatgcgtctcagccatacgccgagatgttggttgattggatctcgactggtcatctttcggacaagtctgaagaatttatggttaaagaggcgacgagtatcacgaaggagcagctcgacttggactttacagacgaatattgggaaagaagatataccgtccgtcccattcttctcatgtccccaaatgtccatccttattcaggccacgcaatctttctctaattatttcttcccctcttttctcgtttctgtgtatgggactatctagcttcgggatgggtcgacagcatcaaatatcttccgaggtggtcaacctccatcaactgctggaattcctcttcctcgccgaggaacagaatcgacgtcaaatcctcgtcttccaggtggagcctgtatacccaaatttttggaaccatggaagcacaagattttattggccggaaaatatctaaacgtgataagggaatgtggagcaagtgaacgacagggtcggccgtccgagtttagggcgggtggagggaggatgatcgacatgagggatgaattgtgagtcatctactggcctgcgctcctcaaatttagaatacgctgatattcctggttccctacagatttcaaagaaggattgaagacgcatatttctatgccaaccaaactttgctcaagatgctgatagaagaacaggatctcaagtctcatcttcggtacgttgtctaactgatattatagccttcgatgctcaacagaataatgaaacgtgtcgctaactccttctgatgttttcgatcaaacgaagttcgttgaagtaccacttcttcttgagtcagtcagcttggatgacccattttcttgatctctccctatctgaattcggaaaatcctccaagaatgcctcactcgtcaaactccagtcgctgctcgagttgactcttcggacttcaggtggacaggtcggtgaaacgcataaggataatgtccgggttgtcatggccggtcagaagttgcatgattttttgaacgcggtcgtaaatcagagtgcggagttaagtggagagaatggccgagttagaatgaactcggaaattgtaggaagcgtggcgccttctgggggcaggaaacaagaagaaaagaagagagagcttcttggtatgtaacattttagatttgtatcgtttcactcttaaagagcgctcttgactgacttcaaagttccaatctgatttgtttggatgatattgtgccgcgcttccagcgttcgaggcttttcaattggactataccgtcaagtttccactctcccttgcgatctctcgaaagacaattgctcgttaccaaattcttttccgatttcttctacaactccgacacgccgagctccagctgtctctgatgtggacggaacataccaccgatgactggcgtcgacgtacgaagctaacttctttcgaagcttggaaacggcgagtatttgccctccgcgcgagaatgctcgggtttgtacagaacctgtcggctttcttgagccacgaagtgctggaaccgaactggagaaacttggaggaaaagctgagcaaggtgactacggttgatcagatgttgaatgaccatgtggatttcttagatacgtgtttgaaagaatccgggttgacgaaggccgagcttatcgccgtaagtttttatctgttctctgtcttctttgtgcttcaacctgttttctcacaccgtcatgaatgacttcttgaaacgactaatgcgctcatctttgggtgaattttatggctactctttgccgaaatttcatctaggtcatcgccaagatcatagcactaatccagaacttctgccaccacgctaaagttctctctagctacgcccgaaatgccatggatgctatcgatcgagcgtcttcttctgagatactcatcaacgacgagaaatcgcaggaacgttcggatttattggaaaaatacgagagaaacttttcacatcagatctcggttcatatcgatcggatgacataccatgccgggtcggatagtcagtcttctctcctctctgtttatctccctgtctttgatattctctcagtcctttatgttctgagtgggtgaactgggtgtgctcatctgcgcgctgctcttcgcacgtctgtggttctcttcgattgatagatacggctctggatccacttgtcgctcggctcaaaggaaacctccgacccaagacgagtctctcgaattgagaagcgcgtctacatccaagcttctttcacatcccggatctttcaaactgcgctgtgtatgttatcctctggtctctccaatttgtatttgtatgccctcatcatttgcctttcttttctctcctcctatctctggttccttgtgtttgatacgtacttgcttgaagttatttaagactcaactacaaaccatatatagatatgtatagtaataatgatgatagcgaattcaacacaaagaagcgaggagaggaagaagaaaagctaacaagtgagacgaacaagtgcaaaaactggagcaggttgtagaaagaggagaatgcacaaagccaaatttacagacttataataggaggaataccacaacggtatttggagtctaacgagaaatcggaatgaaataagagaacacttgtttcaggtacgtccttttctttatcatctctttgagtattcggtgtctaacagaggttcacattcgcatgtctttgcggataaaccttgatggtagtacccaaagtcacatcgcgcctcaacctcgtttttttcgaagaacatcgcggtcgtcatgtgtcgtaagggagagtcacctatatggttcaacagccagtaaagagcgaaagaaatccggtggtgagctttacattaggaaggcggcctgttaagagaaatagacgaaggagagtagatggtacttaccccatcggtattggaaaaacccgagagggtacgcggcgattgctcggatccattcttgtatgtcgtcccgaagaaacgaagggacgtgggcaacttcgtaactgaaagaacgagtttttccaagacgatgagtccatacttctatcacatgatttaaaaaaacaggaacccaaaacaatcaagatgttaaggtgtgaggattcacttattataccagccaagagcgcctctctcgtcttttccttcgaacgtcggagcaggaagaagcccgttccgttcggcgatctgaagtgcctttgggtggtggcttgcaaattcctctgtaaagttccacatgccaagaacgacgtatcccggatcatttccgatggaccggctcgaatagagaagcttctttgcttgcattctaagaaaaggatctgcacattgaggagtagtgaaaaaagaatcggtgtcgaatctcactgggttttcaacaagagcggttcattaaatttgatcgatgcataggcgtcaagaaggacagatatagaactgggacgaactatagtaatcgagatctctaatccgaggatgattgaatatctcgaccgcaaagaaatggcacatagcatgataacctattacaatatatgggatacaaaatcggttgtaagtttcaagacaaaaacgaagacaagagatcctgaacattcaccaggccatcggtttttgtcaaccacctctttggtttcatctgacagcaagtctttaaattcctccggtgcattcatattaatcgccaggaattcgaattgttcgccgaaagcctccatcttcttagccagtatgattctattaaaatattcctcgttctcgccgttatccatctctgccgtctgtcgaagcgcgagtattctgtcgttccatctgtgtaggaacgccttcttcgcggcgaatgagttgtaatcaccttcgtgaatgaggacggtcggataaacttgggagaacgggatgtagcgcatgatcgactcgagcgcggcgagtaaatctgtacccttctcaacggaggtcagacagataatagcggcgcgaacaggaggatgagatatcgggttaattgcatggatagcagatgacaagatgctttctgtgaaaaggaaaggaggaggagagaagagagaaaggacgcaaaatcaaagtaagttgaagaacgcatgagaacccatccatctgatcaaacgtagcagtcgtactcgatttagcccccatccgatgaatctcttgaacacggctcatatctgatagatcgtgagctcccgacccaagaacccagtgagtgttcaacccagcctctttgatggtggaaggtgaagagaatgaattgtcttgagtgagccatgttccatcatcacctgttgtctgggcggtcaagccccctataaggcaaaggagggcggcgccaatgataccgaggagcagagatactccacgaatgggatgaatcttgagcatcttgagtgtcttgagagcctgatgaggactgatggacaaaaagggggatcaaagtgagattgagatgaacccgagtaattagaacgtagaggagactgagaagggcgaacacaagaacatccttccttcatcttgccctcggtctttgtcttttcaaggatggtctaagatgcaagctcgaggagggataccaagacgagactgagtgtatgcgtcgaccatacattgctcgtgcgtcggttgtgcatgaacgaattcatgatcgtgtcgcgcttgcaactaccgataagattgtggatgtatttttcgtatttaactgaatataccgtgagttgtctcaccctaccacagatcagaacgggaacgaagtcccttcgaaattaaccgctcatcgaacagcttacattcattcaactctaagtcacatgctcatcatagctcataagcccctgtcgacccactgaaaatcgggtgaagaagaaacggacaagaacgaaagagatacagtgtaggaaggacaaatagacagagaaagagagagaaagagaagcaacagagccgatcagtatatcatcaagagaaatcccgtttttttttcttcacaatagtcattaggcgatatagaaaatcgttcccttaccgaattaagtcgatgagcgtcgtgttgttcagagggatgtactggctcgtcatcagcttgatcgcttcctgagccaccacacctccaacgaacgccgccgttgttggaatatccgactggccggatcgagccctgtatagtttcaaaatttccatttacacgatcccatgaagtaccaagagaccatcagtaccaacagaaattgtgttttgcgtcgattgtgagatcccatcacttacatctctcctaaagcatctttcacgctttttggcaaacctcctttctctcttgtttcgacttggcccattccatcctcctcctctttctctgaagcctcctcttcctccttccacccacgctctcccagaaacttggccgcgatccgttcaaggacgatcgtatcagcctgataatcagcatccatcggtgtaccaggataccgaccgtgggtctgatgaaagacatctgcacatcggaatgctatgtactgaactatcggtggcggaacataaggtatttgccaggttggatcaggagagaacgataggatcgtttcttcgttaaaccctttttccttccgctcctgctccaggcttctccctctaatgaccttcaagaacgctgcgtgcttcacaaaatcctcaacctcatcctcacctaccgcatcctcgtccagtcctatctcaagcaggactttggataaacatccttgaaaggccactacgtcctcctttgcttttgtcttgtagactgtctggagggccacataagactgggtgtctgacttcatatccggaagaaaggaggacgtagggagaagaccgtcccctccaccttcggatagaggtaggcgaacgaatgagcgaagtgcacgaatgagcaaccaaaagttcttggactgccaaagaacagaccaaagagctcagtcagtatataagatacacgtttaaagtcatgtctcgaaagagattggctcacattctttgtcacattttcacaagacggatcctcaaacaattccagaatctcggaaggtatctacaaaacatcgtcaaatagaccggagactatcagacttctgatacaccgacacgttcaacttggtaaaagacgaacctttgtagtttgagtggcgaggaaacccttctcctgagcttcggcaaagttctcctcatccccgtgccttctctgttgatcaatcagagtcaaaaactctttcttctggctctgtttgccggaccacttgggtggctgtccatcgtgctacatgggtagaaaggatttcaatagctgtcagctcgacgccaacttgatgcttcctttcagggacaaacagtacggtcgagtctaagcaaagactcactgtcctcttccattcttcgagcgcgcggatcaagatgatgacgaaaggtatgttcccatgttgcattgagtccatggattcaaagtctaagctgttggcatgttcaagcaaggccggaaaggggttgtcgattcgaagagaagttagagacgcagggtgtgtatcaacgactggattgtagagtcaagtacccagtagtgagcagtcagatgaagcaaagtagataatttggacaaatgtggtgaatagcatattcgagaagaatagatgctttacaaactggtatgctctctgatctgaactcggacggatcccatgaacccagccgaccgaacaaggataagaggaatgtctgggtgagcacccaaggaagtagctgtagatgaggaagggtcactggctgatgtacacaaacaataatcagatatcaccagtcaacatttgtataggcgcgacagcactaatcggttggcttaccggaccaaagcaaggatgacagcgcttcttcgtctgatgcaggtaagttgacagcgatgatcaatgtaaatccaaggaaataattaggatcctctttaagaagagtttggacgtcctgtggtgacgaatacgcgcagtagatgtgagactcatgatgtccgatcgcgacagagcaaggtcatcaagtagtgtccgttaacttactcctactttcccaaccccagtcacactctgattaagttccccaacgaaccggacggtttctgaagcaaggggtcgtccaatggattctggcataaggaagaaattctgtccaatatcctgtggggtcacatcccgattggaaagagtttcgaaacagccgattcctatttgtaagagagaatgaacgcgctgctgggtcaatggttaattcatagattggtcgagacacacatgaagatacgagacgccaagcattgtattcaaagttctcaccgggtaagacgaggtttttgagtgattggcaaccagtggctataggattaataagcagtactctagcggactctaatcctccttgaccagaggctccccatagtctgatcatcgccggttcaagatagattctcatgagtcaggatttactcgacattgagttcaagaagaaatatagctaattcaagcttaagaaaaagcgcctcaacacgtacctgagttgcctatcgtatctacgagtctttgcatcaggccgaatgatcccttcagaccttcgatgaaagaaaggctggatatgagtttcaaatgacgaatagataaatctgactcggaccgatcggtgataggatcggagagcttactgggaggacacagaagggacgaaggtttccgccgctggaacggatatgtgatcttgcatttgaatagcacaaatatggcagagaacaaataatgggttgggtggcccagaaagaaagattgtctatagatgagcaagatgagatggatggcagagacggagagggaagaacgaggagaccgtggaagcgactgctgtgcttgctattagatcagacacgtgattttgacgtgttagatgtaaccctaacatctctgtggtgtaatctaacttgctcttctttgtgtttctccgacatgaaatgctccgaagactccttgaccatcttgtttgtgtcttctgactgtcagatgggtctcgcatgtcgctcggtttgaaaacttcggcacaacaaatatcaaacgttgaattcagtatccattggtgctcacaaatagcagaacaaatctccatctcagctcgctgtcacgatagtttggctgctgattcgactccttccgagtggccttctactacattcacacttcagagctgacgacgtataatccatgcaagcgaccaagatgcattctcataggcgatctagtcaaagacggcacgcatgatgacgcgaagatatgaggatgtcaaatgtagatgtagatgtgaatgtgaagatcaaagctgctataagactgatcgtagacgcgtatgcatgcagtatgaaagagaacgaagcataagatcagttatctaacagagcatacaaacaaagtgtgctcttacgatcatcatcgctgtggaggacagttgagcttaaccttctatctctcctcagatgtcttgcacttttcttgactctttcagcctaaaaccatatctagagattgtatatagacatacatagacgccctttgtatggggtttcaatccgaacactcaaaacaaacggataggactctcctgtctgatcgtgattttacatacatgccgtattctgtacttctcgggtatatgacctcaaatctctaccgcgatacatctcagctattgccatgtttcccgtagacgatgcacaagaaagctatcatgtctgtcgacacagacatctgccacagtgactacacaacagatgtcatctagatggtcacgcttgctttaagcaagattccacaaacgtgtctacacgatctctataactagtgtaatttatttatcagcatacaaagagaccatagggcgtcccgttttcactataggagcgttattgagtcagacaatttgttgacttcctctgagttggctccaattgaacaaggacgatgtattttctaacagaaatgaaccctctatctagagccatacttgtgatcaaacgtacacttgcactttcgtatgtgggtgcgcgtgtgcatgcatctgttctgaacgggatgggcgatattcataaggatgcctaagaggcaaatagacgaagcgactaggaaatcgactgcgacccaatacaaaagacaatagaattagaatgcttcgattttcctaatgcatctcgactgtttcctaatgggcagactagaaagaatgaaatttactagacatctgaccacaaaagtcaggtcatttttcgagaaaaaagtcagacaccccaaaccgccgggtcttctctaggcacacaacgagagcctttgagccttttttttacctccttatcctcaagtcaagtagtcattcaaggttagtatgcccgtccagaatacgatagatatgacaccagtagcacctccggataccgtgtgagagatacgaaccacaaatcagagaagcacacacacgcatttggggccgtttttggggaggaggaatccattcatttatcgacaaaaatctactctgggaaacgtttaaggtggaattcaaggatgggtgtttttgatgatctggtgcccgagtcgaggttctggatggagtagagagaggacatgcagatagatagggatgattcggagggagcgtgtgtgtgtgcctccatatctacttgtgtttcagaatcgggctctagaggtgctccagaaggtctgtcgtgtccgttcaaaaggtctaaagagctgactttcagttctttgttgcctacactcctcaaaaaactccgtccttttaaaccctaccaattcaccaatcttgcccgacgactcccaaaccattttcccataacgttctattgcctcattgtcaatcaattacgacaatccgtacacgattccttctgaaactccgatctctgccaccacttctttttaaaacaactagatgaaggtcgagatctgctctttctccggttacaagatctacccctcccggggacgtctctacgttcgaagtgactccaaggttcgtcaacctaatcagctgttcttggtagccgacagcttgatggggaaatgaatgaagtctgatcaagaagcatatttttcctccttttacccgcgatttctgtacctcttcccctccgaattcgcaacactgggcatccatatgactaccacaaaaccacaaccaatctcaatcaacttctttatcctcttatcaacacttttgacttccctgccaacccctcatattcgcacttcttcaacaacaggtcttccggttccttaaccagaagtccgagtcccttttcctccagcgaaagaacccccgaaagatcgcctggacccaggtctaccgacgaatgcacaagaagggaatcactgaggaggtcgccaagaagcgaagccgaaagaacgtcaaggcccaggtgggtactcttttgtttttgggtttgagccggagcgagtagaagaggtgcacgaattggttcagctcatcatattttcttgttctccatcctttgccttgattcaatgtgatatatctgatttgggttatcgacttggaaatgaacgataatcgactacggttgtgtagcgaggaatcgttggtgccgacttggcttccatcctcgctaagcgaacccagaagcctgaggtccgaaacgccgcccgacaggctgccatcaccaaggccaagggagagaagaaggagaaggcttcccgacccaaggtacgtttgactttggagttcttatcttctataagcttgttgttttctgaccacctctcaactcggctatattctcttttttttcttttgggcctcattcactctccgatttttgattgtgtagaccgcttccaacgttcccaaggtcagcaagcagggcatgaagggaggagccaagccccagcgagtgtaaaaaccctctgaggatatgaaccctttcctacccaccctctaccgtcaccgggccgacccagacctgatgatgtcttgattacttccttgaggtttctccccacattaaaacattaaaacaaaacaaaaaaatctttttcttgaacgtttgctcatgatacatctccctatcatggctttcccatgatctgtgcacaccctatttcttcgtgacaagacacaaccagatgagctaacttgaggataccctctagggacacatgaatggaaagtgctaactgttcaacaatagatcaactttctcagaataaagtcgatcattctcttgtcccgaaaactaacgctagtcagttcttctcggctctccgctcgtgtttgcagtcgtcttagaacgattcacatcgccagcctcccctaccaccatcctcgaaacgagttgacggcgttcagccaaacacgccgcgagattctattacctcgtatatttttacctggtagctctaaccctaaccaacctctgtctaaaacgcatctaactaaatccaatgagcgacctaacctctagattgtctaacccgggtcagatgtacagacgtacttgaagaacagaggccaactatctcctttctctttccattcatgtattccctagaagctagaacgaatgtccaagatgtatttttatttgtttgtttgtgtgttcacgtaaaatgaaagaagaacgagagagaaccagggcgaggcaaaataaatagaaggaaaggggagagagcggcagaaagatgattaggaaaacacgatagtggtagaagagaaagaatcaggaacaagaaagacaaacaagagaggaactccggtttaaagagaaaaaaaacgagggtcgaacgaatgggttatgctacgtcatgcaagtacataagaagacagacaaggaaggaagaagcaagggctaaggagcaggagaggaatgtgaaatagggtatgaactgattccgtcagagcacagaggaggaacaaaaagtctttgaaacaagtgaaaaggagcaagtttagaaagtaagacgaaaaaggaggaaatttttacttcatgaaccaaatagacaaggatggaaacgacgaaggtaaaaggtagaatgacttgtttgttttcatcaatcaaagttgttgaactggtgcacaagtacaaagcgcacaggagcaaatgagcagccaagaatgtttatgtgaaaagtcggaaagatacctgtgtcagctcgctgtggtttcttgaatactcatcccagatcctccctcacagaaaatacttactctgagagataaggaactgtttctcgtccttcgatagcaagaaaaagcagtatgaacaagatgttagatcaagattgcctctagacagcggtgaagttctgaattaaatgacttgaaccttacattgaattgttcatctaaccaaaaggcaacagtatgcatcaaatacgaagatgcagacaacacatcagccaagaacgtcgttttatgatccgacacagaatgtggagcgcgtcatagaaagctcagaataaggcgaacgtatcaggaaagaggaacgaaccgtccttatcgttatggaaattcttcaagaaactgagtaatttgtccttgtttcgttgaaggatcaggacaattgggggtggtttgtttgggttagccacaaacacctactcggaggcatacaggcaggacaagataaagttgtttatcaattattcattcaaaaaacgatcctccatcatggccagtcagagatagtgatgattcagaagacgaaccttgaacacatggaacgcctcgaactgaatgtttttactcttgtccctcagtaggatcatcatcatcttgaggtttgcttcattagcaatgtacctcgtcatgactttgtaattcgccctatcgagcaggatttcgccaagtagcttaatcgactgacgcttggtaacataattggaggacaaaatcagggtggtatatgttgagaagaactagtgtttccatcacaaattttgtgttgtagttgtcattgagaggatccagagatgtagagggtcagcaagcatgactaggaggcgtcagatatatttgagtggataacaaacgcggtcataattcttgtccaagaatgaggctaccatcggtttgtgctttgtcaatagttcctatgagtcgaatgatcatatccccaaagaagaagagttcaaactatgttcgtggcaacgctaagccttgtgtgtaaaagacaaaatggaaggaggcttacctttagattccctaatacgtcacacgagattccgaaagtcgtgttttcgatgtaagacgggaacgtgtagaatctttgtttcgaccaagacaccacaagagaaatccaaagagacgggtttagacataatcaaccaactgcactggcgtccgcatacgagggaggagaacattcaactgactgttccgaatacagaagtatctgcgcaagtgattcatacttgagcatctctttgagcatcatccccgtgttgagcgcgacatcctcatttgagtatctagcgcaggtatgaaaggtagaggggatc

SEQ ID NO: 41 - DNA, 19275 bp, Xanthophyllomyces dendrorhous
aggtagaggggatcagcgaataattagagaagccaataggcaaagagtagagatcaaagcctgcagggcatgccaaaggattgcgaaaagacacaccctttgagcgtagcaaagatgatctgaggtttcttggatatatactcgaccgttggaaatcgagatccaatctgtctgcgaagcaaatgattgaagatttgagttacatccttcttggcctattttaatcaaaaagaaacaaagaaaagacggaactgtaagctcaagcgatgcaaaatccgaaggcgaaggacgctccgaaagagacgtaagaataaatcgagagcgccgagacagaccgacctcgaactcaaatacacctatacgttcgatcaagaggagcagaacatcggttgagtaggcttcctgagcgagctgagcgattccctctggcgatacgtcgttttctgtaagtacaatgcgaatgggtaagtgtgatcgattcccagttgctcacaacgaggcgtgtcgaaggtcaggaaaggaaggatggaggaacatgaagaagatgaagacgcacctgaatctccatatagacatgttttgatctgagccagtagtttcgagagttcttcgttggtctgatatgaaaggaacaaagaaagggagagatgtgcgagtagagagttgagaaacattcagtcttgacatgcttgtaacatggattcctcagatacagagccttaataatgccaccgtttgaaccttccaacgttgatcttgctcttcaaaggtgtatcaagaacagagaacgaaccttctttcttccatcatagctgcctgtgctaccgtccagccttccgccgggtgctacgaggtctctgaccgcccgaataagctcggttggtgactttggtctcttttgaaagaagttgatctttgtagaagaagatttcatataggaatgcgttgatatatgagtacgacgttgagtgtccgtttaggagagaataagggcaaaggcaaaacaggaaggtgagaggacgatggttgttgttttgaacgcgtcataggaaaagcaacatctttaacttcttcaccttcttttccttcttttccttgatctagacgacaacgacgactcgtagcaactgtcatggaggtcgcagacatgacgattgcagatgcatcggacatatctatgccatcagatacttcaactgaacgagattatagcactaatcatcgatcctcgttgactgactggatcatcccacctcttgtcattctttacatcgtgtgagttcttctgtcagatcgctttctcgcctgaacagttcgattcgataatttctcaatccctcaatctattgattacatacatccgaatactgtgttacttcattgaagaacggggtttgtgtatactactcggacagtctatcaacaataccttgtcgaccacctcaagctgatctccttcttgcctcgttcgtccctcatgtctgacaatgcgttcgactctgattgatgttagatcactcaaacgcttgattctgatccgattcatgctctgtctcgctcagagctctaccttgcttctatctgtatattccttccaatcatcttatgtctctatctatctctctatctgcttcctcagtaccattccgctccgccagccgtaccacctcagcaggtgcttgaccggtcgatcccttttgagtgcgcggatcgagagggaggttatccaagatgctggaaagatgaatgtaacggtagatggaagccaagcagagttagacattgtgggatttgtaaaagatgcagggtcggattcgatcattgttgtccttggtaagtctgtctctgtgatggaagaatgatatcagaagacatctcattcaccacggtcttctttgtttcctccctcttaaccaaaaggctggcgtgagtcttgatctttcggcctgtgaaaggaattaaaaagctcactgcatagaatattccatcattcttaggacatgtgtcactacttcgacctacctccctttcctcctctttctctctataacccctgtggccgtgttcttcctcctgcttcctcttgccaaaccgctgtttgctcacgcaagtgaagtctgggcgtttgcacgtgactccgaaggcccgattaccatgagatggttcaactggaaatggagttgggtcttgggaataggacccgtaggaagacttatggttggttttatatgggcttgctgggtttggaacaagaggccggtagaatcctgggagtcgggagggggacttttcttaagcttgattggagtgttggtcgctctgatcgctgttgtatgtctctcttctgccttcatccttgggtctgttgcgcatatttctaacaaaacattcctaatctgatgttgcgaaccaacaagggcctgttcatatccacctcactttcaatcaaccgcggtatatcacccatcgagtctcgcatttacctgaactaccgtcgtattgaccccaggttatacaatgccgctttccctccgtcacccccacctctaaccgaacgtcttgcgctcaactctgtttcttcacacaccctactgagcgtatcacgcgcagatccaagggtcctcatctggatccctcatccgacggtgaaagggagaggaaaagcggtctatacaagacctgatgaaaaaccttttgatctaggatggagagaaaattggaagacggtttggagggagggtataagggatggatttcgagtttggagcaggggtagtgttagtgacagtgccggtgccagtgtcgatgtgagctcgagtgggaatgaagcgagaaagaggggtctgattgcgttgaatgagaatgtgttgcataggctgaggtatgaagccagtttagctttcgatgaggaagatgaggaggaggaacaggctcagtatggaagtgacgatgaaggagatttggttgtgttgtaaacctggtatagatagtcaacactgtactatatagaatagaatgatgtgtaaagaagaggaaaagcaagatgacagcgtaaaacagaagaagcgtctaaaccagatgccctgagaaagagaggacgaaacgaagacgaaggcgaagataaaaataatatatgtaacaacagtcacatagtgagagttctgatgaggaaaacactgtaaatggcatttattcttccatatctctaaggggaagcaggtggggtttcaggaagagttggttctgacgaaatatccttcttcgactgacttccggtcgtgtcaacttctcggagttgacccgtttcgacctcactgaaagatacaaaagagaaaaagacattcgtaaaggatagattaagaacacagatggataggaagaaaggaaacattcgctcactagatccagccggtcacttcggttcttgaatcaaacatcgggttggttcttagccaatcaacatcccacttcacactttcctgcaacctagcctcatgctcatgtgtatgcgcatgtccctctggtgcttcggggaacggcaagaaggaggtcgaagatatttggaaaggtgcagttgaaggaagatggccggaggtcgattttgagagaagcttagctcgaagagatcgttcggtaaaggtcagagcggcgcaatctgatgatcaaacacatagaacgaaagaagagaaacatcagccggagagggcccatcggaatgagtccgagtatcgtaaacacgccgactaaccagtgtgttgaatctggattcccatccaatcattgatgcacagatgagtaaatcacacatcacacatcacttaagttcagtttgcttttcatcgcttagaaatatacagagtccaatcctcaatacagatcaaccgcagactcaccagcatcacttcgttcaatccgatctgggtctgggagataaccagacttcgaatagctgtagagtacaaatcaggagaaacaagactccatcagggttctgtatatccatttatagagtgaatggaaccagaaagagaaggagaaaacagtatgcaactcaccatcttgaattctccctccggcagttcggatgatgtgtacatcaccctcatcgacgcctagcatatcgaacacgttgatcctactgtccatacctgagaaaacaaaaacaaaacgaaccgtaacaagcctatatcaggactggaatctgaaaggagattagagaagagaaggaagacgtacatgtcactatggccgtcttaagagccagaccgagaggttttgctttagccttatcgaaccgagctacgtgctgggcgtttcgctgggaaaggagagtagcgatccggggtatgggagacatgattatcgtttcttctttctcgttcttctttcctttatgtgagtgttcttctggagaaggatcgttgccgttggagttattgatttgtttactacgaaaagaaagaaaaggagtcgaggagcagagagaaaattgaataaatcaccatcgtcggttggctcgctcttcgccggccaacagaaataaggagataagaaaattgggatgacgatctactcgactgtttacctttctttcttctcttccctaaagatgatttgccaatgaacttttttctttttctgaaccaattcttcatccaactatttcgcacttagcctagcaatcatcagatacatattcgatagatgtatggacggatgtgcgcgagagagcaagaacttttatgaatcaacgggcaagagagatgatgcaattaaaccggaaaaattaaagatgaaatcttgaccggtgatttcatatcggaccgaataaacattcctctattcatatttttttcaacactgttgttcctctggtttatcttcttcatcaagctttcagtgagtcatatcttgataggtccaaaaaggacgaccatcatcaatttctgagaatgccaccggcccgacagccacgattctgtgggatacaccagtctttttggttcaatcgatcagtgttccttactctcataccaggcggcaacagaccaaagactacatgttatgaccatacaagcagaaaacaaaaaagcacaacagggatataagaaggtgagaagaaaggaagaaagaaaaagaaagatagggaaagggaaagaggaagaagaagtgattgccgacgccatcgcattggcgccatttaatctatccaaaccccgtcaaactagcattttccctgtagtctccagatactgtcaagctgatgtagtatttagtaatgggttcggtaggattccggacgaagatgctcgattcccttgaagtctgttttacataacacatagaagaggtcaacattcgttccacacagctaattggattacaatcgagtataagactgaaagacttgaagcgtacaatcttgctcggtgttgtgaaatttgtggttggcgaagttgaaccttttgcaagacaacgagaaagatttagattaaactcttcaagataattgagaaagagttgatgagcaagagctatatgagaaggcttaccaggggaagacagctgaacatgcccatttccgaaccaccgattgacaagaaagaattcatcagccttgcaaacatctcttcatcacgaaacactaagaacacataccaagcctgccctgggagcgaacagattgcctcatagccacaccctgggcatattcgctcatctcggttgctccatatagcggaagacccttctctgctcgttccctcatctcggcgtaatccttagagacctccctagcattctcccatgttccccagaatcggtctatatttcaaagagagatgcacacatcccattcagcattctgagcaacacactctgttaaaggacgagacatacacgaggatcttgcgtaagcaattaagaaacctccaactagaccggtacacgcggtcaatctcatcactggtgcgagtccaaatttgttatgacttggctgccatttgtctaccggttcgacaaagaaaaagagcccacgcgtgtttggaagaggatgcaaacgaaaacaagatagtcagaatcctaatcccttagatgtaaccagatctgatcatctgagaaacacgcgatggtaacgaatagacaggaccgactcatgaggtaaacgtatccacaagagagacctgtacaaagaccgatagtaccgacgtctgctggtcgaaagtatctgacgaccctccagaaatgaggatcagaatcgatgagaggatactctgtgggctctgacttgatgggcatatcttctgattgatcgagtgcgagtatgtgatgctagagacctcccgaggtagtagtgatggatggttagcagacaacttctgaacaaccccccatctcccatctcttctgttggctgaaggggtttttgatatataaatttcatatatcagattacgcacttagataggtcagtttacctcgatccgttcatccatcctcgatttgttcatcctttctcgacctgaaacgacaagctccttataccccacacacaccatcccatccagttctattccttgtctttgtcaatcgacatggctagaccgtccgatcaaaacggaacaagaaacagattcccaacattggatgaggttcttctcagaaagacacgtcctccagtcgacttgttttgtttttacgtacgtgtttttcaactgtatatatcaaactccaactctctttctctcacgggctgaccgccgctcttcgtttgcaatcaccgattacacaacatagatatttctacaacgagaaggacaggaagatattttggacttttggctagacgtccatcaacacgagaatctgtgtcgagcttatttcaaggttagatttctccacgagtttcttcattttcgtcaacatagagttgtcactcaggtttgcaatttgtatacatcctcttcacaggacgtccgtaaatccggtcgtaacatcgctcaggaatggccccaatattggaatcgagcactccaacaggggtcttcttatgatgctgcagctggcattactccacatgcgcgacagtcgtacctccgttcctctgatccattcgccgatccacacgaacaacatcagcagaacagctccacaaatggtgtccatgataatccagccatggctcaagagtctaaggaagctcatcctgctccaattttctgtcgagagcgaagggataccgagacagacgtagcgggtgcttctgtcatgcgtaccgtcgatggaaaacggtcaccgtcgatcgggggcagcttccaaggagagaaagttggcctggtttctcctcaggctcaaggccaagctaaacgatcaagtggtggatcgattggcgggaaatggacgaatggtctgggatggggccaagggccggtcttgggaggagcaaaggagaagcgaaagagtcgtgcaccgaccgttatcccgaggaatagcgcgatcaccaagggcgagttgttgctgagtgcggagaggatatatgcaagataccttactcagggcggggaaaaggaaatatatttgccgtatgtcctgttttgctcttttttaaaattttaatttaattcatcagccagattcggcgcaaacatcttataacctgcttgtgttcggttgcctcattcttgttcccttgctccgcagaccatcacttcgaatccctcgatttcccttgcccggtcacctttcccacgtcgactcaaactcgttggatgtcgatgctgaagcactcgcgtctgttccggacatgtttgttagacaaaaggcctacactcacgccgtcctcgtccaggatgcctatcccagattcctccgtgccaaggcgtttggaaatttaacaccttttacttgcttcttccggctccttcttggattgctcatcacatggggagggctcacggccgccttttgctttgtgttcctcgatatccaacctaggagactgagattatctgtaagtacatctaaactctttcagacgatcaacctggccattgagggatcgcttacgtttgtttaatcaaatggtatcaattaaattgttatacaatacagctcctggtccccttctatatttcacttcaccttcttctttccgcactgtatgctctggatccgttaatggttcttttgttcaatcgatctgaaaccacaccattcagctatttatctatacaagagccctatgtccggaaattactccgcaaacgcagcattcttctggaaggtggcatcttgcttctcttactagccgggatcatgctttggtactgggttcctggtcataggctttagatttaaacgctaccgtggcgtttttatcggtctctttcgttttttgtttcttcttttctccgggtgttcccttctttcggtcttacctacgttcctcttatctctctctgatcaaaatcgtactcgtaattgctgctctccttcgtgtctcattccgctatgtctgctttgttacttctcttgatcagtccgatctccttgcttatcaacacaggtatatttctcgtccgacttacccacatagttaatatctaatttagtgattgctctgttcccttgtgctcagtttgtttcatttcagttgctcgatgcaacgctgtatctgacgagtaattgctcgagttggacgcgtagaatcaaggtttaatgagtcgcgcgggaaaaagaaaagaaataaaatcaatcaacaacgatttacaccatcaacattcctttgggtcatacatacatcatccttcattcagctggctctttgtgtatctgcccgtttccacaaactggagcaatctccagcccctcgtccgcttcttccagcatacatagcctggtatcagactaatggatcagatgtcccagcaatcaacagcatcctcccttcaacaactcatagacgacaacctacctctactccgatcgtttcattcgaaactagcactcaccccagatctacttgaccgagatgtccgtcggatagttgacgcttgcacaacggagtttgaagtgttgctgacggaaaaaagaaggatgttggatgatatgagaaataaagttgaacgtgctcgaagaggtatgtttcttgtgttctctactcgctctttctagatttagaaagtcaaaccgggtcaatgacgtctcactggacgcgacaaaatgcgctaccgacatagaatgtatcaaactgacgcgtctaaacgatgttctacagaatgtgtagctttaggtcgagctttaggaattccaatagaagtcagtagtatactgagcggagaagaagtaagctgcttttactctcgtccttgcgtaggccagtcggttctaggtctgtaactcagtgaaagattctcaacccgcgttgatcatgtctgcccttcaatgtgcttggtgtttcatagattctgcctcagcaattggcccgattggaaacataccgggacaagacgttgcttccagcttatgaagctcgattggtcgagatccgaggttcgtcctcatttattgtatatgtcccaacctttcttggctgaggagggataaacaagaacgtggttattctcacatctggctctttggattatcctatggacaaaacagttcaatccaaacgtttatctacattaacaaatctcctcccatcggaattcgctcttcgagctctccaacctactattccttctcgtccgccatccatccattctcgatcagtcccgcgcgctacccgtcaagcctcccctcgaccattagacggagaaacagctctaatcgacctttcgttgacgatgaatgaggcggataagacgaatttggaaaaggaagaagaaccaagatcgtgttgggaggatgtgagtgaggctagactgaacgagttacagctcttagtatcaaccggtgaaacagaacgcgtgagttattcttcagtctacgttcgtatctagcattataaattgaacaaaactcgcttatctccttaaaaaattgatctatcttataatcctgcgcgcattctctttcgttcaacgatcagtttcggttacttcgcgttcttcgccaagccttctatgatttatatgaactccttactattcttgaagtttccctaccactgccttaccctttgccctcggctcctacaacctcatcctccttaccgacgatttctccaagatcaccgttatcatctgtgataccaccgggtccctcggaaccgacagctgaggtccaacgttatctagaaatcgcagagaacttcatgagatgggctaatgagatgaacgaagggatggatgagctaggagagatgctagagaatgatgatgactcaaaaggatgggaaggaatggaaggggttgaacccgagaaagggatgctggcttgggtcgaacagtctattattcaggtcagtcttcggctctcctgtttctacagcctaaagattcaggctttaatcctgtatgctcattccaaaaaaccttctaaacctacttatcaggtacaagccggtaaagagtggaacgagtttgagattcaaaggctgtacgaccaactggagacactttgggttaagctaaacatctcaagagactttattgatacgttcatcgaggagaacagagggtcatctgctcggtgtttggaaggtgtacgttttttcctttgcgtatgatctcttgttcaaaccactttgaaactgattatattctctcgacatgaacttctcgatcgatgaatcaacggactgctagtacgcactcgagttggagagaaaccttcggcttaaggccgaacaaatggaagggcttgtgatagagactcgagcacagattcttgctgttcaagacgaactcatgatgactgaagagaacaagcagagttatgaatggttttgggacagtatgttttatctctgtgccaggcctccgcggttcttctataatggaaacccacatttgtgatttgactaacgcctattcttaaatcgattgtgtcacttatagcaaactatacggacgaactgttgtctgtgcacgaggaagagctcgctaagttgaaggacgagctggattctgttgcacctttaatggaaacttacaagcaatggcagagatactgtgatctagagaagaagttatccgtatgtcttttcttagagtttgccgtgatctgtttatgaatggtccagctaatctagaagatctgcgcttggttggctggtcttgtcatatctcaaaggacgcagaggcagatacgaaacgatatactcggaaaggattttcttcgttggaagaagaaaagctcaggaaatatgtgaaatcccatgcgaatgtgagttcctatgagttctcacatccaaattttgtgtatttctgtctcttcttttgatatctcctggaaccagttgactgaacgcgccgtttcatacccttcattcgacttcatgtccacgaatcagattgaacaaaacctgctcgaacttgcggctgagtgggaggaaaccaacggccgggcgtttactcttcaaggagaaagaattatctcaatcattcaagaaaaggcagaagcaaaagagctcgaaaaggagatgaagaaggtattactgaccattcaagtcatctgctaggcgtgacaagagttatatgcttatcgactacttggttcggttgtctttctttcagcgcgctcgacaaggaggcaatgtcgtttcaactcgttctcaaacaccagccgctcaacatcgcccacctccaccatcggcaagccgtcgtgtgatggctactccctctacttcccattatcccgggtcctcaatgtctactgtcaaaagaaaacacccacctccacctactccatcatccacccacccgaatggcaaactcgctcgaacaacgccccgcgttgcagggaatatatcccgtccagctggtcttaccgcttgttctttacctagacctggagggtttacgcgaccaacgccactctcgtcggttgcaggaaccagaagactcgttagcggtagcagcgcgaccagtagtagtagctggggaacgatggtcgattcgtgttcatccaacagactgaatagtcattcgctttcgctctcgtcttcggcttcatccacatcttcgactatgtgttccaaaggttactcgaggttaccatgtccaacaccttcaaaaattgggatggctccatcgtatggaagttcaataaagctgaagcagaacccgaggagacagagtttcaagccgagaccgtctgttggaggctctggtttgactggcgagttcctatgatctatcattttttctttgcatgttgtttttttgtcatattcttctgccttcctatgatgccaatctgttctcctcattctgttctcttgattgctatttggagcttgctatccaccctcattgtccattctcattcttgttctctagccacgctatgtctgtttgatttttccttctctcctcgttcttttctgcgtcttggtttgttcttcctcttcttcttgatacccgtctcgagatggccttccctccgggtttctttcattagctttcgctttgtctcgtcgtcctctttgttctaataaataggatttgctttgattacataagcaacaaccctccactttcatgccgtgagatgtaatgagactaccctcccgctcaccaccaccattccatacatcaggtcctgacctgcacaaactcattgagttcgacttgctgggagaattacttggacagcgtgatatcttggaagaagcatccagccaatccattggtccagcttaatcttcgcttacaatggaaattgctccccggaatcaactgacacaaaacccagagtttggtttggccgaggacgctccggccaaacctacatttgcttgtggcacgtgtgggaaattatactctaggttcgtgcattgcttcttgcgttgttcgttgtatgattctatcaatatgtgtgtacatagatcataagggtgctcaatactcaaccgttgattgggggtttattggtcttatgtatgtcttgtatgttggcatccaaatggatgttccaatcgaccagactggagtatgttaggcgtcacgaaagaaagcgttagtgattctatctttatcatctagctacaggaacgtcgcttggttgaccatgagaaaatcattatgtcactacaaccgaatcaacagaccaagactcgaagccgtttccgtgtacagaatgcacaaagtctttcgctcgaaggtgaatgttcattatatgagtatttctattcattgcatcttactgactatcatgcaccgtgatcctcacgatgttcttacagtgatgttctgcttcgacacaaacgacgatgtcatccgaacagcgaaacttctgtaatcgtagtgaactctaactcttggtcgaatgctatctcgactacatcacctcctgctctaacagcgccttcgcctcagacgttagagtaccttgcatcggttgcttcccaatcagagcatcaagaaactctctctcatccgcaacctgtatcaaattctagagatcagcgaagagaatctgctgctccatattctagacctagtctttctagcaattcgtcaacagacgcaattcatactcgacaatctgtatctgaacagagaagtgactctatcccgactcctaatctgtacggttcgaggtcttcacccgatgacaactcaactccctccaacccaataaacagctatccgtttgtatcggaatccattaatcaaagttccaagcctccttctcagtatcagcttccacctcatcaacctgagtatgtccagccagacgctttcaatgcgtcgaataccattccgttcggatcgttcacttctcctgacgtacgtttcaaggacggatccacaaactcacaattaacttcgacgctacctccgttccactcagaaggctctcttctttccaaagaatggggccaccctctattttctcctccattgttctctcccataggtcccctgacgaccgccacaaacggccccgttcctcctctgtctcagagattcttctcctctggacctgtcgccgaaggctttccattcccttctccgatttctccagaggcggtcgattggaaacccgtctcttctttccaactttgtccctctgaacaacagtccactcaatcgtctcttctgttcaactctacacctttcggtccgacaagtccagcaggtagtccttcattgaattccttcccgttgctgtatcctcagctcttcgagagctacctccagtcaaaccaatctagttcactccaccccgaagcaggattcctatttgaaggtctcttggactatcgaacatcacccggagagctcatatcttcaatagcaggacttcgagaggctagccctcgattgcaggagattgcaaatgagcagaaaaaacgagagcagctagaagagacaacattagaaccagaaaagaagcttttggctatcgacagcgagattagactgtcgaagtgtgggtcaggagagtctgcccttcagccgggagatcggtattatatttcgccaacaaagttctcccagtgttttggtggtacgttcttttctaatttttctcgcttgcaagatgctcggggaatacacaaggtctctggaatgatctgaccatatcgttgccgtgtgctgttcttctcttggggcgatcattcctgaatcaagtcgagcactggcagcttcctccattaaaaactatgacaaagattgctcgtcgaactatggttcaattagtacctcatatccctatgcttcaccgtccgacgtttgtcatctgtcaggttcccatctgcatcgccttctcggtctgtactattggaggccctcgaagagggccccagtttagcgacaataaccttcgaatgccgaacgggacttcccgggaggctgacaattggctttggccggtgttctgtaaggataggaaagaagatcggctaagcactaagtcgacaacagagacgccagggtttggtggggtattctgggagcaagagagcgcggatgcagattgttgggacggactaaaaagtgtggttcggagagacaagacgaacatgatggtcaaggtttgttttcttcataacgtccggcttccatttcaaatgaaaggctataccactctgtctaacgataccgccattcttcattgcatggtatcaacagtctttctgtcgatcgaccggtaatctatttaccgattataacattgggctggtccaagccttgtacgttacgccacatattttgagacgcttcgagaacatatagattgattcagatctcttatgtgtgattctcgtcataagaataatgtacaatgcccccgctgcgttgagtgattctttggtacagaggatggctgctcacatgaactttggatctttagccaacgtaagcctttctccttttacttgcttctgtgtctgtttggtgttcaaagaataagacccggctatgtgttgatcatgctgaaccatttccgtattctctgagacgtgttctacagattgctcgtcaggttgggatcttcgatgcttccaacggacaaaccaaaacgacgccaatatatgactgggaggatcgtagtgtagatttaagttggaagaagtgggtcaagtcagagggcatcaggaggttcgcttcaagttctttattctgtcttgctgtcgggttgagacattcgctgaccacttcgcttctctcaatgttactattttggggttcccctcttatagaaccgcttgggtgttatatattctcgattctatatgctcgattgagaccggttgccctcgactcgttgcttccgtcgacctatccgaattcccgcttccatcccctgattcaatctgggaagcacctacggcttccagctgggccgaagcatgttctaaattctcaaactctgaacacgttttcgaaaagcagatgagatcgatttacaacacgtccagtggctcagaacctgtctcggaaaatcattcggcaggtccgttctcctggcttatcgttattttgactctgacgagggagctcatagacctcggggagggcaaaccaagggacaaggcgtgtccgtggattggaaatgttggggacgatatactgaaagaagagatttccaaagcattagtaagggtatgtgtaatgctatgcgcgccatcataagccttttctttgctttattttaaatattttgatcttatgcgatagctgcaacttactttattatacgtttacagtgggaaacgagatggtggcccgacagtctatgtggtcctgcgccatctattttctatgaggatgagggcgaggatgtcgatcaccggcccaataacacaacgtatgatagctgcatagatctggatgattctccgtcggactccccatcatcgagtacaaatactagggacactacgagggagaggactggatcttcatcttttgacgggacttcgtgctcaaacccagggagctcggcggcttcatctgtgtcgagtaaaggaagtaggttaccgtatgcggatgtgttgttctgcagggatgctgtgagtctatttatctttcttgattgtgacaagtgagataatcagtgattcatgttcacggcttttctccaatcagctccccttcttctggttctgtaaaattctcttaggtgtactggacgaacatcaagcttctattgcttcagatgacggttcttggtttgttcctggattcaacgttttcaagtccagagagatcgattatcgggccgcattggagagcgctaggaagtttgtacgtgtccactccctcctgatcttctccttgctttgagtcaattcgctcatgactggccaactcgtcttatgcactcttctcggctcgaacaacaatatgaatgatagtcaaggaacgaagggggtgcactgtaacgcgtgatatacatatatgtgatttcgttcaattccctacaagcatcagattccacatccacccctcttctgtcttacctacttttttatgatttgtaaacatctaagctgtacctgtttcaattgttatctttgtctttctctattgtcaatcttatgtagatatagcgagagaaagataatgtatttgtatcttgcttgcgctattctttttcttctttcgatcaatctgtttcctcatcatcccaaccgtatctatatctgggtttaagaagcaaatttccatcatagtagtaaaggagaaggaaccgaaatgtaacttgtcttcctctttagatatctcgtatcatctcgacttgtcactatcatttccgacgatcgacacgacccttctgatgagccaattataggctcctatccttctgagtccgaaaaatatcatcaacagcatccccacaagcggcaacgaagagcttggaatgacgcctaagtatagtggttcaagagtgacaatcaactctggaatttgttgtgttgtgagatagatcgtggagatttttagatatattttggaagggtcagaagggctcattacaggaccagcgatagagagagttgttgatggctgggagaagagagatcagcaggcaactccagaaaggattaatatacgtgatagtcactgagagaaagaaggagaagagacgtactcgagcaagccaagagaccttcatcatacccttcgcttttcccgtttttccttctgataagataactgaatctaactccacccaaacgtctctagtctgttcctgctggttttgttggtcatgtccgaatggaatagtcttttttgatgaactggattccgttggttggaaacggacagactttttccaagaggaaattactaagtccgtagatgaaggaatcaaccccgttgtagacgagattttggaatcaaagtgaaaaggtaaagagaacgtcagaacttctgtatctgctctgactgagaggacagcacagagcagattcagaagtccaagagagatgaaacgtctcattggatagggtgtgttgctagacgatggggaagtgatgaatgatacagaagaaagtttacccaagaccgtcgtgagaccgtcttagacatcttcgaggattatttcaaagctcaaacttcaatgtcttattcatttcacgagcttgtctctcgcctggttctgatattgatgaaagccatattatctatgagcagacaagatcacagttattcagatagaagaaagaaggattcaggatacagagaactaagggggagattttggttttccatcgtacccaagccgagtctgactcatgagcccgacccggccaatcttttgtacggagaataagaggccaacctcaaggctaactctctatgttcttcttcgcaacgtgctttagaacgaaagaatcaagaaagtgacaagagcaaacatgagacgaaggtgagagtcgagataactatggctgactaagctaatgacgtatgatctctatccggtgccatcggtcgatgtctgttcccttgcgcgatggttaaatacggcaagcagcagataggacaggttttttcttcttccttctcttcccacatccatcttcactatctctcaattatcattcatgtttgcccagactattcgatcttcagtccgaacaacccggcttcctgtatgtatgctttttcgtgcgcgcgctcttaccttctctcatacgtcgtctggccctgtaatctgacccaaaattgctccatctccttgcctccaaaggctcagctcaggtcttatgctcaagctcccggacctcccaaagagcgtcagggagtctctcccatcctgattggcgctgtgggtgttgtcactcttggactcggctggacatactttctgaatcaggaaaaagccatcaaacagggtatctccgtctctggcagtgacccgaccaaggtttgtgttatgttttcgtctattcttctctgttactacgtcttgcttgaaggaggattactcacggtcgagttgctatctttcattggtaacctcagggtgttaaggaaggacaggaaagacaggcccgaggttgaaatttggagtcaagactgtataaaaccgaaagattgttaccatcacactgtattgaacgaaacatgtttttttttttttttt

SEQ ID NO: 42 - DNA, 17603 bp, Xanthophyllomyces dendrorhous
ttttttttttttttttccaaaatctgaaacggccctgacctgactggcgacgttatcattataaatctcacttctgagttgaactcctcgtccagatatgtaaggcttatatgttgattactgttcaaggaaaaagattgaaacttcgaagacatgaaggtaggatacaaaatagttttaagaaatctagacagaacccgttcttcatataattcatacaatagggaaagaaaacggcactagtgcgcttcacgtcctccgttcttcaaacaaatatcatgtatttctctgattctgtacttcttccttaccgaggaacctggttccaccggttgatcatatcctgcacactcttcttctcgctagttggttcttcctgattcgtttctactcgatacgaccggctcttcaccacatcaggagcgtttgctccacccgtgttctccggagtaacaggcttcagcgccttcttgagcggagcaacatgtgttcctgtcccatcgctgccaacagtagaggctgcagcacggctaatgttcgatagacgaacgaagctttgcgttgaagaaggttggactggagcagctgaaatggatccttcgattgattgtaccatcttatgagactgagacgatcttcgttgaggtacgggagcggcaatcgtcttcaactccttctccttcttgttctcgttttcgtacttcgatgaatcaggtagcatagagaccggtcgagaagaatctttagaggaggtaggtttcgaggagggtccagagttcgagttggacaacgaaggtgaagatacgtgccccttgttggccttcaaagaactagaatcaacgtacatcgattgaggtcgagttcggattcccaaccccgtccctctgtcatcacgatcagtaacggaacgagcagttgatcctctgaggaacgcagacgcagactccgagtcaattgtcggtaacttcctcggctgagccgagttgaaaccgtatggaacggaggatgatactcctctcgaactatacattgattttacatccgcctttaaactcgccgagccagatataggcttacttttgctatcattgctgccattgttaggaagggaagaagatgactgcttggccagagaatctaaagtggtcgatggttcccgtctagtaagcgaatcaggccgttcaatcacatcctcatttgacttttcttccttcttgaattttgcacgggccgcttcaagaggcgaccactgatcggacaaaatcgaagatgtctgagatggcgttgagagcgtcggaggtcggaaaggtttggttgtcgttgatacagggggcggcttaaaggcagcggatggagatatagacggaagggtttgaggttttggagacgttaccggtaagctaggcttctcaatcgtaggaatcggtgcgtatgaagaggaagtcgaggaaggccggttgaaagaagtcggtttaggagcgacgttgggtttgggtggtccattgtttggagggatggttggagaaacaagcaggctcggtgaaggactaacatcatctcctgtgagccaatcagtattctttttttgagaaaatgtctttcctccatctacaacgttgattttgttcttctgaagggttgattcttctacttcttttggaccattctttctctccttatctaggcctagttccgatgggttctccttctcgtttacacttccatctcccgttaggttggatagagccttcgctaccttcatgccgttgggatttaacccactctgcgatctcgatcctgacctagtctctcttggtccccctggctttgctctcgaaatgactgatccaacactcggaccggcagagtgatcctccgtgaatgctatcccagtaacctgagccgatctaatctgaggcggagcaagcactatcttcttatccccttcaaaggtcttttcaattccaccggtcaagtgcctaccactgtgaggtatgaagtcacctccaaatgaggagctgggcgatataggtccgggtgacgaggaaagaattacaggcagactctctcgcgaaggctgaagtagggagctggggaaactatactctcgagagttcaaaccagacttggtgacggaggaggcgatctcggagaaagaagagctggattgaatatctaaggattcaatactagggtatcgttcgtcgaacgaaggcgaggatgtgatatctcgagatatcagaggctgggttaccgcatccggcgatgccgcagcggcaggcgcgaaatttgtagaggacgacttgggctgttgtagttcatcgcttagcgagaacgactgggtggtagattgtctctgcttcgactgggggttcgatgccaactggatgggaatactttctatctttaaaccagcgtcgaacgagtcttcaaatccgtcgaacttttgatctactctcggctcctttttattctcttcgttactcgttcccgaagaatttcttggaggcaacggaggtggtgttccttccaattccggctcactccttataggagctgaaacaaacgtcgaagagaaggacgaggttggaacgaaagaggattttggtatggatgtagggatgcctgaagcctcagtaggcgttaaaggcccactaggttttgaatggctaggagcgctggtctttgctggagaagacacattatcaccccgtgtcggtcttccccgcctcataggagtgatattgagaccggctgaaggagcaggcgtagatgatgggacagatgaaatgacatcgtataagtttggttcatcgattttaggctgagagctcttaggttctttctggtgaagatatgatactccaattatcagtgagacgttcgaagcgaggaaagaaatgattgaataaacaaacatatgccaatagcgatctagtgcctcgtagcgcatgaacagtcttcagaagctgaacagcggatggcctttggatactgtgttcttggagcatggaacctgtgaaatcacaccagaagagaaacttggaagatcaataccgatgagggacgtcatgcaaaagaagaagtagttttccttaccaatcaacaagttcaactgatttgagtaaactgggaaggagggtatcctatattgtacattgagaatagctagaggaccctgtgcctcactgaagaataaaaaaattagttgagtgactgtaaatgccgttcctctgagtatgccagacgaaaataaacagaacatacaaaggagtggtgtaataagcaagtttgtacaacaaaattccaagcgcccagatgtctatcaaccataggatcagacttgagggtcagtgtctcttatcaagatataacgcttcctgttttcttttttcttgtctctttttcgcacgtaaggcgcgaggaagagcctcatactcacctgccttttcatcgatcggccgccgttgataaacatccaccatttctggcgctcgatattgcaaggttgtatgcgtcccgatctctatttctagctccctcatctcttgaacatttcttgggggcgctctaggagtacacacacttccgaagtcacagatcttgaaagtgttctcacccgcctgaaggatattttcaatcttaagatctcgatgaaccagcggcgcggggtcgatagaatgcattttggccactccctcgcatacgtcgacaaagatttgaagaatctcgggttcggtcagacgagtttgaagtcggctgttcataagatcgataatccctcctccagaacagaactccatgaggatcaagacttcgtgtgaaccatcggcaagatgaaaggcgtctgcatcgagcagattgacgatattgggatgaccccggagtaatttctggatcaaagatttaatcaatattaatcaacaatttccttcaagcgcacaacacgattgccaagaaaaacgcaccatcacttcaacctcttttcttacttcctctagcagagacttctctcgaactgcaactcgcttgagcacgtgtctatctgttccgttgataggctcttgagttttgaccaagtatacatgtgcaaacccacctatagccgcaagacagttatccaaacagatgtttgatcagtctccttatgcccaccctcgaccaccttttacaatgagacccaaacgaaccttcgctaagatacttctcaacaactacgtgaatctttccgactgtcatcttttgacctgggctgagggtccccttctgtactggttgaggggcttggctaaactggggttgttgccgatgtggctgggtgggagggagctggtacccgtatgcatgttggctttgatgctggaattgatgtgacggctgctgttggacgaagttcgtattcatggttgaagtaccataaaacaaaaatatttaaaacgaagagaggaagacggctagaagaaaagcagggagcctggttagaggctgagagagatggagtatacaagggaaactgcgaccttaaaggaacagtaggtcaactgataaacgactgcgcatccggccagtttaactatcttaaatctcattatatattattgttataccatttgatgttgatccgagtagagaaatgatattggaatcagaacctcttcataggtctagccggcagatatcgcgctctaaacatcatgttcacgaagagcctggcagtctgcgcaatactgaagagttcatcaaaatcaaatcgatcgtgtgatcaagttctttagatgtcgttttgctcgggtcttttccttgacggttgatgataacgtcaatccagaacgcctgaacaccattgaatgacgatagtgttggacattagtgaacttcaagaaaaagaaggaactaggaccatagatgacaagagacgaaaagagggctaacagctttgcatgaacacgtttcttcttagtcaaacgaggatcgatgaagtcgtctttgtcaaatccttcttcgaccttgacagcttggatcgttgatgacataaaggtcttagccaaaaaggtagaggggtcgggactagaatcaaaaaagtaaccagtatgaatattcgatacagcttccagtgaaagcttgttcgacttacgaagtctcaaccttgatctttccaaatctttggaacaaagcaaaagaagcgtagaatttctcgatatcagtatcctacatagtgcaagtatagagagtgaaggaaaataaagcaacgaacggctcatcctgatccaagcctatcaagcacttcacaattctttcttcttcctcgtccgagtctctatctgcgccgttgttttctttgtctatcacctttgcgacacaacttatcatcactttgttttctgggtcagttgagcacgacccaaagctgttcgcacttgagaaaaatcacgcgtaagccgattgcgcgatgtcaaagaagactacaaacgtgtggatgaaatgacttgactgacgtagttgagggctcaaagcaagtatatgcgctgtctaggtgcggcccggcgaggactgtacaagtgctgatatgttataccgactttagtgactaagcctcgactgccttggtcaattcagaacactcacccatggcgaccgaaagatagaggagtcaagagagaaggcgcctttgatgacaagataaagggatcaaatgatacacttaagacgcaaagcttctgatatcagacttcttggaacatagcttgagtcaaagacgaagtgagaaaaaaacttacatgtgtcccaaatttaaagagcatgagatccacgaagaggagataatctgtcaagcaatattcataggtgtcagtcgttatggacacatgatgaccctgcatcattgtaaggacacaggtatatgcaccaatgtcgatgtgtccttcagcctgaatatcagatgagagcgcacatatagggaacgacctgtcatcaatatgcttgagatgcttcgaagcaagaggaagaagacatggcacgtactttgcgtagagaggatcacatcttccgtcacagaagacgatcttgacatcagatacaacataagaggacgaattttccaccaccgtaccgccattctctccttgataccaaaaatgatcgatgattaaatagataaatccatcagcacgaaagaaagagaagatgagaataccagagagaggactgactccatcgttgaacatgcaacctatcagaagaagcagaaaaccaagcttcgaatattgatgggtgatattgtaagcatttgaatgtatcgacatacgatcctttacatcatcagacttaccagatccaaatggggagaaaaaattactttgctgctgcatcgtaaaagtacgagatgcaatatgaggaacaatgaagttagaaacgtagaaggaatgtcatcccaatgcagtacaggaacgtgacagataaactgttagtaggatccagatgacaagtttatatgatggtttctttctttcgcaaacaattttttctgatgacaatcaagtcaactagccatggcatacataacataaacccgaaactcaagaatgcatgagactaattagatggataaagctggttctgttgtggtctagacaggatgtcgaaataggaaagggaaaaagagaaggaaaaccaaagggaagtagagaagacgacatgagaagagaatagggcgaaagaaggtttgctgtatatcggaggatgagggggtgtctagccctttctatttggcataaagatggaacctgctctcgatcgcagagaggagagcgttccacttcggttgcggccagtacgtaaaccagcttctgcgcgaagttgatcttgtcgtgacatgtgcctggcactacccactccggataatcggctttgacttcgtctaagaccggcaactcctcctccttcttcggctgcaaagttgtaaccactgccacctccaggagttacccggccggtcgccatatctgaataagggcatcgatatcaagaagtcgagaatgatcaatataggcgcagtgatttcattgatgaactgcaggaacatcatgataaagaagacgtaccgatctgactgcccgtcgtagccgttctgttaagcggtctcatggaagtcatcgattctcgaggattcgcttccacgttatcgcgagcaaccgatcgtcggttcgaagccggatactcttcctcaggctcggccgcgttctcgaaagcagcttttcgagcaccaagagcaggatggtcggcaacattgattcctttgtcttgtttactgttggacacaagtggaattgaagaggtcagaaatgcttaggtgagaaagataaagacaccaggccagaggctacagagacttaccgaacagctcgcatgatatctatatctgtcggtcggtacatctgagaaatggtgttcagaaggtacttgggaagaagcccaataactttgatgcacgcgaagaaaagacatcaaagatcagtcaattagccactacaagcattagaaagagaaagtatttacccgaaacaaagatggttccgaaccagaacagggccgaatggaagagataatgattgtttccgctgtgtatacaaaaaaccttggggtaagtcgagtgtagagaagggattttagagggactatgaacgaactaagagtaagtgatcaacaagttgggcggtaaagcactgtacaccgcgacgaaagactgttcgttcaaagaattacccgtagtatcagaatccagaatatagtgaggagcgatgatttcggcatttcacgcaagtaaatacatacccagagaagaacaggtccgatgaaacaggctagcgataacaagatttgatcatcaatatttgaatctcgcgtcaccaattttacaaatgcaaaacctaccaccaacaatccaccaagggaacgaatgtgtcgtgatagcatggaattcgtctatagaatatggaaattcaaataaaaacatgagcctccttatattcttgttgagttaagaaaggaaattaggagaaaactcactgcaaaccatcaccgcgccaatgaccatgacctgaagaatattgatcatcaatacgtgagcatgactgtctatgcgcgatcgatagccagaacataggcgacataccgttgagaattcgtataaaaagacatcaaagccatccgatcgagcagttgtgacatcgtaagtatagttgatgaagaaaaagacgatggctgattgtagaacaccctcaaagctatcgatccccagcgtcccagattaatcaagacgagactgtgagcctggatgcgtgagataatatatatgagatcctcctaaacttacacaaagtaaatgtatcgagaaaatccgaagtatcgaccctctcgaccttgtctgtacagttccggaagcgcgaccaagatgtcatcgttcagatctcgatcaaagagtccactgtttatagggatgataagatttgtgttagcgaacgagaggaaagtgaaaagatagaatatagatatgattcaatgcttacattccgatgacaggctacgcgagagaatagttgtaagatcggagtcagtgacactcgaggaaaacacgatgattgtagaagagacgtacagcgatggtccagacaacattccacagcaacaagtagacgtaatcgtatgcactatcgagaagacaagattgtatcagtaaatgtgtccttattaaatcacaaaagagacaaacactcactaggtggtactgacaaaaaaatattaagacatcgagttagcagtaagaaactaagtcgacaaaaagggcggcacatacctccaggtacagtagatctggaagaagaacaggaccgctactccaacgatgttcttgaagaagctgtataggacaagaacatatatataactatcagcaaacaggtcttttcaagctgtacgagactgaaccgactaacaagttcaaaatcatgtttgagtttcgcacgtagcaccaatgaccatgcaccagaagaagtcgagtcaagtaacggaactaatcgggatatgttgaaaacaaaacacagtcagttgccaactctggtgaaagacgttcaagtggaaaggttacctgagcgatggcataatccgaggctatggtagttgaagaaaaccacgttaacaagggaagttacaggcggttaagatcatcagaaacatacagttgacggcttgcaaaccctcttctccagagattccaacacccacatccgccgcctgaatcatagacacatctaaagtaagagaaggaaacaagtggacacaatcaattctgttcttaatgacatggtcgaaacaaggatgaagagaatcaactaaccgttggcaccgtctccaatagcaagcgtcatggcgccgatattgaccttgatgagcctgacgatctgagctttctgaagaggggacactcggcagcagatgacagtgttgcatcgagtagataactgaagcagaagatcctcggtccactcctcggcaaaagtctattgttcaagcagaggatgccggatagacgatagttaggaatataatgaggcagatttctcaattaaaattcttcctatcatagaaagcaggaagagaaaacatacatgcgtcaatgcagaaccttcgatgactagagagtatccacctggtcgatctccattatttctaccgatgatatctgatagtccagtgttcgttcttttaagttgggcagatcgtctgtggctggacctacgttgctggaatgacggccgtccgaaccctgacattcgagatgtcgtcctttctagatcaggcgggtgatagttcacgtcctgagagacttccggtccaaagaactggtcgattgcggctttcagctgatcgtaagcagagttcggggttccatacgctccaccacggacaataatcaaatttgaatccttagtgagcaagttggtagagtaaccaatcgaaatcgccgtctcgagtttatcacccgtagcgacccagaccttgattccagctcgcttgagatcggcaatcgcctcaggcactccatcttgaagtttgtcctcgatagctgtcgctccgagaagaactagagagtgctcaatctgggcagatacctcagccatcttgccctctcgatcatctagagaggtagaggcattgtggtagtcactggaccactgagcaaactcttgttcggagatcattcggtaaccaagacagagcgttcgcagaccttcgttggcgaaaaactcaaggtccttgttggtctgttctttgagatcgtccaaaccaggagcgagtcgctcaaagatcacgttgtctgctcctttgataagcaagaaaagctttccttcatcgtctaactttcggaggatgaccgacattcgttttcgagcagaagtgaactccaacacattcaggagctcatactcgtcgatgccgtcagaatgaggagttttcaaacgaaggatgtttcgatctttacccttgaacacgaaaccaacgtcggcagcagcttggactctgatgagaagaagaaacagcataccgattgtaagtatcagcgtcgaagagatctatcccgaggagacaacctgagaagaaagcgaaacgagaaactaacaaggcagcctcatccggagactgtgccatgtactccatcattccattcgagtcttctgaggccaaggcggtatgacaaagcgccaggttggtaaagaatccagaaacattggtgtactgttcggagtcttcgttttccaaaactcggtccagttcatccgaatggaatcgagggatatcatctttggcttttgctttaggcttaggtgcatcagaaggcgtgtcggaggcagagccagaggacgagtcctggaccaactcggacttggacgtgttctcggtcggcttcattccgggtccttcgttgacctgagctacagggggtaggtcggcaagtttgccgtctcctttatagatctaaggggaaccaaaggcattagccgaaggtatagatagaacaaagtcgcatattcacaatgtttctgagagaacgaacaatatgtccaatagagcactgctggaaaatcatggcgttctgagtcaacgttccggtcttgtccgagaagatatattcgatctgtcccaaactagaagttgatggtatgaaagaaaggagcatgaggaatcagagaccacagttggatttttgtaaatcaatgtgatcaagatgtgtaaaaatctaaacttactcatctgccaagttccaacttcgagccaaagtttttgtatctgtcttctcataagtcatttcttcatcatagtagatgaacgcagcctgagcagttcgaacgaattcgatagagatgtagagtgagatcggaatgatgttttggaaagtgatgagcgagttcaagaaagtaaaaagcccattgatctgtttgaagtgaatcatataaaacgagagcgggcttagtgatggacggttatgtttttggtactgaaagcgtatactaacgctcggattatcaccacttcgatcgtcatacaacgtccagtatgagttcaatcggtagtacttcttttcatggaagtaattgacaattgcgcaaaccataccggccaaaccgaggatgagaagcgaaaatagactgatgtgacgaaagaaaagcgaagagacagcgcattagagatagaagaacgagtattcaaaaccttgaagaattagatgcgagaacacttacacctgggggttcatctgtcgttcgactttgcttcgcttgctgggagttcctccagagttggcaacaattttactgaacacatggcccagttcacacaatacatcaatcgagttcagttcacaccgaacgattttgacccaactagatgagtcaatgatgattgaactcacgtatcggctccggtgaacataacaataccgatcacccaggccgtgttcctgaggacacagcctctcaacaatgaagtttccaagttgataggatgcttgacctccactccatctggtccaggagcaacgacggcagcgttcaatctgaacatattgacctccgggggctcgcaatcaattcggaaacgggcagttgagcaggagagagcacttcggagatgtgctagttcggggacggcgtgtcgagatttcaaattggtttccccgtcaagattttcttaagaaaaccatgtgaaaaaaggcggttaagcatcctagtagatagcaagagaggctctaatgcatggtaagagtaaaatgacgtttactcactggtctcaatgtacgcaacatcttcttcctcggaagtagcgcagatgacgacatctagatggcaggaaagataacacatcaagacaatagctaaagacaagagtcaaataaagagaggcacgtaccggccgggaaaccttcgttgttgtagatctatgaagcagtgagttcgatcagattagacgatgattcctaacgcgtaaatctaaagagggaagaaagacgcgttcttttcgaacggaaactgttgagaactcaccttgatgaagtccccgactttgacatcttcccagatagtctttttccatccgatctctccactggtatctacagcctccacgtcgtgttcgaagtcctccggaatgccctcggccacttcctgatctctactcctaattccccggagatcctctccagggaatatcacggcggtcgcgtcgtcgacaggaatatcgtggtgctcatctctgacgatctggtcgaaccctgctcggtctctggcttgtttggcccgttttttcttagactgagggagcctgactcctttgacgaaggtcttggccttggctcccataggattgtggttgacataattcgggccgacaagcgtatggacgacagagtggttcacgtttcgatcggactgatgtcgtttgatgtcttcgtaaccatccttgagagcggtgatcagaaggacggcgagcagaggcaagatcacaagacctggactgatggtagagaattttgggaagaattgaaggatggcgatacctatcgagaaagagtgagtgtcgcagaaaacggagaaatacgcgtgatgagtaaggcatctcggccacccctgtcatttgaacggatcttctgaaaaacgtacccaggaaaaaactacacaaggaaaaacataggattcggtaaattgatcattgttatgtcggtctctatcagtattggttctgtggggaacgaagaatcgaacgaaaaaagaagagaaggatagactcgacaagaacagatcaaacgtacatgttggcgattcttcgaaactgttcaaacaagtttttaggaaggaaagtcaagatagtgtatttcgaagtgacgacctgggaggtgctataccgcatcgccgcgggcactctgcccttcttgtccaacagctcgactggaaggggttggttaatgtagattgaccgagcgacagcaggaagtggtttttgtttaaataagttctctgggttgagatagtattgaaccttatgaaagaatgccgccgtcttggacggcttgtaacggggtggcatctgatgcgaggcgccgttgttgtaggataaatgtgtggatgagtggagtaatgtgctgatgtcaagtagaaccgaccgagtggcaagggaaatggagaagagtgatgagtgctacactttttggagaatgagtactgtctttgtaaggagggcccggggatgaagtgcaacgggaagacgattctcttggaagagtcaaaagagtcggatccgattcaagtttgtaaagagacgcgtcgttggtcgcctaggagcgtcggattcaaccaagaaaaaaaccttctcaagggagaggggtaggtgggagaagaatggaggaggaacgacgatgaccctgctgggcaagaccttgatgagtggaaggatagatcgaatcccaaaaggcgatacacgatgacggaaagaacttgaaacaggatgagagtacacggcgagaaaatgggcagagaatgccgagaacggccaaggtgatgatgatgatgactaaacggttcccgatccggccgacatcgggtaccggccgcacagatggtttttgctcagggaattctattgtaaagtgatattgaaactatgaatatttcctgatactcttctctcgttctttttctcgcttcctcacacagcgatctcgtaagatcagagtcttcatagcattagatattcgtcagaaggattatctaatactgataacaccatgaaagctaccatgactgtgagcagaggaatggatcgcagagagagaaaagagtcgatgagatcaagccttaaagtatattgaagaatttgctatcaattacatcgatctgatacatcttagaactgttctgcataagacctacaagaacaagacatacattcactatacgtggtttcttgatagatctgtggacaacatgatgataaacgtgatggcgcacgtcgcgccaactttcgaataattttatgtccgggaacgggtgtgatccggactatctcggtaaaacaaactggctaggctgattttttgtcgctcaaaaagctcactctcttccttcgtacacctctttgaacgatcaattcgtgacgaagtataccatcaaactgccatttatcaggatagtctcttatgagcacttcacatgtactaggcgacaaattcttggaggcgtcatttgggaatttcgccaaacaatcaagtagcgatgttttcacattccacatacaacaagttcagcattaaaaacaaacaacaaaatatcagaagaatgaaaacccggaatgagcatatagatgagatacgtcgccaggtaggaaacccacaaccaagtcatgacattcatgttgctaacgcctcacattgatattcggtataactgggtcgctttgtttacaaccttttttattattaacgacggtacaatgatcttgtaacagagtatactttcgcgctgaggagccacaactgtatagataacatatcagccaatctcaacaaaaggtcaagaaggcctgatccggcgaacgtgtgactatgatcacgcgtctagacgcgtccaaccgccaaacgcgtctcaggcgcgtttggagcgtgttcctctcatttaataagttctcttgatataccccatcttagctatcactaacgtcctcaggttcagtctttggacccgttgttcctcgtgtcttttctttcctcctctctttccttcgttcatgttaaatgatagttctcttggtctctcttatatatctcccgagccaatcctcagagttcgactgacgaacctgttggcaagctcggccaaacctcttcgtgggctcgatcagatgtcatccgggttctctgagggtagacaatttggcaggattcctctacttcaagtctttggcatgactgaggccggccaggtaattcggtcgagttcacttggattgagatgagctgctatgctaacaaaacgtcctgtctctttctctagagagcatgtgtcaatatccatggagcatttccatatgtatatatcgagtatccgagagacaactcgttggaacccaaaacaggtaggtcatctgtctccccagacgttgatatagagccctccagtcttcctcgctacctacacgctcatacatgttgattctataattcctctaagtcaagcacttcatatcccgtctcggttctgcactcaactttgctcttgctaggaccttcaatgtcgaccctcagattcgagccaaagatcactacgcatcttccgccaacgtcattcaatcgataaccctcgtcaagggtaccccgttctacggctttcacattggtcacacatatttccttcgaatcgcatataccaagccaacctctcgacagcttttgatcagagttctcgccgaaggcgccatccttggtcaacggtgggacattttcgagggtcacttgaactttgagctacagtttctctgcgactttgggctctcaggctgtgggtggctagaaatcgcagacgctaggtttcgtgaacccttacctggttagtgccgtaagaacagtcgtctatccgctctgccgacttatccttgtcgtttcattcgctgttctcctgttctgatggatcgataatctagaacaacacccaaagctcaacccaagatcagaagctcacttgccatctcgactccggaagtggtcgaccaaaacaacttctggacgatatcttcatccacatctgtcaccagctaggtctactcgaacgacactcgagcttgacatccatgtgtcctcgatcctcaatcggctcgcgcttaaaccccgcgatcttcaccacgacttcatcgaactccgacacggccttgcctcagaacgaaagctactcaactcattagaagaactgtgggaggatgaacgaaagcgcagaagagaagctggcaatgtaggaaccaaaggtatgcaaggtttgagctacggagagagagagggtgtagcgaacaagattcccggaaaaggtatgggctggaactcagaggagcggtggtggtcagaagtacggcttcgaatccaacaagatcgagacgcattgaacgaacacgatgagaaaaaaagttacgagctttcggatctgctgatggaatcatcggagccaaaggagcggagagacgaacgagctaaatgggaccatgtgagtcttaaagcttctatatagacctttctttatgtacgtattcgacagattatctgattgaaatggatcccaatggatagtacattcccaccacgttcgccgctctgacaaaaggatggccctcagagccaatgccgtttcgagaaatgatccttccttcgccatcccaagctccgatcgattaccctccgcctactccatatgacgatacacttctcccttcagaatttgtgggagaagactcgtcgactaatgatattctatcgcgaacgtcctcacagccagcagaagatgttgatatcgatatggtcatcgcagcctctcaagccgtgtttgatgttgagagaaaagagaaggccaacccagctcgggatccatggggaataccaattaccaaggaggaagaatcagacgatgatgaagaagaaactctccccaaagaacaggaagctcccttgccttgggatgccgacttcgattttgaggatgaattttacggtacacaacgggtcgagcgcacagatccaaaagagaagagtcaagagataagtatgccccagagtcccaaaaggatctcaagggagaagagacgtcgggaagaggacagtctcccgagttcatctttgtctgcagctggctgggagtccccgtttcaatcttcaacagagccatctatgtcacccctggattcacccacaaattctatcagtcccaaatccaaacactgccgccgctcatcccgcttgtctcaatcacctactcatgaccaagctccatccgtattgacccgtgcctcaccatctctca

SEQ ID NO: 43 - DNA, 13903 bp, Xanthophyllomyces dendrorhous
ctctcatgcagtcacctgagatgtcttcaggatcgcaaatgaccaacccaattcgtagtccagagatatcgagagatgccgatgaaaaagaaagcgatcctaaatcgacgcctactatgtggtctcttcccagaacgcgacctacaataactcctctcgaaattcaatcaacgacatctcggcagatcgtaaatgttccaagttctatttataaaccagcatccgggaatacaacagcagagaaaatcgcacggtcttcagcggcggacgactctttttttgatgcatcactcgatgcaggggatgactggattttctctcagaccgggccggattctgtattgtcttctctgcgggccgatcggtcggtccagcaggtatccaacgatagttcttctccagttaaacaattgcttatgagtcgtgtcgagactcagtcagatgcagcgacaaataatccgcttggtgggccctatggcttatcatctagttcctattcaatacggagagctcaacataagagtaatcgagagaatgccaaagacgcgcccttaagcctacccactgatacttctgaagcgacgatagaccagccagtccttaacccttcagtcattcgtcagtcggatcagttgtcttttttgcctttttgtctcggtttgagttaacacgtttggctatctaatgattgcatttgaatagcatcggtcgactcgatcatctcctcctcagctcagctcaagacatcggcgtttatcccttcaccttcgcaacaatctaaacaatctctggcatctcccacagaatatggctgtgatattgattatcaagatccctacttctccaatccagtcgacgttccaaagtttcctagagagtatgccggaagactctggacgtttgataaaaacggtaattctatccgtcctgaagaggtctggtcgccgaacgtgttcgatggcattcgagatcaacccgaaatcggaggtagcagagtctttaaatggggcggtcttaagggaggtctttcaagattcagacgaatggtcgtgggagaagtagcatctttggaactaggtcatcgcgcaccatcgaggagtgaggctaaggagtggctaaagaaggatattcaagcaaaagagaatcgtgggtttatctacttcttggtatcctgttctctttttctactcttttatcttttatcgagatcaatattattactttgtgtctatgttatcttgttgtatccaaaaagtttctcacaaactacttttttaatcaatttttaatagggagaaaaaagattttcgcatctcaggtatgtctccatgtttaatactcattccaacaattcttggggggtttcgaccagcgattgtttgctaaccgtgtatttgttttttttttgctggggaaatgttctgatcataagatagaaggacctactcagttgaatactcaaggatttaagttcagtcagattaatgaagtctctagctctcgggagaagaggttcatgagtgttatgtctctagaagtccttcgttagtcttaatgtgttacctcttttctttgaccatgaagctaacttatgcttaaacaaactggctctgctttacatcctctcttctcacaatcggtttatagctgcaacaaggaatggccatctaccagatgccagagaagatcctattctcgctgtttttttctgctttcaaagcgatgggcaagctttcgacaactgttatatgccaggatgccatgtcgggctcatcatcattatgacagacgaccattctagcaatcacagtcaaccaccttcgacagatcccaggcgcactataggatcgcgtccgatagagcctgagtttgtgtctagcgaattggaccttttaaatttattgactgagaaggtctgggcttgggacccagacatcttgagtggctgggaagtacagggagcatcttggggatatgctacgaaacgaatgtcgctttatggaggtgatatctctccgatatttcttattataacacttctggagtgatgaactgacagcacttactccatggtacatgctctttgggttctctttgaacaggcgaacagttctttatggcggagctttctcctgtactggatacagacggccaaaacacatcgtctgaatatgactccgatcatagctccgccttccagatccaagggaggcatgtctttaatctatggaggatgcttcgagcagaactgaacctcaatcaatacacattcgaaaacgtggcttttcatcttcttcatcgtcggtaagcagcttcctttcgaccatctgtatcttcagggtgtggtcttttgtctgaagctcttctcgtcatgtggcatgcagagttcccaaattctctccacaaagtctccaagattggttctgctcggacataccgtccaaagtgattcggtgtatcaatcactttcttcttcgagctgtgatgattatcgagatgctagatttatcggaacttgtttctcgaaatgcgtgagtggtttttcaaaatcatccggattgacattccatatgatgggagattttacagattgacatggacccaatttctgcaaggacagagagttcgcacgggtatatggcgttgacttctcggacgtttatcaaagagggtctcaattcaaagtagagtctttcatgttcagaatagctaagcctgagagtctgttgttccgtacacctactcgagaacaggtcagtgttttgtcaacgtggagtcgatatggtatgtacgtcttcggacaggcactgatgcccttagtacttctttctttacaggtcggccaacaagccggggcggaatgtattcctatggtgatggagcctcaatcagccttctacaaggacccagtagtagtccttgactttcagtccctctatccatcaattatgcttgcgtataatatctgctattcgacttgtctcggacgcgccgaccgactgaaggataaagatgggaatccgactgacaggtttggctttaccaacttagagctctcacctgggacgcttgaggtactcgaggatcacatcactagtaagtttggctgtgtagacctccttcttaaagatattgatagattgatttcaaactgaaatatgctattatacaatgctctgtgttggtagtttctcctaacgggatgatgtttgtgaaaccaactgtgagaaagagtttacttgcgaagatgcttggcgagatattagatacccgggtgatggtcaaggacgctatgaagggatataagagcaacaaggtgatcattgttacgtatccatctacgctgcgacagtagtgatataggctgatcagtgtgagtttactgccatacagagcttgacgagaacattaaactctagacaacttgcgttaaagcttttagccgtaagactgttttatcgagattgtctactgcctcgattttgacttcaagtttgacatgcattgttttgaatctgccgcttttttcaaaccttcagaatgtcacttatggctatacttccgctagtttttcgggtcgaatgccccatattcaggtggcggactcaattgtgcagtacggtcgcgagtccctcgaaaaagtttgtcttttacatgtctatacttgaataaccaatgctggaggtctcatatctctcttactgcaggcgatttctctcattcactcgacccctgaatggggcgcacatgtcgtgtatggagataccgatagtttgtttgtccatcttccgggaaagagcaaagagatggctttccggatcggatatgagatggctgatgcgatcacggctaagaacccaaaaccaatgaaattgaaatttgaaaaggtttgcgttctatcaactttttctctggtatcaataagtatagtgctgacgaacttctgtgttcataatttcgaccatgacaggtttatcttccctgcgtgttacagtccaagaagagatacgttgggttcaaatacgagcatcccgacgaacttgtcccgacatttgatgacaaaggtatcgagaccgtaagacgagatgggatacctgctcagcaaaaggaactcaaagaatgtataaagtgagttttgtttgatttctaacatactgcacattaggttattcagaagcgtgtcttgctaacatacttgagactaacgaaactttgtcggtctattttgaacaggttgttgttcagagatccagacctctcaagagtcaaagaatattgttatcgtcagtggactagaatacttcaaggccgagtttccgttcaggacttcactttcgccaaagaagtccgtttgggatcttataggtaagttcagaatacggttgtttgtttcatgtgtttgctgttcagttttctcatcgcttccttgctcgttcttctttctttcttttataatcaacatcaatctaaacagcgaaaaaagtcatccgcctcatgtagtggttgctgcgattcgagcgaatcaagatcctggtgacgagcctcagtacggagagcgtgtaccctacgtgattgtccaaggggaacctggagagcctcagtatagacgagcgcgtcgaccggaagatgcgttggaggacgagtgagtcgtttgtctcctgtgacccgaccgtactggcgccttaatagacttgatttttttgatggctgattttacttcgtttttttctttcaccgatccacagaggactgcgactagatggtgaatattacatacaaaatatgctaatcccgcctcttggccgagttttcaacctattaggagcggacgtagcgggttggtaccgaacgatgcctcgtccgaagtggattgagcctgctccttttggtataccttcttcttcggctgttactactgctgcttctgctgttggtccggacccattaggtcctgcgcagatgattgagagcgctagagggaaagttgttgctcgaaagattaagttgacagaccacttcaagagtgatctttgttttttgtgcaaagctgaaacccatctaggtaataatttcctatctttcaggcaaagagcttttcgtttagtgagcaaccctgaatagttgctgaaacgtttgccttctctctctgcattgttcgtgatcgcggcttatagtccccgcgatatgtaaatcgtgtcgatccgatccttacaccacgatctacgctcttcagaaccatcgacaacaagccgaaactcgattaacgtccactcagttgatctgcagttcctgctcttctacgctcgcttcagagagaatagactgcatcagcctggattgtccgatcatgtatgagcgggtcaaattgaaccgaagggttaatggtctggctggcgtcggagagtttatcaagggactggaagaggaagaagcgaggagacgagaggcagaggtgattgatttaacgttattttgagagcatgaggtttcaatagcaggtaggagagagacaaagtaatcaatcgaggggagcatacacgtcagatgataaggtaggtgtatgtacgtcgttcatcaaagtttacatgaaggcagatacaaataggagaaaggagaagggaggaaggagaacatagagatactttgaatatgatcacagaataattcgtacaaaaacaatgataaaggacaactggtgtatatgagcgaaagaatccctctggggctactaccatagttccccacctcgaacaaagggcaatcggtttccagatttctggcgcttctccaactcgtagtacaatgacctgtatcaatcactatcaccatcagtgacaagacccccgagaaaggagtctactagaaaagacagacgacctgaaattgaacaagaaaataaatatatatattaaataaactgcttacccatcgtactgctttcgaacactcctttcatcaaggatcccagtttgggggtcggctgctaggagccaaaggtatccccacaggaaaacctgaaacgtctgtacataatttacgccgcgggaccaaagaggtatcaacatatcgaggtgtcagctcgtgaagcccgtggttttgaaaggaccgttcgctctgctttgtttagatcaaaaggggaggtgataaaattcgaggaaatgtgcaacgaacccaaccgatgagatccaggacgtttcggtttgctttccacatcgtcacgatctctgaaaaatacaagcctcctttttggtctctatcgaaatgagagaaggacataaagaataggtgagaaaagctcgaggcaggcggctcagaaattcggacattacagtacgtactcgtcaaacttcttgaagatcctatcatatcgaccttcatcaaatgttccttccatcgtataagattccgtatcacttccggtcgcaaaataccgatcccggtccgggtacaagaggatcatcatgtgagattggtcatcaacgttagtaacttgtttttctttgaaaacgggcttgctctaacaagggtatatgcgcgcagatacagaccttccgtgcttagctcgcgcaatcctcctttaacgcagaagtcggatgaatagataagatctcaatctgaccgaatctaagcgatcaaagagagaaagaaggaggacatactcgacgtaaacggggaaccgcagatcaggtatccagctttcacatgtagggaacgagacatgaagtatgtggaacgccagagccgattggagggctatgaaggtgttgaagccaagtgctctaaagccattgtatgtatccgtcggaaatcttgaggaattatagtacagcttcagggtatcagatttctatttggaaagttttggttggctcgttcatagaatcggagggacttacatcacaccagtttttcttctatcccaaaatgagacatctgcacccaaggcagacgcaaagaacctcgtatgcaatcagtctcatatatgttatctcgaaagatcgagacctgctaagaggaaagaaaaaaccagaaggagagagccctcaaatatatgttgacagtttcccgtccactcacgcttttgtagagcagtaggcttccatcccaaccgagagagttcgcagaacaaaccatatcagagccaatcgccttgtttttcttgaagttctgctacagacagcctgaacgaggattcttaccttgtcttgttcactgacgatttgtctaggcatgatgctgagatgtgtatatgtgtgttcgagggggagaagagtagacaaacggatcgatttggattcgccagaatagctagcatcgagatcgagctttcatctctggacaatcattctgaaacgtcatctgatcaaaacgttgctcgccatgactgcggacattcttctatctacctctgtatacacatatagactaatcatcgttccctccacctccgaaagatttccacttgctggtactcgattgagaagcttccatccgttttctgtgttcttcctctgtttccggttcgtcttcaatgtttctgaacacttttggctggtttgcccaagctccggcccatacactatttcgtttacatgccgaggacgacgcggttagttcttgtgccgtaaggcgagagatggaaaagagaaacgaaacgaacggatttgtctcggccacattggcatatttgagcaaagcttctcgaggctatggaacagacgacgaatccgaacagatgaaaggatgagctgagcaaggggttgagaagatcgcgttaagagaaagagcaagaaacttacgtcctcctctcgggtgttgtctttgatgactcctcgtaggagatgttgagtggcactcgctccgactcttccaccctttcctggtccactcattggttccgccggcttcctcgtcttgaccggatccgccctttccttctcccgcttccgttttccgccacccaacagcctgttctcctctctgtacatcggaagtgaatgaggcgtgatgatcacctgaggcatggtcaagtccgtaatagaatctaggtggatcggtgccgaccgggggagtttcgataacggaaggagcgctccatgagttgaggctgtgggtgaatagaggacgttgatccggccggtggaggacgcggtgacgatctagtttgaggattaaaagtcaggattggacgcaaccgtatgtcaataaagaccaaagagagggagaagataaacaacatgtttacctgattaattctggaatgccattcaactctgacgacacttccctcaccaacatccacccttcgttcctcttccaggccttcctttccaagcacgacaagctcacccgactttttctctcctccaggcctgagagcgactccggtgaggatatgtctgtcgtctggtgagaatatcacgtttgtctctgcgtacaagttcggaaggtttgacgcggtgaaaagtggttgacggatcgatcggagatcccatactttgagagggggaggaaaaacatgcgtcaatttgagacagtctggttcatccgtctacggagtgtgtaaggtgctttggaggggaaaaggctagtgactcacatttgacagtatcgtccccccctcgggtaataaccgtgcggccgtctatcgagaaacatatcgagctagtctccgaacctttgatatgagcggtctcatttgtcatgtttggtcgagcaaagttgcccgaggtggaccagatatgcagcgtgccgtccaagccggctattcaggtttaaattcagataaaatcagggatgacatgattagactacggaatgaacaatctctgggggtttcctcaaaaattaatatagagaacggaggagtgaacgaacttgcaccgatgtgttttccgtctggactataagcacaactggtgacctttgttcttgcgcctctttccttagacttcacgttaatcaccactttctgcttccgacggttctcgacgtcccatattctaagtagcagtgggaaggaaatacatatgagtggtttcagatgacctcatcagcgttcatatctagatgaatagctagtctcgatcaaaggaagagaagagagagaggagagaggagagagaaatggaaagacgaacctgacggtactatcgttggagctcgtcacgaactctgcattattttttgggttgaaccacccagaggtaagctctgctacgtgtcctctaagaggaaagagaagtgaacagggcagaaacagtctaagctgtgtgttgcttttctttcctcttagaaacaagaggagaagaatcgaatggagaaaacgaacgaggtatgcttcatgtctcgaatgtatggatctcctttcatgtactgcgttccttttccgtcgcttaagatcgatcagagaaaacaatgagttgcaaatgattcagtgcatggttagcgaacagggtctgtaacggataacgaatcagatcctagatgactcacccaggctctccgtctctggagtaaacttgtggttgactggtaccagtgacgaccaagagatttgacccatcagaagaataagacaagttgtgaatctatcgaaagaggcactgttagtagaataatctacagaggaggttcctgtccaagccgttgactagaaataacaggaacgtacatgatacgatccagccggttcgaaacttctgaaaggcttgtagcccccgttatctggtagaccggccgtcattcctccgaaatcatacaacttgacgtcatagtcgtgggaacccgtcgagactcgagctcctgccggatcgatcgctagtgcagatacgggctttaagggaagatgagaggcgcgaaaggttagactaactaggtaagatatgctacagagggtattagatatcagtatagggctaagaaggacgcgacacgaacctttccatggtctttccaggtgatctcgtgcgagattggtaggaaatcagtttgctcttcaggacctaggtcgtcttcgtcatcttcattatcctcatcctcgtccttctcatcgggtctgtcgatcccgtcagccttgatctccttatgaacgggctcagcgttctctgacgaagagattttggctgtcggcagggttgagggaacgagagagggggaaggctctgatgggactggttgaggtttaggagacgttgccacaagctcagactgacgtaatcgtcaaagtttgacaaggaaaagaagttgaaataagtgaaagagaaggtatttccgaatcggccagtcagtcaaaagcatcaggagcgaggaccaacgcgtgacgcgtggaaggaacaataaatgagaaaggaaacgaagaaggatgagggcggaacttactgttcgtttggtctgttccagcttagccgaagtgttcactttcttggccggggcctttttcccgaacgagccgaagcccatcatcgctgcaaagtctgggtccatcttgggttgggtggatgagtgtcgcaggttgaatggagaccgaagaatggatagcgactttgatagttgagaccggactggacgacggatgatgatggatctttgttagggttaacctctccaacagactgtaaccatggctcccgattatgacattgtgtaaggctcggttgttaagaaggtaaccaagtgtaatcacttggttcgcggggtgacacttaggctctggcgattaatatatctgaagcagaccaaactattaacaatatactttggataagaggtttcaacaagaatctcagcttgaggaaaactcttatccaagaaggcgcgagggcgtccccgttttatatcaggacccctcgcgcatttggtctgccactaaagatatacatatgacgagcctagagaggctcgagatcacgagaactaaaaagatgaagcatgaaacatgcaaactagagcatgatggaaatgggcgaagaggcataagggatggagggaacgaatagcctgtaggggtaacccacgtaagagaacacgtgatacttaactcgtatccctgacagtgaatgtgtaacggtgaccgtaaagctggttacagaagataatgctgccacaaccagatagggtgaccatgttgcgcagcgaacgttcagggcttctagcgaagatcaaacgtcttggcagtctcggtccatatcacggaaccatacgctgtatattttggtcacaggcggccattcgtcaaagaggcactcgatggcgaaggcgcagcaactgttcgggagtggttaatcacccctcgcccgggaagaacaaccgagacgatctaggctgagcctcggggtctcacggcttcagggctcccagagagaataaacgtgccagattaagccaagaactagactcttttcttatttctgtatgacacactgaatgaccacaacactaacacatacgacatgcatactcccttgctcgcttacccgaccgttcagccagcggccggacaagctacttacacttacgaattaatctgatgctacagagcccggaggtcgcgtatgcgtctgatagaactcactaaatgaccgtttcctctctttcttggcccgtatttacctgatcttttgatcaacgttcggtccgtttgaccggctgtgtgtactcatacatcagtggagatcacgtccatcgatgatctcttatgttctctcttctgtgatacttctgaatgtgtatataaagcttgaacccaatcagaaacgttcttccgattcgcccattgcaccaatatcaccgtcgaatttctgtttctaaaaacagacgagagttcaatcagttgttgtttttccttctattgcccatacttcctgtgttcgtttactttgacggaactaaacctgagcgaatagtgagacaatctgttcgtatcccgacgtcgaatttgtgtacctttcttttctttccgtcgtttgattgggttgagaagagcggtctgctcctggtgataacgacggtggacaggccgttttgttttgtctcgttcgcttcttccctattgactcttatttgccctttcttccacattctttcatcagcgctcgggacctaatcaacccaatcagtcaagactttcgttttgctcttttttctccatccgtccgatcacatccgtccatctatttgttcgatccctcgccacgctctttcccctataaactctcttctcactcacctactcagatccatataattgtcaatcacttcaagcccaccaccaatgtacaaagtggtcgcttctccgaacctagaccagaggatgaagtcccacccaccactcaagatcaagacgagaactcagttggtctcgttgataactagttgtcagtgtacttagtttcttcctctctttcttctcgcagggccatagagtctgatagcttccctgttctctttccttctctcactctctttcctctctatctcagttggagccttccaggacaagacgttgatccagagagcgttggacgattactgcagaggaaagctcggaaacaagtcttcaaaagaaagactagagcagaagttgcatatggtcgaagcagttcgttctttcctcgttctctcttctctatatatactgatcttcccctctttcttgtgcaactcgctcctgcagacaatgtatgactaccaggacttgggtttacctgattactcttcagagtaagcccgcttcttctcctcgtctctttctcttttgcacacacgtttcttcctctcgtctcacacttacaaacgtattgctgtcagattcattcatttgcgtaaaacactgggacttcaatcttccaaaatcttcacccaggcccgatcaccaatgtcgtttccggaaaagaaggagaacgaacacgatccattcgagaccctgtctacgctgggaaagtactgatctgcctcctccttctttcaccttatcttcgtgtttgatatgttctgttttgtcttgcgtctggttctcgttcgctcttctgggtctctcgtcttcttggtctctttgtctcctggtctcctggtttgagtggaaggttcgcatgccacttgctttataacacccaaaatgaacaactgtaaaaaaggacttctagcctatgtcgtttatcatattttccttccaacattgtctgatgcttactatttcggctttcgctagcttaatctgttattacaacttctatttcaacatctatacgttctttctgtttttggttttcttttaatagatcgtacttccttttgtaataatatgatatgatacataacaccggatagactcatatttttatcccttctcaatgtcttcctttccttgaccatttgtctgcctgctttgttatccattactaatcgagcgagaacatgagaaaaaaacctaaaacttctcgcttcttcagagctctggacgaaaacttgcttcaaaatgcttagtatactcctcgcgttctctcctcttgaccttggtgtctatctcgtggtccgccggagaaaatgtactgcaacgaggagaaggaacatctaatcgtacaccaagcgaatgtttgaaaagaaaaggagaagagagatagaaaattcgggaccgggtgagacgtgatgtgacgtagtagagtagaacgcgacagggtgggataagatcgggggtggagtaagatctgtttttcgtttatgacatcggagcgatcgatgaaggagggaggggcgaaagtcctgggccaggagtagaaccagaaccaggagcaccgaacggactgtttccctgagcagcagcagaggaaggaggagggaaggggctcgatccgttaggtggagggaagggacttgtctgaccgggtgcgggggggaaaggtgatag

SEQ ID NO: 44 - DNA, 5344 bp, Xanthophyllomyces dendrorhous
gggaacggaccgcctgcttgagggaatggtggaacgggcattcttttataaatttacaacaagaaaccccatcgaaagtcaaaaagaattcagtctcccagaacgagtggagcaaccacacgaggcaaaaagagattgaggaatgaacagtaaagaagaaaaaaacactcaccctggccgccagccgggaggaggtccaggaagagggaaaggcggtcggaacattccaggaggtggcatcggaggcattcccatcccaccaccaccaggagggaatgcgaatgaaggtggaggaattcctccggccagcccaggaggtggcagaccaaatccaggaggaggagccatcactccaccgcttacaggccctttcattaatgcgatatgggccttcagctgggcttgaagatcagcctcactgatcggggcatacgagatcctcactcgtttcaccgtctttttctcggcagcctgagggttgatcccggcctcctcggccttacgttgtcggtattctttcaacgcgtcagcaggaaatccttccattccgaaaatctcaacatcgtatccatcacgaccaggaagacaattgtcaagcctggaagaaacaagatcaaacaggtccatcagcttttctgaaggtcccccatagggaatttggaagagaaacaaggataaagatgaacatacttctcgggctcgagcttgtggacctgctggatatgaacggccagacctcctgcagtgttaagctttctaggacacaatcggcacttaaagtgctttgccttttgatgctgcatcaatactttgaaaatagaaggaaagaaaaacagagaaagggcacgcgacgagtcagtaatcgatagaaacctaacttaacacgtcgcatagcgtgtaccgagctacgagcctagtagatggatagtagaaaagagaagaaagagaactgctgatggacgaacctttctcatcttcaaactctcgttctaaaaggtgaggaagaaaaaaggagaaaaaaaggagaacaagattaaatatcattgagagctgctgatacgttgatatgtatgcgtgtaaagattatacacataccgcaatagtagcaaacaggtttctgaacgagctgcttggatttggactttcttttacccataatgtagataatgtagatgatggatggatggaaaattgggtcaatcgatggaagatgcgactacagggggtgtaaatccttgatgtaagcggcgcacagctttctaacacaactatccagatagcacccatttatcatccatatccaacctccatcaccatctaggctcctccttcttcctagatctttgtttcctatctgaagggatgcaacaaatgggagatcaaacagattgggatatagactggggaaatcttaccttagtattcaaagtaacctttggaacagatagccggcaagtcacctatccgaaaggtagacgatgtcagtatgagggtcttagaggcacagtcagttcgaatgctactatcctgcctttcttcttccaagaagccatactgacctctttgtatttcttggcatttgaaaaaaacaccaccaggtggaaagactcttttctctgtccgcttcgtccttcctaatcgcatataccgatgacgatggcgatgagaatcccatccggtccgatctcgaactctctgaagcagtctcttacttttactccggcacagatgatcttggttcaacttatacctcgctgacaacttcgacatatgactcatctcttccgggaggaggatatggaggaaccggaaagatcactctaccaattcaggtcattgtcgagtatgatggcccgagtctaagcgatgtggacgtgaatagtatagcggagagcctagaggacagggagagtaaccattcgctcaccgacgacgagagtagtcatcgaagcgggagtagtagctggagcgcagaaagcagaagctttatcgaaggaagtaatggaggtcactcttacagctcatgtaccagagctgccatagaagaggattggggtcaagacccggtggacacatcagtcgatccgttcttgacgtataccggccgtacccagttcgaacatgcctaccgccttccctcggatatgtctttagcccggcctcgttcagatactctgttctcggacagtccaatttcgacgctgcctacatctcgccatccatctaataaccatccatcttcgtcctacactcttgcatctggatctacttctgatacactctcttctgaagacgaaggagaagctcgtacctccattccatcatcgcgttttcaccctagaaggaccaagaaattgttctcggatattgacccgaccagctccgcaccatctattccctcatcctacgaatctttccacgctccctccttacattccaaccgtcagtcatcacacgatcaatatggagtacagacctcgcctgagtatggtaatttcatcgatgaagagccagacatcttgttcgagcacgcagttggatatgattctttacaccaagcatccggatcatccgcaagggacagtcaagaagctttcatcacagaatcctctagcagctcgtcatctggaccagagattaatgagctaggagccagatggttgaaagagcaggaggaaatgcttcaaagaaaagctagaggcataagtggaaatctagatggtagacgtggaagtgaaaatagtgtagagggtgaaaacacacagcttggggggttggagttagaaagagacccctctggaaggttagtttgacatcttactcatctctatctttactgccatcgttccccttcctcctaaccattcacttttgtctcgacctacggaaacagatggtattatagatattcaacagattcatccaatctttcttcgaatcaggactatcctgctccctctatgtctgcttcgtccattaattcatctgcctacgaaccttcgaattctagcgcactatcttgggctcacccatcaacttatcagcataatcacgacctacatcagcgtccccacattcatcatcatcgaaatcatgcacaacatcctacccatcaccaccaagatatttactcttcctactcgccctatcatccttacccagcacagaacgattcatatggattatcccaccagtctccatcgtttagataccctttatcccaagtgcaatcgtcatcttccttacgctcggtatcgagaagagagcaaggaggaaggctcccacaaattccatttgagtcattggcgattgctgatagagatgatagcagaagggtagcggatggaggagggccatttatagcgcctacatgcaatggttgcggaacatggatgggatacatgcggtacatttgcgttcaggtcagtgaactctctatctcatcggagacgaggtttgtgtgtgtcgtcttcgctcacgagttagatttctcattcactcggttggaatgaaaatcccttttcaaaatcgaacttcagtgtggagaggcagatagccatcctgaaggacagtcacaccacggccatcaagaaagtaatgtacgcttcaatgggaagaagatcagatctcgcacatcagcacgatctatcacgtctatatcaggagatgaaggctacgatgatgctggatattcctcggatcaaaccgaacacatccaacctcactccccttcggtcgcatctacatcacctaccagttctttgtctcatcaatcacatctctcatctggtagcatggtttccctaccaccccgaaggagaggctttgagctttgcccatcatgtatcgagacgtctggggttgatcattcgaggacgttttataaagttccaggccaaagcagaagcaaaacccaaggggctcatgcgtttagggaggtcgtctgggatgatagagacggttggaaggacgtcggttcgtttgccaaccgcttatcaaagtgtcatttttcaagtgttcttcgactaactcgcttatatgaaatgatatatatgcgtagagtacgacgatgattctgtgtgttctatctgtaaaagcgtcaaatcttatgagcgctatcgatgtaagtgtcttatttcgctgtcacttgcacaacgctttcttatgaacacaagctcatcatactgttaatctaccggcttaggcgtttcttgtcaaagattcgatctgtgttcggggtgtttccgaaagatggaagagatccatccaagtcatgctttcttatctttgcctccaaaggcgggctccaagatggaaccacgagcatcatcacctggttcttcgagtgagtgctcttactctctatcatcaacatgttgtggtttactgatagagcgcgaaaaatcgttcattgatctctgtcggaaatcagatgttcaacacctaggagctttttgtcacaagttcgtgtgttatctgtctcccgattgagtaaacgcatcactgatggcttgaacaatggttttatcccattcctctccaccttgtgtagctgtctcaaaaccatcgttggccctcggtttcattgcgctatctgtccttcttggtaaggaaacgacacacttactttaagctacagactgggccctaaaagagttttcatgcctcatttcacagggatctgtgtggagtctgcgaagggctcccaatcgcaatccaaggagctcatcaagccgaccacatcatgatgaaggtatgtacaaaatccgtattgactatatagtctcatacaaatattcacatcacgttcttttctatagatcccggtcccattaggcatcgctgaagtagagcaagtgagccgacgagctagggatcagtggctcacccaagatgcccaagccatcgctattcgatcacagatggattctcgttatgccccttcagtctcttccgcatcgtcgtttccgagcactacgtttacctcccaatccccgccagtgtcttcacccccaattcgatatccaccagtcccgccgatgccaccatctcttccaccccttcctccactgtcacctcgacgacacgcacctaatcaagctcccactatcgagcgctcagctcagaaagcgtcatggaacataggagcagcactgacaggaattaagtttagaaagccacccactcagtcttcaacagaagctgggccatcaaggtcatcatccatgtcttctgtcactccagtcagagttggccacatgcggaggtgtgccgactgcgatctgagcatttctgggtgcgccatagttccagctacttgttttctactatatttatttcatat

SEQ ID NO: 45 - DNA, 81311 bp, Xanthophyllomyces dendrorhous
taccctctgaacccggaccctgacaccggccctccccatgcttttctttctcatcaatacgtagaacagcgtgggtctgtctctctccctcttcctatgcaacgtatcttaactttcttttctttctttctttttgtttatgtaaattcaacgcatggaaataagatagacggaccatttcgaccgttgtgtacacataaacacataaacacagattcttcttccggactctgcgtccgaacggagttctaaactagatatacgtccaaccagtacaatcctcacagctctcgtcctcgccttctgccacagggacatccgtccagtcccgttctctaccttttctatcgtccgtctcgccttggttccatggtttggagtatacgttatctgataatggtaaggaaaagaggcaaagatccgatcaatcggggagattcgtgattgatattgagaagagagatttaccaatggcatattgaatggtgtgtgaacgcgtcgtccgatctaatggccacccccactgaggagagacagatagatggatagagagagaacacacacacacacacacacacacacaaggcgatcgtcagcgcgacgcgataccaagaacatgataatgaatgacaagaaacaagagacatcaaacggtaccttctcgacagttcggtagatgatcagattcccctggtggcagaccgaatcgatggagtaacccgcccggccacacacgctgaacgggcctctacagttcccagtagcaatcacatcacctgtatgccacacatgtgtcactgggttgaacctcctgtcggccggtacaggcaaccccaatcgttggacagacaatctatcgggcacagcctcgaacgtcaccgtcggtaatccaaacgtcaaaccgaggagagaagccagggagcctcctaaggagtgaccggtcagccagaactgagcgcttggataaagcgagagtagagatagatacagcttgatcgcctccgggtaataagattcagagtcgtacaatccggttcggacacacatcgacaggcatgtccgcttttttcctggtagcactcctctcttctcacatccacactgctcttttgagaggccgccacaacaacagctaaacagcttgttatcgttcaacctgtccaaccgagccgtactctttcctcgaccggaatcgatcgtcgtgcctttgaaagacacaatcacggtcgagtttgtctcgtccgcgaagacgtgtcctctcatcccaccgtcctcccaaccaaatgggaccgtcaggttgaatctctcgagctcggcccatcgggcatcgccgggaagagcgtacgcgtcgttcgccatcctcgccagattcaccactgtatctagatcactcacatccggcccaattacctcgacctcttcccattctatatctttccgactatatccatccctccactcatcagtcggctcccaatcagctatcgaagcctggtcgaacaaggtcgatctgtccgttctcttccgagccgtcaggatcttctttcgcaccgccttcaaaccggtataaccaaccggagggccatccgaatgggtcgagttggatgatgatgatgatggatgtagaggtgactctggcgaagagctatcccagatggaggcctgtactctggatcggtgatgggtctgaacgggaaacacatcgatccgttccgcctgagctacagattggacttgagtttgagctaccgctaaaggcaagatgagcgggacgataagactcggtttcatttagaaacgaccgttggttcgaccaaactaaggactacggatgaaggagtgatcgagacgattatgagtgaagggatgtacagttgaaatggctgtgtagaagcaagttgctattttcttcctccggaccgaatctaatcggttatgccgatgtaacactaatacccgagatggcctaaggcatgttggacgatcctctgcttgtccccgatacatccaagaatgcacatcctctgatgggtattaatcagctaaataaaacaagacgttgatcttattatttcattctcaatttacatgaccctcctttctttcttcgtttcctctcgctcacccttgaccgagacgaagacttgagctgaaacgagtatgaatgatgtcatttagttctctcctcgggtacgcagcaaaacggtgaattcctcagtgaagagaccagcggatatcatacctggcaagaaagtttatcttctgtccggatcactcactcactcactcactctcattcgtttcgtcatgcctttcagttgtaggttctgctttatccatcggatctgccttggtccttctcatcgcctctctgtgccatttggctgacatcatcattcttcgttcgattaacagaccagaaaaagactagagtaagccccgcccaccttctcatctagcagtcacatggaggctagacttctaaatatttttctcctctcactctcgctctactctagacatttccaattatccccggattcgcctacgtcagtgttaccgggaggcatttccacttttgggcgaaggtctgttctcttctcattttctctttttccctcttccgttgccccgggaacgctccagtcgctatgccagaaaggagaaactgacttgtttgccaatctttcttcatagatgggccggatgagatacgacaagaactagaaacctcctcgactgctttagcctcaagtactctttgtattagacatggctatttaggtcatactccgttttcccctttgcccagtcctagttggaaatactcaagggcctcagctcggctctgttctccttccttcttcttcttctatacacgctactcttccgctctgctcacgctcaacttatttgacgtgttctgtatgtctataacttctgacatgtttgctgaaataagaagagtcaaagaaatccattgcgtacgtgatccacgctgggcggagctgaccgaaaaagtcaacagtctcgaacgtttggtccgacttgaagcgcaacagctcttttacctctcacccactattccctcgacttctgttcttacattcttgatgtctggacgttcttttttctcttcaatagcactcgccttggccgtctgccatgtcttcctgacagcctctctagttaatgctgccaccgtcattagtggactccaagcaggatccctaccggcgaacgcttctcagttgctctcgaacagactcatcgggttttctatcgagacagcctatgtcgtcgactttttaggtacaccggcttcaccaaacagtttggtcttgaacttgatcggtcaggttgccaatcggactggaggaatctctttcaggtagcgtatctccctctctttcttcgcccacgtcaccacatctcaaactggccctacctctgctgtttcttctctttccatccctctaggcctggaggaatcacagtgtatgtatagaaatccctccgagcagttaactcttacgcacaaaagaaaacacccaagttgatgaatttcacgtcttgcagagactcatcgatctatgagccctctttgagtgaacccctggtccggattgaatctgccaccggtgggatctaccaaactcaatacggacccggctttttcgagtcgatgaacttgcttccttcgagtacagaatacatcatggacctaaactttgggaatgattcgtgggagattgcgaaagacgaggcggaagcagctctgagtgctatgaatgggaaaatcattgctctcgagcttgggaacgaaccggatcagtataatgcggctcagaggacacccatatcgagttggggaccgcaggagtataccgaagagtttcttgttcgtcttcttttacttttccttctttccctttctgtttactttggacatgctagctgatgtgaaaggtgtgcttcttaaacctttgacgaaccagacctggtcccgcaacttgacgtcggctctaaacctgagcttaccattctttcaagcgggtgcattcggtaaggtctttaactcgaacccctttctatttttatctctttcttcgtcttttttgtgccgacttgttgtttgatctgaccctctctctaccttttctccttcctcttggtgacagcaaacgatccaacagcgtcggcgttgattacaacagaggatgtcgtcgctttggggattggcaatgattcgtccatcaagacgttctctcaacatgtccgtttcttctctcgatttgtttagagttctgtttgagtaacaatatcctgatctcgttctcgtggtttctttcatctattcttctctccggcccctcctcgaaaccgaaagatgtatcaatactcgacgtgtgattctgctcgggacgagctcgctacgctggatgctctggtcaaccacaagaacatcactggtacagtcttttcctctatttccttcttcgatccatttattattgaacacttagcgtgatggctgacttgttctggagataccttcaccatggttcatgcatgatagcatatgtggatttgtggaagccacagacggcagctgcgaagagtgtaggtgccgagttggtcattggtaggttctcgatcgcttgcccgactgctttcgttactgcttctttattatcgagagtcaaaacaagaacaaggaatataaacgtctttgcacttgtacttacttaattctctgtatctgaacgcaatcaaaaggcgagtttaactcggttagctgttcaggaaaacagaacgtatccaacaccttcgggcaggccctttggtacgctattctccttcacttgatcagaactctacacaaccaatttgtcattcgagacactcattcttgacggcctttgttttggaaacatgtaccaaatctgatcttgtaggctggcggatacaatcctatactctgcttataccaacatttctcgaatgtactctgtatgtctcgtcctatcctctctatctttgtctttctacccttttgttttatattttcttttcgcagcactcaagatgaatactggttgaaattctagcaccaaggcgcgactcttgtcttgcagtcttccgatcaatcaaacactgtcggtttcagttggttcgtcccccccttgtccttcttacaaccggccacgttttttttgccttcctatatccgacccaactcaagccaacatgtccttgttcttttcttcatccttataggtacgactttgtttacccattgaactctactcgaaacgggccatccagatcaaccccatcttttgtcagctacctcctactagccgaagcaatttcctccacagccaacacttcccagataacgtacattcctttggaagagacataccctgacttggcgatctacccgatttacgactcggctgttagagacgtcacagtaggaccagctcggatggtcgtccttaaccttggttctcaatccgatctgtccatcaatgtcacttccctcggtttcacctcgtcctcgggcacgacggtaaagtacatgaactcgacaggcggtccatcatccaccgttacaaccgaggcgacctgggccgggcagagctacgagtccggcctacccgtcggaacagaagccgtctatacactcggatcagacggtctggtcgctctggatgcctaccagggggttcttctggttctgaatggaaactcgagtactagttccggttctggctctggtacgacctcgagtttggcttcgccaacggcgacaaatcttgggtcgggtaagagtgaggcaggaaggaagatgggaggaaccagtactttgtggcttggtggtctcgtttctgcttggattctcattttcctttcctgatcgcatatcttttaatattcatacggacttgctttgtgttgttttctttctgtgtttgtttgcttgctgtttatttatattggacaatttcccttctttctcatcttctctctcgtataccacacacattactttggctctcttttttttcctcacgctcatttctcatcacaccctcccaaggacaagataaaaatcatgtcatgttgaaatataaagacagtattaaagatgaaacgtgatatatggtttataggagagaaagggggatatttctaaatctagttcttggcgctaagagcatcaactccaggaaggaccttaccctccaagagctccaaggatgctcctccaccggtcgacacgtgcgagagatccttctcctttccggcgttggcgacgacggtagcggtatcacctccaccgacgatcacggtcgaacccttctgggtggcctcgatggcggcctcgaggagggaggaagaacccttggcgaaagcagggaactcgaacacaccggcaggtccgttccagaggatggtcttggactcgagaacggtagctcggaaagcctcctgggacttgggtccggcatcgagacccatccatccgtcggggataccctcggaatcagtagcggttccggtctaagagggagttcatggtgataggcacggttcatgagctgtgtgttcaaagcaaagacgaggaaaagaaagaggaagaaaaaaaaaagagcgcaccttggcatccttgtcgaacttgtcggcggtgatgaaatcggtggggaagacaaccttgacgttgttcttcttggccttctcaagaagggcggcagccttctgggctccggcctcatcaaagagagagtctccgatgctcatactctcgacggccttcttgaaggtgaaagccataccaccacagatgatgagggagtcgaccttgtcaagcatgttctcgatgagctggatcttgtcagataccttggcacctccgaggatggcaaggaaaggtcgctcaggggactcaagctagacgaagaacatggtcgagtacttgtcagttcatatcgatcgggactggctcggaaaaagaagcaacgggatgaaacgtacagccttggcaaagaactccaactccttggccatcaagaaaccagaggctcgctgggggagctcgactccgaccatggaggagtgagctcggtgggcagttccgaaagcgtcgttgatgtagaccgttccgagcttggtgagggactgtcggaacttcttgacggcttcaggatcggctataaaggaaggacagtcaaacggagcatacgcatgaaagggggatcagtgttttttgaagagctggaggcaattggggcattggcgaaggtgaataaacaaacccttggtcttcttgccctcagagtccttggaggaaccctcctcctcggcgtagaacctcaagttctcgagaaggaagacctgtccgtccttgccggcggcaacggccttctcggtctcctctccgacacagtcagggaggaaagtaacgggtcgctcaaggagggactgaaccttctcggcctgtttatggcagatatgtagtcaggatgtcagcgctgtgtcgtgatgtgataaattcaggcaaagacaactagagacgcgatctgatgagatgaggagaacgagaggaacgaacgataggcttgagggagaacttctcgaccttgtgtccgtcgggtcgtccgaggtgggacataaggatgacggaagcggcacctagaatttaacgaaaagccgaacgagttttcgagtcaggtcgaagaaagatgaatactacagaaagaattctttcctttcgaacgttcatatctctcttcggacttgtcggagatcaagaagaacgttcgggaagaaaagagaaaacatctagtgaagaatgtctatgacgtaccctgctcaatagcgtacttgacggtggggagggcggcgacgattcgctacagagacgagggcaaacaagaaaaagagagagcgttagtaactcggacgttttctagctcgttggcaagcctgtgttcaagaggtgctgggcttggccacgtttgagatgattgaagatatcatccgggagggagaaagagagggaaacctacggcagggttggtaatctctccggtcttcttatcctgggggacgttgaagtcgactcggatgaggactcgctctcccttgagggagacgtccttgatggagagcttggaagaaagagacattattctgaggaggacgagatgaaagatgaaccagattgatgagcgaagcctcatcggggagcaaaaggatatgtgtaggagtagaacgatggcagcagcagaaccaccaccagcaccaccagcaccgactacaacctagatgaggatctagcctacgtacaagatgagatgagagagtgtatacgagatgtgatgggttgatgatgtgaggtgatgggtgggagaaaaagtgaagagaaggaaaaaaaaacgtaagaaaaaagtatgggaatttttatacttgaatttctatctaagtgttttccccaaggaagaggcggcagttggcacaccttgttcgagaagctgaaggaagcgcccggagcattgtcgtcgagggtggcaatggaaacacggagagagcggggccagcatggagcatggagagaggatggcacagtaagaggacgtgtcaagaggatgtagcaagagagagaacggccaaggagatatcggagggcgcaacccgtggagtgatacattcaccagattgttctacacgttctattacagcatacacacatattcttcctctttctgaacaacgtcctctcatcggatcgcatctctccctctgacttgtactgatcggatgtgtattccgttattccctttactgctcacacccttacatcccgacggacaagggaaaaaatccggatacacctatatgtcatatatctaaagagagctgattgcttttatgtctttctcttcattttcattcttttcttcccttctctgttcatgctgatgacgatccagagtcagtcttgatttccttcgcggccgctcctacattgaacctcttgttgagatcctcataaaactgaacccggttcttgatcgtccccgggagaccaatctcgattccttgtccctccttggtggcagtgtgagcaaatgggcggagctgcaggtcgaatgaaacagtcagaaccaaatgaaaacggaaatagttcagtgtgtgttgaggattaacatgatgggatatgtgtccttggagatgaaagcgaaagacccaacgacagcgaatcgacagaagcaattctcatcctctcccacaaccgtttgtggaactcttttctctctctatattgaaggaatcctggacaacacacagacaaaagccaaagagcgaaggaaactcacatcgctacacttgaacaccgagctgttctcactctcgaatccagggccgataaagatcctgacctttttgtcgtcaatgataaagtttgactttccggccttacccctgtagttcgcgtgtcgaccgggaggaccggtcctgaaacctacaccttccgggaaagactgtctgtttcctgcataagagagagaacatttaaagaggatgtaaggattagtgagcggtctgacggtagagaaagaagaacagagtccaaagagatccacagagcgagagaaaaagaaaggaagaagagaaaggggaaaaaaattcctacaaacccttatagtagtctttgttggcatgcttagacttcagagggaaccgggaagctttgctcaatgcattcaacgtgggtctcatcctggctacgtcggttgatcgatggtcaatggcgaaggacaagtcgaagcgatcaaagtgtaggcaaggtgttaggtagaagcaaccccaagcttgttagggttaattcccttggctgcccacgaacacgctcgcgtacacgcgtctcttgcactttaacctccaatcttcaatcttccatcccactacccgtcgttgccgtcattcggagtatcgtgtacccactattacactcctggtgttgcctctggaattcagactgagatatattagaggtccagatcctgcttagtatcctgtccgtggcctcctcacaaagatggaaccctcgccggcctactccccagtgatcactcagatccttcacaagtcatcttcctcaaacgatctgccctcggtgtccacccttcatggtctacagaccgatctagatcaactacgagccgcagctaaacgaagggttcagcacatcgaaagttcgaaaagaagactagactcactccgggatagagatgctgccagagaaaaggaagccgtcaaggaccgaaagcaaaaggaggcgaccgagaaggaaaaggatcggctgagaagggaaaaagaaaaggacagaaaaaaggaggttgaaaggaaggagagaaaggagagagagagaatggaagaagaacaggaagaggaaagactagtcgtcaagagggaaaaggatcagcagcagcagcagcaggaagatagagacaaagaattggcccagcgagcgaaggaaaaggaagatgcggcccaagcggcagccgctcagatcatggcgagggattcagctcgacagtctgaaagacctaggagtccgtcgttgcctcctcaggtcgtcagacgatcgactcggtcgcgatcaagatcacaaacacccgtgccggatatctccaaaccggtgacccaccgggtcaagctcgagtctggttcgccattcttccgtatctgattctatcatcacgcttttctaacgatggatttcttgttcactgtaccctaggagcgatatccattcctcctgtctcaccaagtgcaggcatgtcccagcctaacgactcggatatggattctgacgcgtcttctaccgtggtgggtgctcctaaaaacaggttcgagtatcctttcttctctctctgcatcaactctatatggtttctgtttgtcttacgcgtcatctattttgtgtgatatcgcacaggaagaaaaagaggaagcgagagcagctggtctcgagtgatgcagaaggagaacacgagctcgttgtgcgaagcggtgctctgtcccgtggacatggtgattcctcaggcaagttctctactcttttctcgtcatactcgagacgcgacatgctcatgccaatctttcctttcttgatatcaacagcggacgtcggtcggtctagagagacttcggtgactaagccgacgtcgacaccttcgatcgtcacaaagacttccccatcagctccaggaggatcgatacacctgacacctcctgtagctcgaccaaagatcaagctgatcaacggctccaaccgagctatttccccattagcgaccgtctcttcgagttctacacctcgccacaaagcgaattctcactctccctgccctactcaagatccttctcttctcgccaccgctgtcaatcctacttctatcacttcttcttcttcttcttctttccttcatcccaatccctccaaccttcctggctcaaacataaacttttcactaccttctgttaccgcttcaaatggttcagctgtcagaacactggtccctccgaaaccagagattcaaaaaccgatgacgcccctgccgacgacacaatccgaggtgaacgaggatttcacccaagccaaaccgggaactcagctgttgttcgctacattctggcagacggccgaaggctacgtccgaccgataggtgaagaagatctcgcctttttgaagacatacaaagaggaagacaaaacgcctttcgatgttcccgcgttgggaagacattactcagagatctgggaggaagaagacaggttgatcgagctgggcttgcccctacctgatccgagctctacaggagggatgatcaattcgcctgcaaagatcaagacagaggacattcattcccgacaggatcagtcgatgatggatcccaacgggtcgagaacaccaaacgatgctaacggagccaccgggctgataacatcacaaggaggaccgaacggggtgaaccgaagcttagactacccacggatgggtagaaagacgtttcattataatcccagacgagatatgaaggatgaagatcttgtccatcaggatcgaggcgaaggaccgctcatggagagagtgctgggtggattcttgcgagtccctagagcacctagtggggggcagagaggagtgatgtttgaggagaaccaaatggacgaggatgatactccagaccgtaggacggatgatcggacgaaatccgaagttgatcaaccctcggaggacgtcgggttgggctcgttagaggacagggtcaagaaggagttgatgtttgtgggactcttgggaaaacaagaggtgagtaccgggctgagagctcgtttcttttttgggtcgtgtttcttccgctctcatattgaatcaatctaaattctcctctctctctctctctgtgcgttatcaacaggtcgattggtcccaaagagaggatgacgagatcacgacgtcactccgacaatgccaaaagctgttaaaagaacaagtctcgctgaacgaagcgcgccggtcgattctccttgagattgcgaaagagcgattggcttactctgaataccaacaatgtctggacggattggaccgaattatcgatacctgttgggccaaacgagcaaagcagattgcgaaacagcaaaaacgaaagaaggaagctcacaccgccgccggcggaacagggccatccggtggatctgcctctggtggtgggactggtgggggaaactcggcaggaccggggacgtcaacgatgacaaagacaaaagaacgtgagcgcgaacgggacgagcgggagaaggaagcgacgaaaaagttggtcgagacgatcaagctcgccatgggaaggcgaaggctgatggtcacccatctgggaacgatgttcaaggatgaagaagaggaagaacctggtagattcatcggtctcccggtcaggagtgtgtatgaaggactagaggacgagttcaggcaggtcggtctggaccatctggtcgagaatggagcgaagccgaggcgggtgatataggcttgctcatagacttgtctctctgtttgtattcatctctctgtctctctgtctctctatctcttcctctctatacctttctatgtgtctgtctcgccctctgctctcgattgtacatatgtaaaccaacatgaatatgtttctgtacgaacgctgcaacgtccatcaccaggccgacgaaagccgaagcgtaaccaccacttccctggttacggttccgtccgaggccgctccctcttgaatattcccagctcatcccaacttgaacccaaccaaccatcccacagccggtcttctctctcatccattctgttctctgcaatgcgtatcgcctctcagcttctcaaggcttccaagcccattcaatcgttcgtgtctttgctttgttttctttgttgtttgggaaaaaaaagctgtctccttctcgagcgttactcgtactaggacgtcatctctcctcacccttttcatattcgagccaatcccgcccatccggttttcaaacccaacagtggaactcgcatacagatgaaagaatcaacatttaataaactaaactaactctgctcttcctcttgttctgttctttctgctcacacacacaattacacacaaccccaggcatgctcttttggcttccaaggtctcagctgcctcactccgacagttctcgtccagcttagtgttcaacgctgagcgagtcaaggttcccaccatggccgagtccattactgagggaaccctcaagacctggtctaagcaggttggagagttcgtcaagcaggacgaggagattgcgtacgtcctctttttttctttctatattgttagtctttcttcaagctctgatggggatagagtcggaaagtcacggaggaagaaggaaaaaaaaaagatgggaaaaagttgatgaatgataaaccggcaacggagagcgcagccggaacatctgaatgacccgctgatgtgaaagcgacagaggggtctgctctttgatactgtttgggttcatccttttttttttctttcacaagaacggaacgtgtcaagcaaaggtctgagatcttacgagaaaaagagcaagatagagggccgtttgggaactgggaaggagggcatcggcagatcttctctcttgtgctcaatcaacacattcactaacctctatgccatccttcgctgtccgttcggcgtccttgctttctacaacagcaccattgagaccgataaggtttgtcttgatctctactagcgtatctatcatccaatcacctccgtttctacccgttcgctgatcttgattagcttgcttttaaaaatctaattgtgaccatttcttatgatggctattctctacatagatcgacgtgacggtgaacgctcctttctccggaaagatccttgagcttctcgccgaggaggagtcgaccgtgaccgttggagaagacctgttcgttttggaggctggagaggaggaggctggttcgtctttcctttgtcccttcctttatcgatcgttagctagtcgacccagccctttctctaagagcgtttcatcagctaacgcgtgaattatcgtctgtcatcgttttctttcttctgcaggttcgtccgaggctgctgccgagccccccacgtcttctgcgtccgagcctgctaaggaggccgagtctggtcccaagaagaccgatggtgagaaggcccccgagccagccaaggccgcccctgccgctcaggacaagccctcgtcgcccaaggagagacaggagagtgcacccaagaaggagagcccgcctaaggccaagaaggaggagaagcctgtcgaggaggccgtcaggggagccagaaccgagactcgagttagtcctctttctcttttctcttctctattacattccattccatcaaatcgttctttctgttgacgtaacctccgatggatcgttgtctcgcgtaaataggtcaagatgaaccgaatgcgacttcgaatcgccgagcgactcaaggagtcccagaactctgccgcctcgctcactaccttcaacgagatcgacatgtccgctctgatggagttccgatccctttacaaggaccaggtcctcaaggagcagggtgtcaagcttggtttcatgtccgctttcgccagggcttctgtgttggctctgaaggagatcccggccgccaacgcctcgatcgagggtcctaacggttcgtcgatcttctttgtcctctatacattctgcctttgtgatgtacttactcaatgaaacctgctcggtcgacatgattaaattcaggaggagacaccatcgtctaccgagattacgtcgatctttctgtggccgtcgccacccccaagggtcttgttactcctgtcgtcaggaacgtcgagaccctcggcttggttcagattgagaaggccatcgcggatctcggagtcaaggcccgagatggaaagctcacgatggaggacatgtccggtggatcgttcactatctccaacggaggtgtcttcggatccctcttcggaactccgatcatcaacttgccccaggccgctgtattgggaatgcacaacatcacccagcgagctgtcgtcgtgaacggtcaggtcgtcgctcgacctgtcatgatcgtcgctttgacctacgatcaccgattgttggatggaagggaagccgtttctttcttggtcaagatcaagcagtacatcgaggaccctcgaaagatgcttctttccgccttataagtagtagcggtcgcagtaaggggagtggaggagcgcggtcgaggtgatgagaataggaagaacaggagacggctgccggtcgattgtgatgatgttgttcaggctggttgagcgggcggtcaggagcgcatggttgaattttgatttccttttccattgtttacttcacacgcttctattcatcccactcgaattcggttctttctctctctaaacgtccacaatgtatgaacaatatgattgcctagatatcagtccgcttgccttcttgtgacatagagctctgtgtggatgtgtgcgattgggcccaaacgaggtgacgaagttaacggctttgtccgaatggaggctgaccgtctacgatttacatcccaaccatcacatcaaccatcaccgcaactgccgcttcatcatgcttgctacaaacacccattcatcaggtctaacaacagcacaaacatcaacaccaacatcacaagtcaactcgtctacacatccaacagctccatcaggtctatcagcttggacgtccagttcgggctacgtcttcccgccgatctggtcgtttcctccattcttcacgtaagtcagactcctcataatttcttctttgtagcctattcgtcctctcccaagagcagattgattctgaagatctgtggattgacgattcgatgcatccgacgtatatatttctgtccgtttatgacggaataaagtcaacaacctaacccagagacatgtcaacatcagacaaatctatggacaaacttgatactctcctgggcaaggtttcacagggtattcgaaattgccgtcgacggtggatccatctctactggaacatccataggagctgagctaaacggagtgggggaaaatgcaggtgtaggtacagcgacgagaacggggacgaggacaggtggaagggtcggggtttgggagaatgaaaggataaagagaaaggtgggcagggatttcgctagggttttgatggatgctctagtccggaatggtttgtcctcctttccctttgctctttctttctctgtccctcctctttctctgcgttcatcgtctctcaccgaaaaaggaaagcacgaggacgtttgactgactatcatcgttttacctgagggccaaaaggacaggcatcggtaatctcaccagttcaaacatcgaaaacatcaagagaacatccaacggccgtccttctctactggctcaaaccggatgagtgggcgtcgattctatattcatgggtgcgcatcctatcagctctccatcttctgtcttaaagaactagtctccatggactgaccgagatgtttctctttgatcgggtttgggggtgttgatacagatcgtggctaccggtcagacgaaatccatcttgacattctatgatctgcagtcatcagaaaccggctctcgtacgtttcttttccccctcctccttccttcgtgattattgactgatccattcattcaatctcctatgtcacaattaaacctcgaaattgaaacggaaacattttctccaaagcggtacatgacctcccattaccactcctccgatcggctctccagatcctcatcaaacaaaacaaagcacaagtgttcaaatcaacaggagaagacggcgaaactgatggagagggtgtcaagtttgtgtagcaggtttcttcctaggaatactgttattaatctcactatgatgttcgcggatttccctgtgatgtgtgtaggcttgctgtgcgcgagttcgactggttagacttggaatatcaagtgaaggagggcggccaaagaacagttcggacaggcatcctttccatcgaatgagtagaaaaccgagtgataaaataaaaagaagaacgaagacgaagagtaagcccaaatagaaaaaggaaaacagagaccaatccgagagaaaatggacgtgaagagtattcgataagacacgagagtctaagaaaagaatgtggtctaaatgagaggaagtttatgacttgactttgatgtgtatcaaccgagagggtatatatatagagattaaggacatttttttccagaatgaaaggacgtcacataatagggagtttagagacaataaagaggctagctttgtatttggacaagagacggaagagaggcgagaaagaaggcaggacagggcagaagaaggttcagacaagataaggcggtctatgatgaagcgtacaccttatagttgaagttgtactctgtcgtcgtagctaatcgaaccaaaaagacacagcggagatctagtgagcaactactcaaacgcaccattaaacacaagacaagggagaagaaaagcaaacgcactggcaaacgtgtagttactgggcgagtaatctacatacgtcgacccacttctggtaaggacgactttcatcccttgaccgccaacgagaggagaagcgagcgaagatattcctgcgttgacagagaacgtagtggaagacgtcccactggaaagagtcacggtcgaaggggcagtggcgaagacaagggcgaagaaactgttgatctcctgtaggatcgtaataagaaatagaaataaaaaaggttgttcagtcgatgtaccgaagaagataagaacatgatggctctcgagcaggaagaagaggctcaccgcagtatttgaaccagaagctccggtttgtgtgagagtaggaggcgcaccggccgtatcagcagtagcgacagcagtgttgacgtgaggtcgagccgacagataaacctgtagatgagttggccccccaaaggtaaatacacacgtcatcagctagcgaacaacggtaaaaacactttgtggattaccgaccttatcacatgtgatcgcagggaattttccagtcttgaaagcagttgtataataagtatttatagccaagtacactagagagaggccataagaaatagggcaagtggttgagattcttgcggttgacaaagagacacagaagagggaaaagagagtgattcaccttgatgatcgaatccgtcgacccaagcttgactgttaggctgcgctccgtggataggtcccatgtaatgagattcaccataatcgttccaagtgatctgttcgaccaagtcgaactgatctctcatcgagatcagttgttgccatcgaagagaaagcggccagttatcggattgatagatccagttcttgttgtaactattcacgccgtaatgagtgaaaaataatggctacaaagcgttggaaggtcatgttgagtgtgttagtccaacaatgaggctttcttcgaagaagtgtatacgtctcatcacgaggagaggggagaaaatatcgttgaagaaagaagagacgcacagagatggaaggcatataggtctttcctttagcgacagcgttagctatccaagttttgtccgaactggtcgtaaccggattggcatccatactccaagcactattccagttgaagatcccgtcgtaagaggtgtagctgtcaaagcctgagaagaatgcaggaaggaaatacatctgttttgggttcgtaccgagaaaacgtagtcagtataccgagtttgcgcgccatcagcaacaataagaatcatcaggacttacagaaacaccttttgcagaaagaacacttcgaaggtttgtccaagcgccatccccacaggattcacctgcaaaagttgagaccaagactttattctggtaataaaattggttggcattggcggcataattcgagatcaggttggccatagtgctggatatactgccgcatgaccaaacgctatgattggtaaagatcaaagaaatagaactagtcaatctaaacatcgcaagaaactgatcaggctatacaaggattcttctaggacgaacgacatgtctagactgtagaagggatttgatccagccagacacactcaattagaaacaccatacgttatattcgatcggagaatgaggctgcagcacttacgagaagaacagcttgaaccctttgccatgagctgcagcaactttataagcggacgcgacttgagttatttgccagtcatccgtcccgatgttcaaagcaaatgcgtctactccagagttgtacgccaacgtgctagagggaaaaaattacagttcagttaggatccgatgataagaagaaacgagacgaaaagaaagaagagtcgattggcgagagggggaacgtacatatcttgtaaccaatctgattcggtgtaagggtatgtgttaccaaccatgaagtgagaaattatatactttgtcgaactcgaggaaggagcggacaaagtaggcgtgtaagaatttgttgaggaacatggtcctgttctggcgttaggaagtgtcggcgggattgagaatgaatacgcagagagtctagaaggaggggttgatcagctaaaggataaagagaagaatccgactatgagtgatacaatggtaaaagaatgttactaacaagtatgctcctccacagatttcgctagagttaccagcgcaagccgtgctgcaacctgaagcggcgactcctagcccagacgtgaagtcgtttccgcaataacactatgaacagaagaaattccaacatctttcaaggcccatacttgacataacatgatgaagaagaaggagagaagaaaacggatgatcgtacctgacttccatattccagacccgcgatggtgtagctcatacttctacaataaacctcacagctctcgattgtcatcgaactcgtagaggtcgacgccccagtcaacgctctgctcgatccatccgtcacacagcctactgaggtccaaacggtagaggatgtgtagaccgagagtaagtaggatcctccacatttctgagtgccgtctccaccgcagatgctgttacaattagaagaagtcatgagtgaggcggaggaactgagggtattgccacagtaacattcggtcgaatctgtcgttgatgccggtcaggaaaacagaaaagaagaatgaggacacaaagaagggagaagagggcccaggaagaaaaaaaggagaaagaaataaaaagacgtacattccattcctgcgtttgaataacctttcgagttgcagagtgcaatacaagactgaacggtcataccagtcagaccagtcgcgctgtaatctgagagagtccgggttgctgaatccgtgtagcaacccaagtaggaccagccagcgacattagggatcgagttggatgaagtcgattggaagacagttaggaggtagtttccaccacctggatcattcatgtttcccgagatgtgtagaattgagaatcagagatgtgattacttgagacagatgccatcaattgaagagagaatctcttacaagcttcagtggcgtttgctaaagcgcaaagagacagaaaatgaggaggaaacttaaagtcaatatttgtcctgatagatcgcgctgcatcagcttccatccgagagaagagaactgaccagcacaagacgcggtacacgacgcgtcacccactatagtctgcgagttagagattccatatccacagtctgtaggaaacgaccatacacatgcattcagttaccaatcaatggcgagtatgagagaaagagaacgcgaaaggctgacagcattgatacgaatctgttgaacacatcggatgaaaaagcgccgaggtcaggccaatcgatctgtatgaaagtgaaggcaggtacgtagagagaaggcgcttacattccgttccggaaaaagtgtatcctttagcaagacaagtggctgcacaagccgcgttggtcattcctgagatgtatcacggaagggttctgttgtatcagcatcttgtgaaccccaatgaacgggggccagaaaagaaacgagaagacggaccggcggtatcggaatacgtatatccggtcaacgctcttcctgctgaagtgtcagacacacaaccataataagttgtgcccgatggggcgctaggaacggacacaatcgccttgtagaccgagatcaggtaagatccgccgcaagtctggctggaactacctccgcatgcagatgagcatgtgcccgcagtgagggaagaaggaagcgaggaggcgcagtctgttgtgggagaataatagaagaaacagtcgggacagaggaagagggtttatcaaatgatgaacgagcgacgttaaaattagaaggacaggaagagcgtcaagacgtacaacactctgttccatctagggaagaggaaaggaaagaaacgagaatgaacacgtttcggcgcgaaatttgtcagtaaccgatgatcactataagatattcatcttgaagagcactgcaagaagactcacattccattccagcgtacgtatatccagcccgaaagcaatacgacgtgcacgaatcgacagctttgaatacacgcgcgagacttgcaatgagcgaaggcatacgtctgaacagaggcaaatgatcgggcttactcaaacttgaagattgtgtcttgatagttcccaacactctgcttgacgcagaatctacataacacccaacaaagttgtacgaggaggacgtggcaattccagttgacgtctccttatacagatttaacgcataagatcctccgcaggtcacggtagtgttccctgtgtgtttcgttcgaccgaacaaggtcattcgtgcgtgtagaaagagaaggtcatcgttggtcagtttggcagctgaggctaaggatatacagctgtagaaacacggacctccgcatggagttgtacacccagaggaagcggtcgttccttgaccgtttgagagcgtgtttccacacatgcactgtgtgtaatctgggagagaaacgacttcaacaagactgcaaaacaaaggaaagagacaacacagacgcagaggactcacactctaagccagcgtagatgtatccttgggagagacaagtggccacacagagctctggcgtcattgagcttgaatcgacagagtagccggtcaaagctctagctgaaccatcggtcacacaaccctggcttgtccacacggttcctccagaagagatcatagtaggcggactagccgacgcccgtctagagagcgtacggctgattcgagttgagtttccaaaggaaagacggggagggagaagattgctgatggaggatccctggtggggttgtcgtcgaggaccgtgggtcagtcttccggtgactgacagaggaaagatacagagcagtgagagaaagagggagaggtaggggagcaggaggaaagattgcatggtgcctgttccgatcaaggccagatgaggaaagggacaatcaggaaaggagagtgggccgatagaaaggaaggtgtacccagagcaaggtaatttgccgaaaacgagtgtggctagtttgaaggaaagcgaatgtgtgttgtcggaagaagaggaggagggaacgaaaccaaaggaagaagagagagaaagaaaggaaggaaagagtgctgatggaggtgaaagagtgctgatggaggtgaaagattattccgataggaacatgcgaaatgaatagaggacgaagaagactcgtcgaaaccagtccgatcgagctctaccggatgtacggatgctagcgagggtgctgctgatgatgatgttgttgttgttgttgttgttgttgttgttgttgttgttgttgttgttgttgttatctgttgccgaagctgaaacgaggaagctgccaggagacggagaaggaggatagacaagaacgggaagagaggagaggagaggaaaaaaaacaggtcaagatagaaggcaaagaagaggagaaaaaatgatataaacaaaagaaggtaaaattggcgaggcgttcgggcttgcgagaaaggatctgactgagccgaagaagaagagaacgaagaacccgaagagactgagggatgagacggatgaaatccaagatgggttgacccgtcaagatatcagccggcaaaaggtcgcttgtcagatagaacggaagtcccgacaaggatgtttgatattcagagcgctcaattagttggcacagaagatatcttcttcggcgtgctcattagctccagctttgattagttctctctttccctctttcgcctctctgccgaggcttgtgtttcaagaggaatgtctgtttgagtgttgaacgagaagagacacggataaggttgttctagtcctatcttgtcttgttttgatgttttgatgttttaacgttttaatgttttttgtccgcctcgtcggagtttttccttcttgggtcgatcactgcgctaaattgattccatcctctcgcgttcttctgagcctgctggttctgcgttgttctttccgaagagaagagaagagaagagaagagaagagaagaagtagaaagaaaacatgtcccgagtatcagaggccacacattaatcccgcctcgccaaaccaaaccggcctgcgaatctgccgacagagctcgtccagccgtccttctttattttcctatctcccggctgttctttcagattcggagaccagcccatccatcctagatcagtcttccggatcgtccgaactttgtggttcttttgttcgttggctgacaacggtcgataacgagaatgagaatgaggccgagattgaaagcgggaaccaggtcgagatggacgagggcaaagctcggtcactgttgtcagctccgtccccgcagtatggacaggaagctcggaaataaacgccgaagagaaggtaactttagggagaagcgacgttgattttgacaacctcggttggctacccttccttccggccctaggtctgctgtcgatctccgttgggagaggaggtagaggaggacgagggaacggtagaggcaccggtgctcgtgcaggcgccggaatacgcccatgccccgaaccctgaagtttcaaatgaccacaggctgcagaaacatcggtattcggaggaaaggtattcggttggagaacgaagtcttttctcgggttatctagattcgcaaaacacgatcgggtgatcggcctcggactgaatacttctgtaccctgaacgggtgagggagtggtcgagctcgagatcgattttgaccggcacacagcaggactagacttggatccagtcaataatgtcggtggtgacggtggtgatgataaatcctcatcgatgatagtagtgttggtactgatcgaatcagagaacagcgaagagaacaaactcgcatgcgaggcgcacgtatggaatgaagaatcgtcgttctcctcatcaattaacacacataaatgaaaagaaagcgttagtcttaaacgacggccaagagcgttagaaacaagggaaaacaaataaaagaaggcttccatacaagattgtcttcctctttgaatgtgaaatcaagtataatccgctctttcgaatgtcgaggaatcccatcaagatggaaccccgactgatcaagcgctccaagtcgtagaagactactcatcctcaatttaccaagtatgtatggagtgaacgagaaggagaaaggatgactgaatataggaaagaaggacaatgtccactctgtgatagatcgttcttctcttttttatccctatcatgtcttcccgtttctttcgcctgatctgaatgatttttctttgcgggaaagtcgaagttgaatgactcccgtccaaaaaagaaaacacgacattcccgtccagaaggcagtaaagacagatccgagagaaccgcctcgagcagatcccataggacgggacgagcccgcatttactctttcctgatccttctttccttggctcagacagcgagagaaatgagtgagaaacacttgatcacacggttatcctgtgcgtatcccttcgtattctgtcagcgagatttctgacttcagaaaatgccgcccgtttcgctcaaacatcttcattcagatttatcgttccagaacgaaactctacacggaagcatgtctcagacaggcttctgataatctttcaaagcttcttcgttccagctgaggaatttaccgctgagatccatcggtcctcctctagctgccagcgccgcaaacacatatccaggactagaggtgtcaatcaaacacacacacacaccccatatcagaatgaaccgaacaatcagtctcatcacagtaacggacgatagatacaaagatacagaaaggaaagacagaacgtaagaagggaacagactcttcgggatcaagcaattcgccctcagcatacaatcgttgaacattttgataatcctttggagtcatgcattcctctcctgtcgatcggatcaaggtttgcatctaatcatgaatttcacacccgcaagaaaggaagaaccagattcgatatgtatgtcaaccacgagataaactcgaaaagggatgacggaggcaaagagagatagatcgtacatcggtattgacaactccgggtcggatggcgaccgtcaagacatctttttcttcctctcccagcgtactgtacatgaatggattccaaagtagtaaacaacgctcagtatgcctcttcttatcagttgacaggagaagaacgaggggaaagaagagtgaaggaacataccgagctaatgaattcatagctgcttttccagtcgcgtaaactccccagccctgcgttcctttgacggaagccccactagagaccatgacgatcgatcctttggatcttctcagatcaggaagagccacctgaatggtatgtaggagtgatagaaagtttgtttccagatgggcttgccatttggctctggataacaagaacggaaacgtacatcaatcagtcaaactcggcaaggcgacggcgacgacaacgaaggaaaacggcaaacatacacatcaatgtcggctactttcccgagaggttccaacaccccagcatttaaaataattgaatcaacaccaccccaagctcttgccgactcgacagccttctcggaaacatatctctcattcacatttccttgaataagctgaagtctgtccgggttttgttttttcaagtcgagcagagcccgaggaagtgatcgagagatggatatcacctgggccgagaatggaggaagcagaaggagcttgagaatggagaggccaagacctcgagaggcgcccgtgagaatgattgtctttggcgacattgcctcgttcaaggtctatacgagatgaagtttgttgcagacgatactagcggtatcaaagtgatagcaacatgtcaaagattcttagggttaaatgtgctgccggatgttacaatgacgtcaatggcgtaacactgagtttgacattgcaacgatgcactgtccattgtttttgtacaatcattttataactaaaagcatcctagtcggaagaataataaagatagggctacatatagagaaccaacaagtaggcagaaagaaagtaataatccgttacaagcgaaaaactctttctagatcttgtcctcaaccttgggggcaccggtgtggaactcgtgggagtgcttgacgtcaccgtggttgtgaacggcctcgccagcgttggtctgggacttgaactggtcgagcgagatggtaggaagggtggtggtctcgtggacgatgggggcctcgtgaaccttctcgtgaacagggatcacgttgtgaatgacctcgtgctcgtgaacgtccttctggatgacgggctggatgtgctcatggacgtggtggtggacgtgctcagactcggtcacaccaaggttctcaccagtctgaatggtagctccggcctctgtatagtggtcgtaaatatcagaattagaatgtgttgaacgatattatcatgagatgataaatgaggtaactaacgtcgggagctctgaatctggctctgctgctgggcaaggagggcctccttctcaggagaaagcttctcaattcgctctcgagtgacctcaggggcaatctgggtaacgtgctgatcggcaaggtgctcagtggcagccacaggctgaactcggtgctggtggtgatggatgtgtcgctccttgtcaatggcctcctgggtagtggtgtgctggtgagtctgaacggtctcctgggtgacaggggcggcaacctctcgatcgacctctgttttgtggagttagagaaagaatagatgggaagagcgtcgatcagatggatgttataattaaaacagacgaaagaagatcgaccaaaaaagagtgatggaggctaaccagtggtggtggcctaaataaaagtacagcaaggacaaaattcaaaaggagagaaaaaaggatcgagatgggtaagctgagtgtaaagccacttggatgcatgtatgcgctaacccagaatagagatgagatgggacatgggagatggaaaaaaagagatggaatacatacctggtggttagatccgaggaactccttgacagtgttgatggcagaagacatgcttatgaagagatggaaagagatttaagaaagttggagtgtgtgtgtttgtgtatgaatgtgatgagagaaagaaagagaaagggaaaagacgctcccctgcagaaaagacgattcttataggaaacctgatgagacaaaaaatatctgtccgactaggtacacaaaaaggcacaaaaagggcacattagtcgggcgaatgatgcgaataccatgcggtcattctgcggtcatccaagtgatattcgaggatcgcagtccggggcacgtatactttatatttggtcatcgttcttctctctagtggctcctgtgctcgttcgggaagtagggtattccctcctccccatcagagcagtctggggtagaaggatgagccagactgggcgagttgacctaagcgtcatcgtcacacgtcatcagctctttccttttctctcttcctttctctcgcccgggtttcacgtgaaactgcgcaggcccagtgggaggatgacggccgagctggaaacgatgttccttggagaggtgacgtaaacattcattttgactgcgcgcattcggctatattctccccaagttcttatccatcaaccttttcatctatccatctttcgccgtttcttcgtctctctttgttcttgtttccaatctatgcgaattaccagaaaaacatgcatatcgcaggtatataaccctacgagagaagcgctaactcatcatcccccctgaaagcgagataaactcgcttggaagtagcttggttgatctttcgtttgttcgggatcccggtcttgttattttggatctatgcatcacaaagaaacaaaacaaccagaacatctaagaacggacggaagatatctcaagacagaaaaccaagaaagaagaacatacgtaccaaaagctcactgatcaacgtctgtccctctgtttcgtcctgtccctcttgtgccaaccgatcccaagcatccatcaaagttctcaatgtcgggtactcttcaactacggccgaactcgtagcgggtgtcaccctggggatctgctcgagcatcttccggtacgtgtctccgaatgaggatccccgtcggaatgacttgtcaggatggaacgacagatgagtcttttcaatcagcctaagctcgacaagtcgcgaggcgggatggcaaagagaaagcgaagcaggaggtagcgtaagagtcaaagaaataatgaagagaaagaagtgctctcgtgaaatggacgaaacttgtaaggtcggatagccacatcccctactgtactgatgattccctccaacatctggctgtccgtctcggctgttgacgcacagatgcatagtgtttaacggaggcgatatgcttggtcagatacaacagatcaaagagaaaatgataaaagaagaacactgagagggacgttgaactaacaatgcatcaagaaacacgactctgctatctgtaatctcaccagcgctttctctatcatctctggagtgacatccgttacctctgttgccgtccccactctgttagtcttccttcctgctctcccagtccgtctacctgtcatctcatcgggcggcgcttcgagcctacctcggatcatcgccgcgaactctctgttctctctgtttcgatactttctcgcccaaccgttaaatccctgcacacagatcatcacctgcgctttgatacccaaccccaactctttcctcagctctctcggtaaatccaacagatcatcctcccttaccagactgacaagctctggggtagacagatagatcagggcggtcgtctctggtacgatctcttcggcctccaatggaagaaaccgtttgaggagctcatcatatcgagctctcagccgacgtctaaaccggatgacgttcgctcgctggaaagggaagaaagataaactcgaatgacgttcgatgatcgcttgttccaactctggtattaaatgatggattgaagatgatgaattttgagagggtgcagagagttcgaccaggagctctcgaaaggcttccgtcttgtctgtccgaagcttgttgacttttagctctctcttcttggcctctcgttcggcctgtttgagtgcctatttataagaaagagacgaagaagtccccaagaagagtctagttcaatcattcacccttcaggagctatggaatgacaatcggtgcaactcaccttggcgcgctctttctcttcaatagcaatggcctttgaaccaggaagaaagcacacatagcatctaagcgtgataaaccgagaagtagaacatgacagaagaaaaaggaggccaaagggagacagagacgaaccttttcttcctcggattttccctttaagattcccctcggtttagcagccccaatgatttggtcagagatctccttctcactcctctgctccctctccttgctcaagcccttctccctgcctcttgtcaatcgaacgggcggacgtcttttggtctcggataacggacctttaccgaccttctctcttacttgcgcttgtgctcttgctttggtctttactctctcctcccaaacgtccatctcaagttcatcctcgtcctcgtcattattcccaccctctaacctccctcctttctctaattcattgatccgtctcgactttccaccatatcgtcgtgatctgttcagaagcgcgccgatcggggatcccctagatgttgttgctgcagatcgatcactgtcttctccttcgtcatcttcattttcagatagaaataaaccgatccgtttcctagctggtgggctgatagacacagagagctctcggtgtccggaatcatgtctctgggttgcgctcgtcaaggagatcgaaggagcgagtttgggccggacgaccaattcagaccgctcaggtctatgctgaaggcgagacattggttcagatgtgcctgccagcttgtcaggggtcaacgaaacaagcgaggatgaagaggaggacgaagagaaggaagtcaacgaggaagacgaggtcgaagctgatactttggcctgatctgcctgtggaggtgtcgaagagataattggttcaaattcaccaccatccgattgggcgtcaacggctgggctggctaaacggatagagctcgtggacgacgagggccatggcggcgtttctatcaacaactgccctttatcggctcgagaggcatcacgatcgacggttgccgttgccgaggtgagatcgacaacctcagtgatttcatcatctgatctcttatggcatattggcctactatccgaatgatgacccggctgagtccgtatcggaggtctgttcctgacaacagcaacgacggctaggccagtgtgtctcgcaaggatcgttccgtttcgagtgtcagaggaagttgatcgaggaacaaagataacgtctgacgggtctacttccaagtctgtcaaagagtctgaagaaggtatctcctggagtgcatgaggattagaagacgaagtgacctgaacgagagagtcgtcaaaagtggtggtgatagaaggtagtgggcatggcctggatgacgaggtccaagcgattctctggtgatcgactgagggaagcccaaaggaaacatctccctcagatgaatcttccgctactgcttcatccgaggtgaggatcacgatggtctcgtccatcgatacgaggaagatgtattttgcggatacgactgcaacagagagagtgcaagatgatcttgattcacactcgcctgtggggaagcgagttcacgcgacgcgtctggtcacgtgagctgacgcgtcccaaccacgcatctgccgcagaaaaacgtctaatctgctgggagtacgaacggatattctgaatgatagcgccggttgatagagtacattccgaggacaaacgacacagatgcttatgggttccagatataacggatatatgtcagagctgtcctctcatgaaacacgctctgtggcacacgtaccctggtctctgggtgagatgatctatcgtaaggttgggcgcgatcaactatggtgtgataaagtacgtttgtttcccgttggaactctcttatgatgacgtcgtctgtctgatacaggataaacatacctgcagtgtatcagcacagatcatccgagcagtctatctgggttgattatatgactgtgatttgtgaatagacgatgccagtgccgatacaatagtaacacaaaagaactacaaaagaaatccaaacgaactacaaaaagaactacaaaagaaatatgaaacatttcaatacacttcgacacaaacgccgtcaactttctgtttctcatcctccatccgattgcgtccatccatccattcgtcgtatcccgttccatccatcgtacaatccatccgtctttctgaaggcactcctctttcttatccggccatcctatattcccccttcattcctatggtcgatatggacgatccaattgcttcgacatcacagtcttttcgcccatcgaaaccaccgactgtgatcccgtcttcaggattactgcccccaataaacacatcctcacaacattcgctgtcgtttgcctccgcctcttcttcatccacaccctcctttgtgccttcctcaacgaggacagctttgtctcgtccagatccaccttctcattcgtctagtataccctcgttctctcctcgtcggccagtcacgatgtctaacgcgtcgtatcctcctaatcaagctgtgtcagcttcttcgtcgcgttctcaaccctacaccttcttttcagaccattcgtcgacctcagccccggtcgcttcctcttcttcatcatacactcgtagctttggtacgagtggaccagagtatgctcatagtccatcacccataccgtctggatcagtcgaaagggtcactacgccgaatggccttctcaggatcagcagcccacggagtgggaagcggaaagctagaggctttggcgacaggttagtttctgtcttacttctattttatcctctcagtactcgtgtcctcagcaagccggttcaggatgggcacttgggcggaaaggtgtcatacaaatggtcgaggaagtcataaaaggctataccgggtcggatggttactatctcagatgtcatcctgtgctagaggagtgtatgcgccttcgtcggcatgactgagaccttgacgactcatgcgtacaaatctatcggacacaacgggtccagtccctcccgatatgaattcatccttccgtttccattcgtttgtaaagaaaaatgacatgttgtagttgacgcaaataaatctaccttgcctcgttagattcattcctacaagagacggatccgacctacactctacgtaccacctcttagcggatggttcaggtggaactccgccctgtcgaacacaacgacggcccaacggtggagatggaacggatgctcagaaggacgaagcgaacgagaccttctcgtatctactgaaatctgaactcttctcaggatccacaggtgtcccgagatcatccccgagttccttccatccaagcgtctcaccaggttcattcttgacgtcgtccgcttccttttcgaacccacatgtacccgactccccctctcgttcacactcacattctcaccgaccatctccgtcaaattcaccatcaggttccatcctccccgtaccaagcacgcctacccgaaaacgactgtttacctattcgtctcccgcttcatcctcccgactagcagccatcacgtcctcctcctacaacagtggggctcatccaccaactgcttcagacttaaatgatccgactcacgaagcatattctttgagtccggtcaccactacatcccaacgggttcttctgtctcccagaaagccaagcagactggtctctaaagggccattcaaagttctagacgcgccttatctggcagatgattattacctgaatttggtcgattggagcggaacgaacatgttgggtgtagggctagcgagttgtgtgtatctttggagcgcgaatacgagtaaggtgacaaagctgtgtgatttaacaacggccgctcaagtcgaggacggtagagtgcttggaggaggtgggcctctgcaaccagagaaagtcaccagtctgaattggactgctaaggtcagtttgttcaccctttctaatttatccacgcctttctcgtttgttgatctaaattatcctccttttctgattaaaaagggtaacacggtggctatcgggacaagtaaaggcgaagtccaaatctgggacgctgagaagtgtaaaaagattcgtacaatgaccggtcacactgcccgggtcggctgtctcgcctggaacgaatctgtcctatcttccggttccagagatcggcatatctaccatcgagatgtccgtgcacccgagcatcacttccgacaattggtttctcatcgacaagaagtttgcggtctccgatggaacgtagctgacaaccaattggcaagcggtgggaacgacaacaaactctatgtctggcagggtacagattcggtcgatccgatttggaagttcggggatcacaaagcggcggtcaaggcgatcgcttggagtcctcatcagagaggtgtgttggcgacaggaggaggcacggcggatagaaggatcaggttttggaacacgatcactggctcgttgcttagttcaaccgatactggttctcaagtacgtcttcgttcctttcctctacttatgaattgtttctttcaaaactcatcagttttgccttttacaaaaataattcgattaggtatgcaacttgatgtggtccaaaacatcgaacgagattgtctctactcacgggtactcctccggacctgttcagaaccaagtatgcatctggaaagtgccgtcgatgagtcaagtggctgggttaacgggccatacgttcagagtgttgtatctggcgatgagcccggatggtcagacaatctgtacgggtgcaggtgatgagacgctgaggtaagtgtcttcattattcaactcacccttctcgcggtcggccctaattgtatcatattccaaaaatcaaaaaggttctggaatgcattccaaaagacgaaggatcgcaaaaagacagacggttcagctcttgatccgttctttgcgaaaattcgataaagctttctgctcttttgatgaaaccgtcattgggtctcggctttcttttctctgataaatgtccttctgcctttgttctattctcataaatatgttcggttactccagttcagtgccttttctctgttcttttgttctgtttgaactcttggactttctttttctctttcttttttccccctcttattttccaattttcaatttatttttttgcttctaattactgtttccattcaaaccccatattcaataatgtatatacaagccgtctagatcgagtacccatctgatcagtccagacataaatttttaatattcgccatgtagtctatcttcctcttgcctcttcgtctctttcccttctcacttttgtgtgggtgtgcttattttttcttctagatcttcgatttgtttactttccttcttcaaaaaatatctcaattcggtgtcctaatttaatatcgtcttcttgctcagagataccggccttttgggttcctaggatttttagtctaagaatttgagaatcgaaatccttctacaaacaatattgacccacctgctcaacacaatcaagtcttaaaaaagaaatagagacaaaaatccccttcctgaagagaaaagcgagaagaatagaaaatgaaagcaaagaggagatgatgatttgtgtctactcctctcgttctatcctccttctccgagatgcgctttgctcgttttatgtcttcccggtgactgtctttcggagatctgttttgttttttaagtaccgattgtagacagatgccaatacaaaggtccagagaggtcaggacgaattgagaaagagaagacgaatttatgaaacagagaatgaatgaacgacaagcaaccaaccataaaggattccatctgcccaagcccaactagctggccaacccgggtggatatgatctaagaattcctgactatctctgatgacttctgcccacgcattgtacctcaccccacctcctcctcgttctttggcgcctgatcgtggtccacctgatcgggcttgagcgattatgaccctcttcgtctcttcctccagttgtctcactctcttttctcttaatacccatggccaactaaatttctgaggtggaatatggaaagatctaacttgcactcggggcacattggggtgattcggagggaacgtgtcggatagagtgcgaagaagggaggtcagacggcgcgtgaaccaggctagccgagaggacgagagaggtgtagatgatagaggatcggcaaagggtttgatttcatcacgggatggagagggatgggaagcgttcatcaggaagttcttgacagacatctcgtcttgagtctagagttgatgaagagttatgaagggtttacggatcacaagagatgatgagtgtctttttcatcgtcgagataggtttgtttgatcaaacatctgatgtcgaaatggcgagaaagacgacatactcggaacatgcctagatcccacgctcctactccaacttccaccaagtctatgtcattcactccgcctcttccgatagctttcaaaattggaaggaaaatctcgttcattcgggcttccgaatcgagtggagggttgaagtgttccgatctgaacaataagagagaagggagctcaacaaccgcatatttctggatcataggatgaataagacctcagagaaacaacatactcgataggccagaacgctcggtctccgaaaggcatatctttggccttcttccaagttccttctttccccactaactctcctttcgactttctacccttttcttcctgatgtccatattcaactactccaggcgtcgtgactccatcgtccaacccattccagaaaccccataggaagacagcatcgtattgatcgatcttgcacagccatgggcgactatgttctgagccgtaagaacgaccctgtctataatgttccgcatagtcttcttctagagtgatcaatcttgaaggatacgtgtcgggagttgtagtgggtgagtagatcgtcacatagtcggctgggtttccttctggccagggaagaggcgttagaggtgatgaaggtgataggaattggcagagatggactgataccaccgagtatgaaagaagaaggacgagcgccgcttagcaaccatacgggtgggtgaggggcggaacctactcgactgggaaggggaacttacgtagatgataacggtctatagagtctcccatcaaaagaaccgttctgcctctcaaccattcaaaatcttcatcgccctcctccgccatttccaactttcgagacttgtcatccatggcctccttccaagacttcattatcatcttctcctttcctctcaacttgaccatcagcttttccatcaaccgcggccttggcctactcttcagcttaggcgatgcaggtgtatatgtagttaggaaagggtttgagagattgtagccgaggtgaccgggagtggtatatggatgagcaagagtagcatggggtttgtactcagatgaacgcaagggatgatgacttctcggaaacctagagagcggtcatgaacgccgaacaagagatcaacgtctcgaacagaatttttgtgtaatgaaagagaacagcgagcagacgtacccccatataaggatgagactggtcccaatgagcaagaagaaaatgaaaatccgacggcgcgaagggtagataccaccaggtttcgtcggcggaggaacgggatatctaaccgaaggcaagttgatcgtcggtcggtttctatttttcaagcaaccgtcaagagaatcacatcaccgttcaagagaaagaggaaagagatccgtcagatcaagtgtttaaacctaaaggaaaacagatagatagaaaacagagacagaagaggaaatcaaagatcgaacctgttcgaagcgatagctgaatgtttagtcgtcatggctcaaaccgactgatacaaattacaatgaagagaggaatcgagtacgcaacactcctttcccaagttccgtctaatgatctgctttgtatgcttggtggaaaaaatccctccctagtcgaggatcttgctagttgatagtttaccaacatatttggtatggaccgacatatcaggatcattcgggttggaaatcaccgcgcagcgtctctagcgctggggccgaatgatggaccgccaagacatcgctacaacaaccgcacatgatactccaaaggatgttgccaaattgagtgcaaagatgtgaatttgacatgactcatgaagatacaaatatatataactagagaaggaggtcttgtctagaaatctctaattgcgctcaagccctacccttccccttcgcgtcttttctgctttcatcgtcaacctggttgtcaccaggactctgaaactgtttttgcacacgtctgtaatgctccatctccgtctctgagacactgggtatcagttctcgaagggccaaatcgaagtcttcttgagagacaagcacagcgatttcttcaggacgagccaattcggatagatagtactggggggagaggggatagggatgtggggagctctctggccgaggagccgcgttcatctcggctgtttcacgatgaaagccagagtgatcagtaaagagaacgaccgatgataagaaagagtttcccgcatctgattacttgctcgaacgatcacaaggatagagagtcacgcaccaatctttttatctacttcctctgcctttcttgacatcgcttttaacatcgcatccgaacaaagcgcataaaagtccgcacccgtatagttaaatggacaccgctcagctactcgatcaaggtccaggccagggtccattttgaactttctagtgagagccttgatgatgttcagctgggcttcatgtgtatcgctcacccccaaatagagcatacggtcgaatctgcatcatcacacaagtatgggcacaggttcagacacgagacagatcacaaagggaaaaggcaaccttaagaaatagggcgtaccttccaggtctcaataaagctggatccaacagatccggtcgattagttgctccaattacaaatacatcagatgaaccactcccttccgccgctccgtccaactctgccaagagttgactgacgatcctgtccatcactcctccagaatctccttgattaccacgtttgggtgctacactatccagttcatcgaagaagatgcagcatctgaagagatgaaaagagcgatgaaccgagacgagaactcttcttgatcagtactcgatcgcacaaaggcgcaataccacaaagtaaagaagataagaggatcttacggtttggcatccctagcacgttgaaacacccgacggacatttgcctctgactctccgatgtacatgttgagcaactctggtcctttgacagagaaaaagttcaaggagcaagaggtggcgacctgtagaaaagacgtggtacactaagtacgaacggaaattggtatgatgccagagactaaaggaacgtactgctttagctagtaacgtctttcctgttcctggaggtccataaagtaagatacctacgaacagaaaaaaagacgatcaatcttctcatcaacaaacataaagtcaagaaagaatgaagaagagatgtaacaacccaccggaacgtttcttcaacccttcggcaaataattcggggtgcttcaagggtaattctatcgtatccaaaatctctttcttcacactgatgagtccaccgacatcgtcccatccgacattgggaattttgggagcgcctatactttcagagtaggcagctcgagcttggtcaatcgcttgactaaagtcagacgatgttagggccaaaccagattgagcaaacgcgatcaatgggcaggatgttctcaaactagccgaatcagaaaaaatgagatatacaataatggcggcaggtaacttttctttagaatcaaaatcgaaattcgaagcgatcactaaaacgatgttaacatacctggattcactcgtccgtcccacagcagctgattttgctcgagcaaccaaggcgactagatcttgagcaacgagcgctgccgtttggactgcaaggttttttacatccacatcggccgctataggggtttcggcgatgatccttcgaagaatactcaatctttctttctcgtctggagcctttatgtagaaagaaatgattaagggttcagtagtcagcaagaaaaactgaccatcagatgaataaaacactcatacctggatggaaatctcctgcttgaaacaccccaacacacccgatggaactttatccccgtctgatgtcgttccaacaacgacaaccgggaagcctgttgtcttccagctagctgataaactctgtatgcaatcctgcagaacacccgcaatctgaggttctgtaggaagaataagtcaagcagaagagaccagactcagattatcaggagaagaacaaaacaagcaagcaaagaagaaagctatagccatcagaaagtgataaacgaacccttgccagtctcctgcgcttgacctttcctagcaagtgcctcgatgtgccgaaggagtaaaatacaaggcgaagatcctgccgctcgctcgaatcgcgctcgtaaaacaccttctgtctttgaatctgtgtctgcgacgagctcgaagcagttgatctattggcacgtgaattagaacatattcgaaaactgattaggagaacgaaaatatagaacaaacaatggaaaccaacctcaagcatgccgaaccctaaacgagcagccgcactcctcgttatcgttcgcttcccactccctcttgcccctttcaatagaatcgagagctggagtccgcactgacccatagatgaacctagcgaagatctcaagatctcatagagtgtcaagagcggagagggcggtgagatgcctgggctaggagccggaagaaggtttgctgtttgaacaacaattaagattaattcagcttttcaagcgtaactgatttgtgccggagtggaaggaaaggagaagaggaagaaaacgaacggatcccgagccagtctcccatggaacctccaacggcctgccgatgaacaagcccagcttgaacaagcactgtgacctctgggtcaactacataaccaaactcacccctgctggctcgtcgctcccaccttgtttctctcgttgtcgtaagggtcgatagctttttttgagcggtctctcctgagctagatactgaggaagccaatccgggcccctcaattttggacacctgaaaaaataccatagtcgtcgggatactcgacccctgggatgatcccaacagggagcgatctccatttttctcaccagcgtcatttctgctctctccactctcttcatcggcagacaagaactcatctacaccgacacccacgatatctcctactttgagcaccctccggttgcctgttcctggtccaccgaagaattctcggagctgaaatacgacctggggctggagtcgtttgctagttgaggccggactggcaaggcgagatagcacgagagaagcggctgtgggtataggaacaggcaaagctggagagaaagacgttgggtgaatttttagctgaggtggcgaagtagcgaggggtgcaagattgtgtaggattaatgggggcacatggattctaggtcgatgtcaagcacatgatcatgagataagaaaagaagttttagggctaacaatcaaacgtgcgcatttaaaacatgccaagattggaaaatctacgtacaaagttgagcgaggagaggaagacctagccgaaccggtctcttccaatgttcgaattcgaacgattctccagtctccaaacgtgtcctccggttgactgaaatttaattccgggatggcgcatacagcgaccttgttgtaagcccagaaaacagaaataatgtcaggtattaattcatcttctcagaaagagatatagacgtacccagtccccgtcaaatgcgcctatacgacctaggttaatggttcgagtccagatgaccgaatcctccaagcctgattcctcctttgatttgtccaggatcgcattcggcctctccatagaaacggtgtcgaaggcgtttggattggaacctgatgaattgccaggtagagagattagagaagaggataaagtggtgtctggggtcatgggagcgggagaagaggagaccatggaagacgacagaggtgatgaaaaagaggaagaattggatgacccgagaagagcttgttgaaggaaggcgggagatatttcaaaatcaggttcatcaaagtcatcatcgtcttcgctgttctcgtcctctacgtctttgctgtctgaccattcgggttcagagtgttgactgctagaaagggatggagacgtgtggccgtttggaacgacggttttgtctgaggagaccgatgacggagatgagtcggccgaggaagatgtaaaggagcgttcgtgggatagaggcggcatcagcgcttcgttgtccgtctcgttcggttgctgtgcccaaggcgcgaccaacacctgggtttcttcgtcttcttctccgtcttgcccttgttcttgctcttgttcgtcattgccatcatgttccaacccttctgcctgttcatcctctggcaaagactgaatgaactgtccgctgagtgtgggttctgtcataagtaccctgaaggctttgagatccgaatgagatccggtctggctggaaggaatggtaaggatatcggttgtacggacgacatgtgggatagcacgaagaagcttgtccggagatgaatgggcgaactgataggcatggagggaaagcggttggagtgtcagcgacgtaagcttcggaagctctgtatagtgggtattcgattgagagtgtgaagaagaaggcaggggaaagaacagcgacatgatggtgttgattgtctaccagttggttgcgagattggcggtgagttgtgagtaccaagagtgattgaagatcgtttgtccgagagccgggggaatgatacccgggtgaccggcgtgtaaccaggggctgtaactgggttgacgcacggacgtcttggttacagctgccagacccgatgccacgttccagcggatcggcgatcgaaaatctagacgtaccttatgacgtcaggtttattcagggcggtgacgctctctgtatgggtgcagcccatgcttaaaggaaacaggcacacactacggaatcgtccggaaacactacgaaagactagagaaatccttgagctttttcctgtttttttcccaatgtggtcatcaatcttgtcaactttgccttgaagaatgaaaaaaaaagaggcgggggatttttttgggtgcaatacaaatagcagccagctcatcccatcatcttgatccgcttctttcttcctttcaacaccacacgcattctttcaagccttctttcttcttcagctacactcactcgtcctacctacccacccaaacatctatcctagttagctaccatggccgagcgagtcgtcaaagagttccttgctacccacaacaagaccggttccaccgaggtctgctccgagattgggcctgaggtccttcaggagaccatcattccccacgttcacaccgaacaggcaaccggtgagctatccacctgtctatctatgactgctcagctcacagtcggaaactcattatatcttcttctctctcagccattgacagggagcgacacatcgtatgttccattcatctgattaattttctcagccccatctcttatctaacccatcatttcctttcatttcctctctcctttactgccatcccttcttacagcatcaccaccagcaccgagtccagcccatcgttgccaccgagcacttggctgaggagcacatcgtgcgttgcgttcccatgttctatcctttcttatcattcattccgctgcttgttctgacgtcttatgccttttttccatacacagactcaaattcagcctgccgttgtgcaggagcgacacgaggagatggccccggaaaagctcgagatgctcgagaagctgaagacccagcacaagaacaccagaaccatcgcgcccactgaggagaccgttgccgttttgggaacgaccgcctctgagcacgtccaccaccacgtgcacgagcacatcaccccggtcatccacaaggagacccaccagcacaagatcatccacaacgtgatccctattcacgaaaagattcacgagagccctatcgttcatgagtccaccgtgcttcctaccctcaccatggaagagttccgagcgaagatggcacaggctaagggacttcaccacggagagaaggagcactctcaccactactacgagggtcagccccgagtatccgaggacggatctcacccggttggaaccaagactgttgttcccgccaatggaacatcgcccgtggctgtcaagtcccctaagatctaagctgacttttgggctagtgtattttgcccttgttttcaatctccagctccattgtactggccggatacgtgtcatagctgatgcgtctaatctataatcttgatatcttcatcacttttctttcctccttctgcctatcgcatggtctcgtcaccgtttgtttgctagttattgctcttcgtatctttttatcatctcttgatggcttgctatgtatgaaatgtattttgtcgttctctacatatcgcatgcacaggtagtctcaaaggccgacgaatgtgacatggagaaaaacgaaggtagaaagtcctccgagctgcacgacagcagttggagtcaactagaaggctgactagcgtctatgaattccgtcacagttgattaaaagatctgtcgaggcgaatgcagcattttggtaagaagtacatcctaagaactcagcatcagagaacccatctggcagaacgaatgaaagcaaactgagtaaaccgccaggatgagccagaacagactgaagatggacgcgtgacgcgtctgacgcgttgattgaattcagaaccgacgcgacacgcgtgagacacgtctttttcctgtcatctgtctcattcaactcgagttcaccttcctttctcgactcatcactttatcccacacctttccttgttctcatcttttacgttcgtcaagatctgttcaccagataatattgtctgtggcacatacacattgtctgtctctccataccgtgccctcttccttgaggattgtctcttcttttaggtcgcgccttcttccttttgtcttcgttctttgttcgacgcgtctcgttcaagtctgcgattgtctctgtccgagtcgttctacctgtcaacccgagcggaggaaacaaacccctagttccagtccattcctgtcatcccatctctatcaagatcttcataaaatagacgtacatactcattagcagtctcggtaatcatctcacaatgcttactcgactggaaacgttcaacttcaagtatgtccctctccctttgtttcaaccccatcatcatcgttctcatttccgctgtagtagagaaacaaatgatctcttgagaaaaaaaattgaaacgatatatttgttcttatctgtctaggtcctaccgaggtcaccaaaccatcggtccattccttcctttctcatgtatcattggacccaatggatctggaaaatcaaacttgatggacgcgatctctttcgtgcttggtatcaagagttctcagcttcgaagtaaacaattgaaggatctgatatacagaggcagaaagcttgccagaggaggtagcacgatttccggtgctgatacgatagaagaagaagaggaggaagagagtgaagatgaggacgagggattgagcgaggaagaggggggaaagaaacagaagggcgatagaggcgagggaagtggcaagaaggcttgggttaaggctttctatcaggacgagacagaccgagaatgggtctttcagcgaacgtacgtttcttttcttgttctattccgttcctacctatctgtccgttctcaacctagtcaacgatctgacctatacatatgtacatctctcggatatcacagcgtctcgttatctggctcgagcgagtataaactagacggcacagttatcacgtactctcagtacaaccaggctttagcggaccacaatattctcgtcaaagcaaagaatttcctggtcttccaggtatgtcactcgcacctcaatacaacataccatcgaacaaggcacttcagtctgtctgtttccttgtgagagttctgctgaaacgtattcaaattgtcatcacagggtgatgtagaggctgttgctcgacaatctcctgcggatctctgccgattgatcgagcaaatctccgggtaagtccttcatctttttagatcttctcattctaaccaacacataaaaccttgtttactagcaacacatcttttctgactcttactttgatttctagatcactcgagttggcgcccgcctatgaaaaagccaaattggcactcgacaaagcgaccgcgctatcaaccgaaaactttcataataaaagagaaatcgcaaaagagttcaaggcttacaaggagcataaagtcgaggcaactaaactcaccaaacttcgacaacagaaggtttttgttcttcttttgttctcatcctgtatcccgtcaaggatagactaacacgggctggcttgttgaccgggttggatgtgatcaggaggaggtcatgattcagcacattctctggagactttatcacattcaacaagggattgacgatgcttctggaaacatcgttgccaagaatcaagaattggataggcttcgagcgaaccaggtatgtcttaccttctcttatcagcgtttttcatccccttcgtaaatgacataaactgacctcattttcttgcttttctgaccattccgtttctgaatttatctagagtacgaaagagaaagaaattctagatgctcgaagagaacagacgaggttgaagaatcagattggggatgaggagcgaaacatcaaacgtagagagaaaaacatcgatcaagaggtatgaatcctcttctttcgcgcagtaccgaccacttgtctagatcgacaaactaatctatttgttgatgtactcatcctatagaattctcgcctagtgacactcgaaacacagatcactcatgcggaaagaaaagctcaaaacgcagaatccttgggagtaaaagttgagaaagatgcacaacgtcagacagagagtttggggtctcttaggagggatcttgctcaggttgagagactggcccaggaagctgctggtttgttccgcctctctttaattcgtcttcttcttctcatacttcagttgaaccagtccaacatcacatattcgtttcgatgccatcaataacgaccctacagatgaacagcaaaggcttgccgagcgacaaggtcaggctctgagcgaagccgatttgaatgagtaccgtcagctgttcgtcaactctctcctttgctcttcacgttcctctcttcctctatcattcgaatcaagtgctcacaacatcattatttgaacgaacttttcgttcatgaaggaaagcacaagcaaatgctctccttcctcaagagcaccaacggttgagtgtccttcaaagacaacaaaagacacgaaaggaaggcttggctagtgatgaggagaagctgaacatcttgaagcgaaggagactcaagttagaggcggagattgatgatttgaaggaaaagaaggatacggtgcgttaccatttaccctctctgagtctcactcatgacaacgacagaatgtgataactcatgatttgtcaacgcattttctacaaccaaggctgaagagaaggaagcccagagcgagcaagatcgtaccaacgcacaggaagctctggagagactccaaagcgaacggactaggatcaggcatgtctcgtctcactctctcttttgtatcgacaatattcaaccctcaaaccgcgcgatgttgtgacatttctctaactttctcttcgtgtgaatttacttcactggtttcaacagtcaacttgagacggagacaaatgagaagctcacgaactgttatatgaagatcatgcgatcgagcgctgacaagaaggcttcagagaaagagatcagattgaaggagtctatagcgacgctgaaaaggattttcccaggtgttcacggacgagtcgtcgatctttgcaagccgaccgctacaaagtataacaccgcagtgggcgtcgtacttggtcggaacaacgactctgtggtagttgatcatgagaagactgctatcgaatgcatcaacgtatgtctcgctttcttgattctttgcgcataaatttttcacgtcatctctctgatatatctcttggtcttttagtatctccgaactcaacgtctcggccaagctaccttccttcctttggactctatccaagtcaagccaacaaatgacaagtatcgaaactttactagaggcgctcgtctcgccatcgatgtgatcgacttcaatcctcagtttgaaaaggcgatgcaacatgcttgcggcaattcgttgatctgtgataccctggagaccgctagatacgtttgttacgagaagaatcaggatgtaaaaggtttgtctttctcattgcgcgtattatccttgtttatatttttctctggctcgatgttgatatcggatcctggtcgtcaatcgttctatttgttttctgcgatagccgtctcgctcgatggtacggtgatccacaaatccggttcaataactggtggacacagccagcacgagaagagatcgttcgatgagaatgagctcactggtaagacatatgttccctcagaaaaatcatgttatcatctcctcagtctgaatttgaatccatcctatcttgttcttgcgaatctataacagctcttcatcaacagagagattctcttatggctcatctggctcaactggcaaaggaacgaccgaaagccaagtctgatgaacatcttgtagcggagatcactcggttggaatctgagctcgccatcgtcagggacgacctggtttgtttctgattttttggatttgctctgatttttgttgttatccttacgatctaacagctggagataagaaaagactgctgatctggaaactaacttctcacgctggttacgatcagagtgctatcaaccttcgattgaccggccttcaagatgagctgaggcacgccgagacggagagctcagagttatctacttcactcgacgaggttcatacttttctttttcttcacatgataacctaacgttttgaccaacgatctgacccctcctataattaaaccaaaacaaaaaaccacaacgacaaaaaagaaacgctcttctctatccgtgattgaagttgagatcttaggattacttcagacggtgaacgcatcagaggatgaagtattcgacgagttctgcgctcgaattgaggtcgctgatattcgagagtatgaggaggttcaactccgagtggcccaagctcagtctgaggctagggtcaaatacgaagctcagatcaatcgactacgacgccagtaaggttttcttctctgagggccctttcttccagaacgctagagctaatcaatattctcttggaattatttgatttcagatccgagttcgaagccgagcaactcgagcttacacagacccgactacgaagtttgactcgatccgccgcgaccgagcgcgccagtctcactcaattcgaagctgatagggacgaactcacaagaagcatcgatgagcacaagcaggagatccaagatctcctaacaggattgaaaaccttgcaagatcagttggacgacagaactcagaagtttgatgacatcaaacggaccgcgtccaaagcgacgaagactttggataaagctatcaaagagattggaacttgggtaagttttcaactgttgcttttctatatacatatggtctttaaatcaagctgacgcttttgttctcatttctttgtacagaacgacgtcattgagcgcttaggatctgaaagagcctcaatttaccgtcgggccaagttcgaagatatcgaccttcccttagagagtggttcacttaataatgttccgattgaagctgccgatgaagaagacgttcctgacgcgatgcacgtcgatggtgatgaggacgaaactcaaagaccccttcaagtcaaagattatggtattcaagtcgactttgatggtctcacagatgaagacaaagaggtgagctcttcgacatgcagaaagctcttccctctggatgaacaactgaccgtctttgagggttctctatcgtaaatcagaatggtgcggacgactatggggaagaacttgagaatgaagtcgccagactggacgtagaaattcttcgagtcgcccctaacgccaaagctgctgaaaagtgtgttttgtcttccgcccttgaaatttacatgtcggatcttgcatgctaatgaattctcaccgtttctctcgtaccaggatgggcggagtgcaggccaggcttaatgaaacggaaaaacaggtcgatcgatcccgaaaagagtctagcgctgctcgagagcagttcaacgccattcgaaagcagaggtgggttgtttgtgtatttgtctcgaggtgaattccaactgctaacgaacgtccattttccttcattctgattctgtttatcagaaccaacttgtttcagaaagcgtacactcatatctcggagcgaatcgattcagtatacaaggaccttaccaagggaaacgccgctccaatgggtggagttgcttatcttagtttggaagactctgaggtttgtctgcatttttctatgccctggttgtgtatttctttcctaacgccttttctgtcttgcaaacaattttctctttctgcaggaaccttacctggctggtatcaagtatcacgcgatgcctcctatgaaacgtttccgagatatggaccaactatctggtggagagcaaactgtagccgcgctcgcgcttctgtttgcgattcatagcttccaacctgccccgtttttcgtgttggatgaggtcgatgccgctttggacaacacgaatgtcactcgattggccaggtacttgcgagaacattcatcagagtctttccagtttatcgtcatcagtctcaaagagttcgttcttcgcgacatgcaatctctccgttctctattgtacttggtcctctttcaactcacatttcttttcttcctcttcgttctgatcgcgatacattcggtttccctgcagtgcgttgtacgagaaatcaaactctctagtcggaatttatagggatcaggaaatcaattcgtctcaatcattgacgttggatctccgttcggttcgttttcaatttcatccttttctttttcgctaccatctctgtttgctgccatagagagggcatttagtttgaaaatctagttctgacctatcgaattttctgtgcgcgtttatcagtacgaggagtaaactgtcactattctattccttatctcgtttgttccgtcttgtttctcttctcattttctttcatacatacacacacacacacatatatatatccatatctatctatctctccatttgtctggtcttactttagggtgagagaacgtgatcgcgttacggtgtccggtggatcatatccccgcctgttcttctctcatcaaccctccatttcgtcctccctcttctctttctttctttccttctctctgatgttttccttgtcgagtcctttgttttaatccgttgtaccataaacccgatccgatgatacatggtttcccctcagatcctcaaacagaaaatctcaagaatgggtgtttcttttctttgttcttcctccgtctattgtgtgtttaactccttgcgctctccccccccctccttctctcttcttcctccttatctctgttttcttcttgcggtttgcgtctccgtttttgtgctagttgacaaaaacaagacaagatgtgcgttctttgattatatccgtatttcgaaattcatattttctacccaactttgagcaagtcatatatgtatatgacattgtctcagctatgtaataagagttaatatagaaaaaagagaagatcaagatacttcggtcggaaatctagcataacaagatcgtgacatagacagacaaacggacagacagacaaacaagaaaacaaataaaaaacagaagaagcgtgtatgattggaaaagaagaaaagtaagcctggaactgaacaaggcaggaccgtttaggtggcggtcgaggtcgccacggccacagcatcagcagctcggctggcggcaatagcggccgcaccagggtaaaaccaagtgacgagggcgatgataaagtagacgacgatgaggattagaccttccatgtaattcgtcttatcgtcctggatagcgtagttgacgatcaacacggtgatgaacaaacaggagacctcgaaaagatcaaacttcatcgtcaacggttgaccgatcgcccaggcgagcaggaccaacgttgggatgacaaatagtgcaatctggatggacgagccgacggcaatggagagtgagaggtcaatcttatccttgatggacaccatcaccgcagaaacgtgttcggcagcgttaccgacaaggggcaacaagatcagggagacaaactctctgctgatgttccctgactgggtcattccgtcgatcgacccgactagccactcggcggtgacaccggtgatggcagtgacaaccaagagcatggccaaggcctgataggtcgtcagctttggaacttcaagcacctcttcttcctcttcattagcctcctcctccttgacggtggagatgtcattggaaccagcttctcggtcggcctcaccaccggcgtcggtatgaacggaaaccgaccctcgccgggctcgttcagcctggctacttgctatggacgaaccagaggacgagcttccgagagagggcacccaatgaggcctgggaaacacccggggaccaggaggaaggggacccttaagagcggagggcgcctgggactcgagcttccgtcgttggaaaggagtgaccgtcttgaagagatatgcatgggtatagagctggaaggtgaggtaaccggcatagacaatcaagagcagaaaggcggttcctcggctgatggagagaagctccttgagttctttgccctcgggatcggcaaaagtgtcctctccaagactgaagtggtaggcggtagggatgatgatagcagccatagagattcctaacagactgatattcaattgggcagctcggacgccgtagccttgttcatggaagcgaagaccaccggcaacgaaacaacagccaaggacgagtaaggtgttcgacagaatacttccgagcatcgagctgcggacgatgtcaagctccccctttacaagagccaggatggagatgagctggagaaaaagggtcaataaaagagacggagcaaaggtcaggtgttgatacagatgaaacgaaaggatagagaagtgatcaggcgtaccaattcgacagcatttccgaatgtggcgttcaagagaccacccaacgattggccaactcggagactgatctcctctgtggcaaatccaaggagggaggcgaggggtacgatggcgaggaaagaggtcacaaagacgagcgtatctgattgatgatgactgaacgcaaagtgacaggcccaagagacagggatgaagatcagctgtaggagagataacaaagacatatatcagtcatcgatcgactgcagacaagagacaaagaggatgaggagacgagctcaccataacattgagccaagaggcggtgatgatgttcttgcaggccaccttccaggtgaggccagcgtcactcgcccgtttcttttcaggcacgagcaatagctccctgataggcggtctgctggtctctgccggggtccgggcgcccgagggaagaggcagcccttgttcttccctaccaatcgagttaaatgaattgaacccgggatgatgggtgaggtcgtgtgggtactgattggaaaactgagcaaacccaccgggcttcatccctctcgcgcggacaaaggcagaagaatcgggagcggtgggagcttttctgatggccggatgaggctcatctgaggtggaaaactcttcgtacgtctcggggagcgactgattcgaccggacgagatgcaggccggtgagtccggcctgagacttttcgtcaaagccatagtcgtgtgaatggtcgtccgactgcttgttaggaggattggtgaacaaggagtgggggagcctcggtataggtggctcgagcgagtcttctccgagctctgtgctcggtgcactgggtccatgctgggcggatacattttgggtattagtagaagatgcggtcaaaggtgaagagtgatccatcggttttagggtctttgtttgggagtatgtaagaacgaaaagaagtgctgatacgactgaatgtgtgggagatggatctgaaatgggagttgagggagaattaacgaagtggcgatagcgaacaaagtcaagcacgagctcgatgggacacaggctaaagagggttggaactgagcgaggggcgatgcagggagcgccctgatgaatcggtcaggtccggcgcgcagtgttccttggcgagactgcggagtacactttacactgcacacatcgtgtagtatgttctagagtgtcgctatgtactttactatacgcgtgtgttgtattagcagatcggccttggtcgtgtgaggttatctttcaggttttgtccgggcgggtatgcatggttgtgtgtacgtgctgtagcattggcgaggttgttcagatctgagtgtgagtgaacacgagagttgacgggatgttgtatgttgtatgttatcatcatataggtgtgttcaggcatctctagatgtgtccatagctctgtgtcgggtgcccatatgggttttcgtgtgactgtgtgtgagtagaggtttgttgaaaatggtttgtgtatatctctatgttcatctgttgatagaggtgttcatctattggtactgtggccttgaggcctatgtgtctctggtagttctgtcggtctatcggccaagaagcgcgtgcattttatcgttggatgtggatgtatgtgtctatcactatgtattctgccaagacagttctgatgataacatttgggatataaagttacaggagacgtatatcgaacactcttgatcgactagcactacatcctgttcattcttgatgagctcgctcactcaaacactcgtcatatcactcactgtccgacatatatatcaacctgggcgttgatttcatgataaattcatatgtgtttggcccactgtattgatcgatcagattcttctcctatatacaaactctatctattcctcatagtatgcgttgtcttttgccagcatgggagttgcccttccgttatcaagattgcagcggtcgatcttcggagagacccccggaaggagtgatctcgttgaattagacatgccgggcatcgcgattagtcagcaatgactcctcccgccgatgacgctcatccttcaactcaccgatcgagcgaacaagcatacacccaaatcaactccttgtcctcactcctccatcctctctgtgtcctcagatccctgaaccctttatggcacagcatacactatcaccgcatagcacggcggccacggtgaacaacccggctatcgcagccgctgcagcgaccactacgctgtccactctgctctctggtgctccttcggggatcaccaaacatctgctcggcttccctttcggtcagtatcttcaatttttttccttccctttttgatctctgtagtttctcttgtcttacaaacgttcctcctcctctacttctgcctccttacagacacactcaagacggtgcttcagacaagctcttatcaagcttactctggtcggtttcccgcgatccaagcacttagacgaacggtctcccagcatgggatccccggcctttaccggggtggcagcttgccttgcctcgcctggaccgccacagatggaatgctctacagcgttctctgggaagctcgacggagactctttgcagatggtcactctgcatggacagaaccagcacgaaacggtgaaggtagaaggttaaacctccagggacaccttgtggcgggcagtatagctggtctatcagtgtgagtctcgactgtgtctgcctttctcacttacgatctatgaagatgttggctgtccgatttctttggctgaacgtcgatcgaatctttcttgtttttatcctccgaacagatctctgttcacccatcccgtcgatgtctgcaagggtaagattttctgtgcatacaatttagacttgcacttcttatctgacttatgtcgttgttatcgggccttccctctctttgttttccctagttaaactacagagccaactccgaatgacaccgaattcacccccgttcacattcaactctcatcagacatcgtccttggcgatatcaaaaaataaattgttcaccactaggctgcctgttgtccatccgccgtgccctccgtatcctcttcaatcccaaccggtccggtcgaccggaacagcccccggtttcggctcctcatctcttcgtcttccccttcgcccaatctttccgcccaaatcaccggtagaggttaagttcacatctccatgggactgttggtctcaagtcgtcaaggcgagaggcatcagaggcggactctacaaagggttcggatggacctgtctgatgagaacaggaatgggtggcatgttttgcacgtacgaagccttgctgagagcgactgagccgatcaaagttcccaacccagttaggactttcttctctggttctatagcagccctcatgttctggactgtgttcctccctggtatgtcatttttcataatagaatcttcctcccgttgcttcttcctgcttacaatcttaattctcccttctccatattcaaatacttgaaacagcggatgtaatgaagtccaagatgctcgcagactctcaccttcatccgaagtatcccacgtccgcacacgccatcaaaacggtttggctcgaaggcggaaagaaagtctctgcgttctggagaggcggaggagccgtcggattgagggccgccggagtgaatggtaagtgtgcccccagcgttctttctgacgagaatctattgtccttcacctattgacatcattaacttttcctttttcaaaaacgtcaacccaacaggtgtcgcgttgctcgtttgggagggagtcatgcgaatcaccggtaatgatacgttctcatagggactatatcttcatccgtagattatctgcatatgcttttgccagtgtacttttcttgtttctctcttccattcttgatccctcccttcttttagtgtcagcctctcaatagatctcaactttgttttccctatttcaacgtatactgtatcatcatcgtccaacatatctccgttatctttgaaccatctatctccgactttttccttatgtcaatttctgatattaattcccccctctcctctctctttctgtctcttcattttttcctctgtcttttctcatcggctatagatttatattcgttcatgcgtacgcattcacatccatccttttattcccttgatatttcagtctttgtctctacctctatctctaactcaccttaaactttgctgaatttgcctagcgctttctccattccctttctctcatcaagactgtatctatatcttggtctgtatttgtaatattcaatcaacaccaaaccaaacaattcaagctgtcctgtcctcttctttttagttattcatgcatctctatattgtctctcttcctcttgtccatctctaaatttataacctgaagtaagagaatagctatttgaaaagacgtaacggatgggaggtaaacaactcaaatctcgaattcgacagggatcccgtacactacaggagcagcacccgtcagatacttgagtttacacacatccctcgacgatccgaccgcttccgccaaggttcgtcctctcttcgctctcttctccttgttcttcgaggtttcgatcttgatctcgacagtatttgacttggtggttggcttcgatgattgcctcaaggaccgactcaaagttccgtttccgttcgtcaattcccccccgttgaccgcattatcggtatgtcctttcgaagacaggccggatgcagaagacggaggagaggaagaagattgaacgagggaaaggacgtgctcagagagacggtcgatgtctttgtctgtcacgtcccataaattgcctaccaccgttgggcttttttttgttttttgtttttttggaaagttgcattggaaaagaagccgttgttcgcaaagatcaataaaatgacaaacagcaagaaggaccgaaagaagggggaaaaagactcaggaggactcaccagccagccaacatatagttccagggcgtaccgttcctatcgaactctccgtaatccttcaactgaccagacgaacaaccccagagcatgacgctcgcgcaacgcttaagagacctaatcttatgtgatcggatatattgttcggctccgccatgtccaaagtagctaagggaacatcccaggtgcgtttggtttcaattttcagtatgaataacagagttaaaagggtaaaaggccaaagaagagagaatggtactcacacgacgatatccatcgtggagagcgcattgacgaactccaactctgtaggcggtcttccaacaatacctctccacccaagtttatccatcttttgaatccaagatgagaagtaggattctgtctttcccaagtccccactcggattgagaatataaaatcctcgtttaccattcagcgggaacgagaactggtcaactccttctctttcgggttttgtctgcgatagtgaggagcaaggcgaggaggaaggcaatggttgtcgagtaaatttaggagttttcggcatcgccttgggaagatctaatgttaaagccttcattcccaacataggtgtcccatcttcgtcatcaacatcttcgtcgtcatcctcttctgaacttgatggaccttcgaaccgacgtttccgtaacaaaagtcgatcttggatgaacgccatcgacggaattcgactaacagatcgaccacgaagtgacttgatagattcccatggaagaggttgaacttttcggtccaacacgaggaacgtgtggtgtggtagcccattcggatcagaagacgaaaggctcttcggttgttcggctatctcgagaagttctcgtagtttgagaaccatctagttgtcaaaatgaataaatatgtaaatatttcgttcgatttatccctatcttgggacaaccaaaacaaagaaagagatgctctggaacacacctcatcaacatctaactctgcaacagcgacatctacgccatgaacctgataaagatccaagatgaagtaaaccaagtcttctaattcttcatcccgacttgctgaaggaagagtggcgaagcagagtagcagctcatcatcgatatggattttcgaagccttcttcttgtcagaagcggtatacatgcttccattgaaaattcgctccagtcccgcacggaacgtgtccagagcttctgaggtatgccgtccaggtggattgaaaattgactacagagtgcgcgcacatagacacacaagaatttattctcagtaaattagcgatctccaacgagttaatgttgagaacggtgaacaaaccttgaaggcacctagccagcaaaattctagattccctagaagctcttccattcgtttgtccagatctctcctcattgcccaccaagcggccctgccctctctctcttcaatctccttggcctgtttgccggtttccttgctctggttgacaatatcctccagttcttcaattgcatctgtgaacgaaaagtgttcttcctcgtcttctcgttttccgtgtcggtcaagtggaagtgaaaagacaagaggggaaaggccagtgcggtgtcgagtaacaaataatttcgtcaaatcttcagtcaccgagatattgatgacagaccaatttgtaggcaagggaattgacaagtctagctcatatagaggttcgtcttggtatcgcctagcgacttgagaccaatagatatcatcttcgtcttggaatggttcattcttggttttcaaagcggccgcggaagaagtcgagctttcgacaaacacaggccagacgagatcatctcgaggtgctttagatttggattgtatggcttcaagcaattcatgtcgaagcgtcgtagatgaattatggtctgtagttacaaaattcagacatcaaattttgaaattcagcatgttgacagaaaacatccacaagcttaccaagtagccaagcggtcttgattgttaacaaagatggatcctgtcccaacgaagtcttgtatgctcgtagcaaactcaacgacaaacaagcatccctggtctgttgagcccgggcatgagcaccgttattgaaaaggatttgctcatatgctttctctgccaaggtgatcacccggtcgacagtctttcggattttcgtatgaactgtagacccgctgctggacgtccccatcggcatggatatcactgaaataaatgaaactcagcattcagaacagattgaatcgggatttctgatgagctaatcaaaggagaaattgaaactcacaagactctgtcaacgaacacaacgccaggtcgttcttgaagtcttccaagactttcaagaacgcggttcgggcttgatagctatatcgatcgtactgtacatccaaacagagaggaaaaattgtcaaacacttttagaaacataatagatctaagtgagtcgcaagcttacttgggtctgcaatcgcggaggtagttgttctaactgaacttcaagctggcggacagagacaccttccactgttgtgggtgaagttttcagagtgatgactgatccaggtaaaaaactatttgtcagtcatctataaaatggtttgaccgtctgtacaccagactcactcttttggctaagtaatagctcaagtagtggtgcatggagtggctcatctttcctcgaaaccgaggaacgtcgacttcaagaatatattgacatcaacaacgttcgtgaatacgccagaaaacaagacaccatgcttacctggtctgaattggattctcctcgttgaataaattctcacaggcttgtaagacctcaagtcctgcatcatacgctgcgaggacatcttcaggttgatcttcaagctctcgaaggcgggcctcgatataagcaatctctgcatgatctgctccacatgtctatatcaatcatgatcagatcttagtttcagcctgattgtaccaacagtttattgaggacagatacaagtagaactcactgtcatagatcccaattgtgcttcatcaagcaaaagccgagcttggtttatctgtccgatataaagctgcacagcagcttttctaatcagtgcacgattagctaaacctttggagtcgacggccaaggaataattctgcgcttgctgtagcagaaactcggtatccctggatgtcccgcgttgaatggtggtcgacgagaaagtaaagagacagtcaagcaagccctagaaatatatccaaacatgtgaagaagttagcacctcattgttctttgtgaatattgttaactttgctgaatgctctcacttctgaaatcctccaggataaacttccgatctgcaaacgagacaatggcgcggattgggacgtcttcactcgtgaatctgccgaaggctgagatgctggatcgactggaatagccggcgtcgtaacccgaaacggattctccgtttcagtgctattggctggctccttggtcgtggtgacagcgtcgagcgctttgggtgagactcgtgcgatattatccgcagctctcgtccaaagacggtgcgattgagcaatacttgatatcgcggttgcaaagtcattcttgaaaggaaagaagacaataatgacatagacaggagaaatttagtcagggtcattacttggccttactgaaaccttgctcgcacggatcaaaacataccttggatttttgaatcgcggcggcaaccatgagtgcgacagccgcacgctctagtttcagtgacttatctcgaactctggctgacccagccttgtcctcgattatcatcatcgagtcgttcattgctttttgatatgtcaacagacttcattcacgaaacaacccacacaagtagttcggcttatcagcagaagttagatgcatttagactgtttagggttacaggagcttaccattctccttcatctccttcgtttatcaagaattgagcatatctcaagagaaaatcaactttcaccgctggggacatgattatctccgactcaagtacgttcatggaattgatcgtcgacgtaaaagttgttctcgctcgggagctcttccccagcttggtgtatgctgctccaagatgggcagatgcagcgacaaacactgtgaaattcacgtatcaagagaaattttgatctcagggtactgtcgaataaagaattcatcaacaacacttggaacggaccatcaagcttagaagcatctcccttcgtgatttgccgaataattttcaaatgctggatcttggtaagcgtgtgaccaagcattcctaacaaacttgatgtcatttcttcaagatattttgagtaagatgttaaatatcgtcagtcggaagcacagcaaacagatttgagcccggatgaacatgaggtaggacgtacctaagagagagataagttgatcaacttgatcgaatagcctcacttggacaggtccttctgcacaatcttttgctgaaacaacttgagcgacggccttagatcttgaaacaacacctacgaacagatatgacagaaaacatcggtcaataggtgctcttcaaaatttcgattctgagtatcaaagaatctaacttacgtcttgtcaaagcagctgcataccacgataggagattaatcagagacttcatcgcatggattcgagataaatatcatcatacttaccagggacttttttaggtggtgaagccactttgattttcttcatagcatttgcactggcctgtctggttcgaggctgtctcacagactctaccaatgtctgagtttgagcctgcgcttgtggttgctttggttgcttaatcgcatctgcgatcctttcttcggatgagaacaacgacttgagctgcttagcggcggtagatgcatgagaaaggaccagctggtcgcctgctcgagtacagtaagcgtagatgctagtccaaagatgataagtcgctcgatattggggagcaaacagcgcaagtttcgagtcttctttgaagttctgagtggtttcgcaaataagggggccagtaaagcagctgatgagataaagcatgtcggcttctctgcagtattccaatcactcacatctagttctgccagagcgtctacgtctttggttacagaatcaatgtcgcggccactagagacaaagcatccaacgtgagctacagctgcaagaactcttaaagtacaaatgagtcaatttagatcagcaaatgttttatgtagttgcactgtatgccagatatttggcgttctctcgttgaaagagattgaaagcgagatagagacagacctaagcctcctgatgggatgaatatctgcttcgtagatatttaatagatcatccaacacccttcctacaaccttgcccacctcttccgattctaaagatcccgtcatgattttcagctgccattctcccaaagcaccaagagcatcttcttctatcgatcctctcaaagcactgatgagggaaacttgttcagctggaagttgaaggtcaaatattgcttgaagagtgagacgatgtatcagattggcggaagctgttaattgtggaagcgtgaaaaattcagagatcggactggttttggcgaatgtggacaactccacaaagaacgaggttggaagggttcggacagcagatacaaaagcgctatttgcattctgcgaagttcaaagtcagggtgtatgtacggtcagtcatcgtgttcgaaaaaaagggaaaggaatacgtgaaggaagtaattgcacacagactttaagatccccattcttgtttcgacagcttccaagcaactcccactttcggctcatgccattcctcaatccagcccagacttcttcctctccaagaccgtcgagttttcccaccaaattcaacgcgtcttcccccgattggcaccccatttccgcaagtctaatcgcctgtgagccttctccaattttatacagcccaccggcgcaattataggctgtgccggagatacatctagatagattagcacattccaatagaagtggtttcgaggaagggagcgagtcgagtgtcgtgcgaagatggatggcgcggttcagtagatggagtgttgaggcatacgtggcactttcagctggagaaaagttcacacgtgcaagaacaagaagggtgtcgacagaggatgcaacaaagtcgatcagaatcttctggacagtctccttctctgacttgccatcttcactcctattctctgtcgaaggagccaggcaagcagaaacaagtctctctgcaccttcgacaagcttgagtaccgactcttcggccaaattcttcttatgtttggatcgggttatgaatgttatacattgtctgcggaatctctcggctgttttgtaagctctctcgagaattttgatgtcgtggtttctgcaaaggaccttgaacaaagctgatatggaagatgtcgatgaaaaaggctcgtttgaacatgtcgatgtggttgatggcgttctgggtcgagaatctgtgtgatttcaatgaggaaaagtctatcagtaatggaactcgaattacacccaggggaaaggattggtcgatagaaacgtactgtcgtcatctttgactagtttatcaataaggactgtttccttcatcatttctgccaataccctagtgatcaaaacactatcatcttcactcttaatttcctctacctcgacctgccctcctgagctctcaatgagggacatcctctcgatccccaatgtctcctcggatccatcattacccacacgatgcttcttcaacaggtcagcaatgatggtcaggctattgagatcgcccactttggcagcaatcttaccccaaagatcaaccaacctctcccattctttgcctacaaacccatcttccaacacccacaccccctgcaggtggctaatgagcttacggagctctttcagagacactttcataccttcctgaccttcaacgtccctcaggaagatctgcacacttcgaagtgcctgatcccaaacttttccctgtttaagagaaggtagtaactgaggcataagctcaagcgagattgtgcgcaggcggaaaagcgtttccgaagacgtcaagccatgagggtttggaggcgagaagagcacgttgagaagttgaagtatgtttgagtttgggataggagaggccttgagatgaacgaaaagagcctggtttgtttgaaggaagcacagtatcgcctatatcaaatttaatgcgcaataaaatggtttcaagattgattagtccttgggcttttgaaagaagatgctatacaatggagtgtcatcactcacgtcgagtgctcccgggtgagaagcttgacctgaaatcacgcctgctaaacttgtacatatccaagcggaaagcacgctcttcacggcgtcatccagttttttcgtagactcatcggcttgaggaaatgtaattgaccgcaatgtagccgccgaatcctgtgatttcttaatcatcggtgtgcacggcaagtctgaagaagcaggtatctttttagccgcagctgtggtcgttctagaagaaggagttcttctggcgattgtctgcgtctgagagagtttcggagtggaagtctcaagcttcggcagaggggcgtggggatacaggtcgatgataacggagtggaatgtctcgactattgaaacggacaggcgtgtctgtcataacaaaaaaggtaatcacgaagttcagcgagcacgttcgtttgtacgtcataattacaggcaaagagaagagaattcataccaagcctagcgcattagacctcgtcagtaatgacacaccagccttggcgagcgcgattttggcagtaacacatggaccttgacagactcgctcgagcgagatagctgcgcacatcactagagcctcgacttcatcttttgaagctaggtttgaacggctaggatttacagcaagtgctaccaccggcgtggaaataaccttggttgaagaagcggcatttcttccggccatcaccgattgagctggcttcctggctggtgttttgaacacagatggcgtagctttggaagctgccagacgagaagaagaagaggaaacgggagtcgaggatggagaggaagcagtttctttccatccggactgtaccattcgatgaagagtagcaagggaggcattaaccatccgcatcccgaaccgaactgcctcgtcggtcgggagaggctcaggaaggccacctgccttggtagatgtagatcttgatctggagaaggtcgttcgggctgacacactgggaggtattcttgatctaatagacgcaggagtagtagtggtgatggctgatttagagattgatagtattgaaaacgacgaagatcctaacaagatcactaaattgggcagaatatctgtaggagcaagaggtttgaaagcatcttcaacagatggaaaagccgtaaccgaggccagaatatgatccagggaaaagctcgaagggatcgaagaaccaaccgatggatcggtgatgtttggttcaggtggcattatggtttactccggcttttcggctgagttatccaacttgagagtcaattaggatcaacatcaactggagaaggaaacggaaaagaaagacagtcgcgtcggatgtagagctgtgctggcacgtgattttgtgccactcgtgggcttcattactcttcggacgcgcctgatttcctttcgcgttttgtttttctgaaccaacgggaaagaacacacgcactttcctgaggccagaccttctctccaacgccatactatcctcaagcaaacagtatgatcgagaatccagttcgtatatctggattggtttgccacgatgtttcctgagccactgtgttgcttttgctattcgtaacgctcacttgcacaacacttactctccatttaatctcatttctatagaccactacggcttcgcgtctacctgtcctcaatcgaccgccatcatcgcctgttcgggctcctgctgtatcatccagctcgggcatatccagctctgcttcgaatcatcttgctccgaaacgaaaaaacacatctgactctgctatttctatagccggtcaacccccatcgaaacggccggcccactcaactagaacttcctctgccccttcttccagatcggcttcatcgataacaacgacgacaactaaccgatctgcctatgtcacccggaagcccctctccagtgtaagcactacttccaacaaaccgggagcaacgactcggtcagcagccgctgctgctaccagtacatctgccgtgggaagaagggcacccgccgcatcgagcaactcgggtacgcctcaagtggggaccagcaggtccatcagttcgaccggttcagcagggtctattagatcctcaagctccgtgagcagggggctgaccgcaaatagagttccaagtggaggtcgaagtggaacagtttcgccggattttattgttcgtcttaccaagatatcatcttactcattgtcgtcgggtggatgcaattcgctggtgttgaacgttcagtcttgtttttttttctctcgttatgtcatcaggaaacaaacggacgactggcaacagtagagaagcagatgttcaacatgaatgagctgctcgctttagagaaatcaaaaagtaagtgtcaacaatgtcaggcctgctgattcatcctatactcaagagtatctctgcatcgatttggatcagttatcaatctggaaaccgcgcaatcaacacttcaatctcaacttgcccagaagtctaccgaagcggctactgcccggtctctttctctcttgaacgaagagctcctacgcgacaaagctgcccgagagcgcgatctggcttgtcttgaaagagaacgagaagaaaatagtcgtcttcatgaagaactcagaaagagcagagaagaggtgagaaagatcacaggagaactaaaggatattgaggatgagaagaagagggagttgaatagaatggaaagtcgggtgagggatctagaagaagaccttgagacggaacgaaagggacgaaagagagagaatgttgagttggaacagacgaaggttcgtttaaaatacgtttttctagctcaggaatctgtctgggaagaagacaactttcttaacttatacacctatacttctcaatgcgtagaactcactgtcggatatcactacacgatccttaacggtcaactctcaattgactttcttccaaaccgagtcttccacgctcaagaacgaagtgactcaactccaatcggctttgactgaaagaatagaatttaccacacgtgagatcgaggctgccgcgcagagagtcaaatcggccgaaagaaagatgagggagggcgagacggagagaagaaaattgcacaacatcattcaagaattgaaaggaaacatcagagtattctgtagagttcggccgcctatcggttggttttgcttgcgtcactctgcctcctacccaatgattaaaaaaaactgactgtattactctggattcgtgcgttcttcttctagtggccgatggtcaagtagcatcaatagcttatccagaccgagacggaaagcaaattgtggtcacttcgtctcaggatgcagcaatcggaggaacacgagagcaaatcatccccttcgcattcgataaagtgagctcaaatgaatgcttacatcgttggtttagagatagcgcacagctgatttgtaaaaatatcatcgctcgcataggttttccaacctcactctacacaaagcgatgtgtttgaagaaatttctggattgacacaatcagtacttgatggctataactgctgtatttttgcttatggttagctttttttttgaaacaccttacgcttctttatcatattgtaacttgacagcgctccttctgcaaactgctcataggtcaaactggagccggaaaaagtttcactatggagggtggttcggtaagctcttccttctcttgtgctgtatcaatttggacccttggcgcctcttactgatatctgcataaaattgatttgatcttaaaatgacagaccccggaatcaatgggtatgatacccagggcaatcctccagatattcgaagtgacagagtatctaaaggaacaaggttggaagtatgagcttgaaggccaatttcttgaaattgtacgtctttctttcgtcatcaaatataagagtttcgagaggaaacaagttgctgataccaaggaacttgcaataatacgaacaaaaagtacaacgagacattgaatgatctattggggaatagcaattttgataataacaagctcgagatcaaacatgagaaagtcggaaagacgaccagaacgactgttacagatgctacaacaggtaggttcctccattttacgactgatcttcttttcattcgaatgtaactgattgtgtaatcattctgcttacttgctcttcttgatattttctaacagttcggttgacatcacctaatcaagttcagggtctattggaacgagcgagaagcagaagggcggtagctgcaacgttgatgaacgagcggtcttctcgatctcattccgtgttctcgctccgagtaacgggatccaacgccgtcaccggtgaatcgtgcgaggttcgttagttgaaatgaatcatcctcttcgtgtcttttttctcaagtctctcgcacgctgcaagatgcattaaggctcaatatctctctacctcttttacccttccagggagtattgaacctagttgatctcgctggctcagaacgacttgcgagtagtggagctggcgcagacaaggatcgactgaaggaaacaatcaacatcaacaaaagtctgagtgcgttggctgatgtgatcggtgcgctcgggtcgacttcttctggacaagcttcgcatgtaccgtataggaactcgtaagcgtcaaatcttcttctttcttatctgaacgcaacagattgctgacctttagacaaaaacatatgatcgtcatttcatttgtctatgtgactgataaaactgaagtaaactcacataccttctccaaacttcgctctcaggccaggttagtcaatatcttacaaagacgtgctttgatgaagtattgctttgaaacttaatggtctcacttatgtgattcatcgaaacgatccgtttgaagagcaagactttgatggtcctcaacttatcgcctctggcggtgcatctcaatgagtctttatgttcgcttcgatttgcgaccaaggttcgtctccaacatttttgtatctcagtggatcatcgtctcaacaagatccgttaaaatatatgtactgaaagttatgtgcgcgttcttcgtatttttatcatctttgttctgtttgactttgcaggtcaactcgactcaaatcggatctgctaagaagcaacaaggtgcacgatagctgattccaacagttcagccagacagcgaatgaaaacctacggctttgctgatatgcagccatacgtacatatcaaggctgtgaggcaaaacggtatttcgttcgatgtatttcactatcatctgatctttgaaacaatattcttcattattgttccactttcttcttccactattttccgttcgttttgcttcgtggccgaggatgtctcatttgtgaacttccttagttccactctctttaaaggttttcttatgcctccttcactctcttcttaatcttcctttggtttttcagacttttctttatacatcagttcgcttcgatttgccttttcgctcctcatatctacaacacgctcacttgatcgtgaattcttttcattctttcgctttccgtaggaattcctacgagaatcatttgtgtctcattatgatcataagactgctggtaaaacatataatgaacatgagcctgtacagacatactctttcccaatccttctaggtctaaagtccagccttcctctcttcacccttgtcgtccaaaagaacgttcctctgttccaacccgtgtacccggatccattctgctgatctagaaattccttcttccgtcaactcatgtccacaatcgtactccacgttttctaaccgaccagtcgtgccgacgttgagtttttcaagaaacgcgctagtgtgggggacatggggtacaacttttataagcgtaggttggcaaccaaaaggaagggttcacagtggttagcctacatagacctttactgccagaaagccagacatgaagactcacgtctatcttttcttccagaaagcaccaaaattttctttccgataaaagggttttcctttgcgctttccgcttggaacgagcagttcacaggatcacgctgtttgatcaaagctcggaaggtgtccgggatgatcggcggttcgaacttgagattctgagaggccaatcgggcggtcataagagaggcgaaatctgggcaaccgatgatactgcaagacaggattgaataaaagtcaattatgaatatcgggctcatttcagacttgaagatgacttacggaataccgatctccactcggggctctgttatttatgatagtcgataaacaaatacagaaacgcatttagtcctcggcactgttcagcttttttttcaaaccagatagagtgattatcaaataccatgtcgaaggacagtccaagcagcatgtccacctagactgactccggcaaccatgaattcttcgattgttttgtcaccttccgggaatagaagcgccggtaggaagtcaatcaagaaagacacgtcctgagcagtcccacctgttcacgcaagcagggcatgtgggtgttagttttcacgctcaagaacgagatcttgagacaacagtaagatgtccaaaacgtactgtagacggcatacatatccaaactgtttatcaagaaccgacagacacaacataatccatgagctggagaagaagtcctgataaagtgtgacaccggaagaatgctcacgcgtgcataggatttccctgatcatcccctttcgatttgaagcttctgttgttgagttcgtcaaccattcgatgcccgtggttacgttgatcctgatggattcctcccacaaatagcacaaatacatacagacatgcccggatgatcagctagatgcagaagcaagcacggcgggcagtatgaatctgtgaggatgaccattgacctacaaagttgatgattatgagctcccgatcattggatttcctctttgatttctccagtacaacctcacaaaaatgatgcatgctagacttctcactcaatcttccatgaagagcgaactaaacaagaactaatttgtgaacattgtctaattcttaaggggaaagtggatacatatgagtgctcaccaacacggctattctgtccgatcgcaactgatccaaaccataaacatcgagagaaagaccggccgcatttattgtcttaattgccattgtatcgtgagtggatcgatagattggtatgctatctatagatggaatgagatggagatggacgaagagacgaaatctatccgtacctgattttcattagacagtttgtccgaattttgtgatgaaaacatttcgattcttgtattgcttctgcttccttctccactctttggcccccatccgattgcgtccctgccggtttgctttcctcacaacagttgcttgtttgtgtttactatctacgttggtcattcataatatatcttactcgctcatcggaacagcctagatacccttacggtactcgttagtccgtgtctttgaattcgtcatattgtgtgtgtgtgtgtgtgtttatgttggctgacctcatggttattgtttcgaggcagacagttcgttgcttggcgcatacttctcctacacccaaggcctttcttgggttaccgtatctcttctgtcctgttctaaggcattttctctagatgagtagtcctcgaacgtcagcctctggtcaatcattctcggccgtactccctccactggttcctcttgatgtacccatccaacactcttgcaacgtctggcgttctgatcttcgagctctatttgaaaaggcaaaggacagatttggcgacgtcatttgggatgttggaacatcaactcaggatgaaaaacctcgtggaattgaaagtttggaagagagtgacgagaacgatttgacaacgaggttgttagctagatcgcttaagaccgacacgcaagaggtaatagagacggtgtggggtcataaaggtttgtcgttcttgttctcccttcatatagttactgagtctgttctccttctagcgcaaagccactatcggtgaagagaactctgacgcatagcttggactctgatattatctacttcatactaaaacggggatcatttcacaatagccatcatatacgcccgtgctcctcccgcctttcagtatcgctattttccgcgaactgttgatcgctcgtccacccctggctttcggtcatcatcagcggcttacctcgctttaccaaactcagaaccaaatacaatcaggaccacctcacctcttagggttccgtctcaagcctccgttcattcaactgcctcgacataccggcatactcccactcgaatcagagtaggcgtaacgcctcagatgttcaaagctgagcttgagtggttgtacactggcgaagggatgggcgatgtggcagaatggctcaaccaaaatacatcacttcatgttcagtcaagtgtagatgaccatttagaggcacatcaaggtctctttgggttaggtttggggttggcgctcgagaatggagttgctggtgtagatgatattcagaagattgaaggtcgggaaggcgagaagagagagagtctcagaaacgttcgtcagattctttgcaatctttcttcttgcaaacataaacttatcccgaaagactctatttgtgttgcactcggacatatcttcttctaggatctagtatacatgtggcgctcgaaactgtattcggatgtcaagattgtacttccgtgcgagtcacttcacacttcgtcaggatcttcaaccataaaacgaaactcatttatagacagcaatctatcagacgattcatcatcgtccacatgtgccgttttctccacacacaaatttatcctggcctccaggtcaccttattttgcttcgttgctactcaacacgtcaggcttccggtcaggagactgggaggaaacaaacgagatcgagcttctatcacctcctttcactcctgctagcgttcatttttgtttgggatacatgtatgtcacacaacagtaggtcttcgacaggttacaatcgagccgactgactgacgtcagctatcatctttctctctgccatctgttcaaacattacgatcactctaggtacgctggaacattagctttctcaaaccgaacgtacgacctcacaacagcattcgaaattcaccgttctgccacgtatctcctgatggactctctgcgcgctgaggtagaatccagaatcattcatgagatgtgcgatggccttgacctttccctatcgccgggtccatcaaaactctgcgctcgacgcgttcctcgtgtctggcgatttgctggtgcttcggatgtgggtgctctagatttagaatcaagaacgagagcatgggtcgtgcggcattgggcaagttgttgggggaaagagattggtgacgcagaagagcacgagcgtaaagctttgttgactaaggttaccgaaggcttgaattcccaaagtgtttgtcgctatcttagaggagtcaaatcagtcaaatcgaagacggactcagagctaaggacaacaacaggccttcctcgaggtttcaaacagagtacttgggcagagaacttgatcgggatggtctcggagatagaaacgcaggctaaagaaatttggattgtccaatttggggatgttgtgcgttcaaaaggatttactgagcttctgagtggaaaagggtttggaatggacctattggaagaacttatgaccgatgtggtcaactcggccgctgatgtgaagggatgtaagcactccggaaaaaattatcaggtaactagttcttcgttggtctcaagcaaccctgttaggaggagaacaagacatctcaagagaaacttttgtcgatcaatttcaaacagaatctagtcaagtcgattctttctcccaccagaccggacacaaatgagcctgtactcagtcctggttcagccgtcagaactatcatagagaacagtcggaccaaggttttggaacatctcagacgaagatggctgcaagtccgtgaacattccggattcgttggtcttgaatcttgggcattacaggaaattagtgatggtatgtcttttcctgagtatgctgtcattctatgtcgtatcaagattgcaaaatcggatttgttcttggactctatgactaacttattacatggcttgacgacagaaatcggtcagccggtagaggaacttgttgctccgcccctttcacctttcgtcccccctactcgtgctcctccaatactttcaagctcggtttctcgagtagtcagtggctcgaaggagtctgtttcctcaaattctatcaacaggtccccatccgctcgacgacttgatgtagatctgaagtcagtgaaaaacactgaagctggaactatgtccagtcgatcgacgatatccagtcgaacagtagctaaacctcaatcagctaccattccagcgagatcgactgtcacaacctcagccgtttcaaaatcatcgtcttctcctcgtccaccaccaggtgcattgacgactacgcgcccaacgtctgaaaaggcgccactttctaactcaacctcgtcagtatctctttcaggaagaaggtcagtaggtggtgcaacagtatcagctcgttcatcaccggtggcagcggcgacggcggctaggcctgttttctcaagtacactacgcaatccaccaacaaccgcttctagaacatctacaatctcttcatcaacatcttcctcttcccggaccagacttacgtcttcgggcaagtccgcacctgcgtcgactcccagctcatctattatcatttcctcctctactatcacaccttctcttcttaccacctcaccctcaacaaaatcagtgaacggtatctcagaaattactcataagcctaggccatcaaactcggtatcaaattccatgtcgccgtcaagcaacatgtcgactcaatcgactctgtctaatggctcttccaaaccgagagtgtcaaacattcgacaatcaccttccacaacttcgttttcaaggttgtcatcaccgacatcaacgaacactctctccaagatggctgtcacaccaaagacctcttcaatttcggctcagaagacccctgttcctggttcgagagaccggttgagctcaaccacgtcaagcatgagcattcgatcgtctgccggatcttctcgaacttccagcttattgacttcctctaaatctgctaccactgctaccactactgctggtaatcgaacgaggacaacgacgtctccatctatgagatcattgacatcatctttgtccacaacgccgactggagctaaagccactaggcagagaatgcatacatcccccgatataccaattaaagctgctccagtttcaacaaattcctatacacgctcatcaggcactacttcttcagtgggcctgatgtctgtcactcctccgctttcttcattgaaaaggactgtttctgctgtgaagttatccactgcatctagagaaacttccaagcaggatgttctcaacaaaaaactgacagtgtcgaccaaaccgattccgcggtcggaatctgcgctgtcgagcaaaagctcgttacttaactcaaaagctgcctcggtggcctctctaaagacgatcaaaccatcggtttcctctcattcgatcaagcggtcagatccggctccccagattcaaccgggacaggaagttcgatcacctttgaagccaaagcagactcaaacttccactccaacgacatcttcgatctcactcgggcctcccgtacacacccagtccccatcagctccttcggtctcttctcttctctctcctgctatcgtcaaacgcactcgatctcatccagcctctgcgttcgatcctcctaagcgtcttccactgcctcggaaacaactgaccctggatgaattcagcattcactctttgaccactggcgaggcgatcgagccttcgcctgggataagtctacatgtaggaatcccatgcattgtttctatccgagcgacaggaatgggttcagcaactagaggaaagaaggttcgctgtaaggcttgggcaagatatataggaagcttggttggacgagagggcgcctgggttggggtagagctagcggaagatattgatgggaaccagcagcaagaggaagagattggctgttggaacggagtaaggtattataaggcagatgaccttgggctaggcgatgaatgggagagctcggaaggagggacaaccaagaagcgaagaagcttaatgacagatagcgcgaaggatgaaatcctgagacggagagggatgttcctagctccggaagacgtggtatgttcttatgtttcacctgatctccctatgaaaaagcaaacgtggttcatgatgatatgccaatatctaagctgaccgggttttgcttctgtgctgtaggtttgggtcaagggagcatgaagtgatgctgttcctccttgatgattctcctctgccttccatttattacgcattttcttcgctttgcttgtgacgacactgatgaactataatatatacccttccatatcccaacctctctttattctatcttgtcacatccataaaggcctcacggcgtgtgatgaaaggaagagttgtccagctatcgctcttgacaccatgcccgtaaatagattcgtttccttgtatattgaaatagagaagtcacaaatgttgaaacagggattttcagagtattctgttttctctccaacatccatctaaccatcatcttgccctttgtttcttttttacttttcttctctctcgcctctctttgtcatatatggcagctctacaacactctcagtcgaagtctgagccatctgacgagacaatggaaagcccaatatacacaatctcaactcccgccccttttgatcgagtcgccccttcccctttccctgtagacgagctgcaatccttccaacaaacttcttcacaacacgtctctctcggctcaatctcagcggagcctcaatcaattacaactgctcatccattaagggaacagctatctggttctcctcctggatatgcgtttctctcatcccaagacgatctatcgctgtcagataaatcgattccaccgggttacgacgatcagtctccatcgacattttgtacggccaggccaaaacacacaccatcaggctctccttctagacagctttcttataattccgaccaagaaatcagctcggaaaagaaggaactgaaaccagatccaaaaacttgggcgattgatcgtttttcggctgtggattcttgtgtggatgatcagaaaactgacgccgaatcttcaaagttgatagaaatggacttggctaagatgataggcaggggtaggatgcatgatcaatcttccgagtttttagcgggcaaggggaaggagagatccatagccaacgaagagttggatggagaggtcaagaacagagagttgttggatatctgggagaagattgagagggctcatggaactaggctagacgatcaatcctttgctctactggatagtcagctcacggaagcaaggcctgaaccatcgattcggcgaattcatggctcaccaagtttggagaaagatccatccgaaatgatcactgccgaccagtttattcaagaaagtaagttcgtttccttagatcagaagctcgcctcatctggccgatgttcctgacgttctgattttcccattcatcatgtgctctctcattctatcatctagagaattcatctcgctctaccagtccagctacgaagagctcgttcctgcccatgggatccagcgcagagcgaccgcttctattgaaaacaaactcggtcagttcgaaaatagccggtttgttcggtagaaaggagagcttgccgagttgagcgatcagcctgaaaggtcgattgtttgaattcgttgagagttgtatcagatttgttccttttccttctgtttgtctttctttcctcgatcattagtagcgcaaaccctgttctcgagtctttagttctcttcatctgttcgtcgttcttcaaatccggtctctgactgcaatcatgattttgcggctcagaagccatatcctatttatagcatttttttcgtctgtaacagtaaggcgacttgcctagataccatcaacaacaacaccataccatcatctcgtagtttatcaagctaatcaagctagcgctcagaatcttgtctcttatcattatattatcattcatatctttcttctgtacttttcgccattcgttttctcgctccaactggcctgcatgtcttattgcctctggtctattcaaactctactttccatggtctctcctctccattcttttcttgtttcactcaacaattgtatcctttcggtttgctgacatctcttatcttttcctctctggcatgccaaatagaaccataacgaagacagtctttcagaacctcgctatagccttgttgccgaacatcaggcaagcatcaatatcatacagctcactctccttgtcgaatatctcgagtcattcccatctacgtcgtcacccacctacgaactcaagatcccatcgagcaacccttctctaggttatatcagagatctttcctc

SEQ ID NO: 46 - DNA, 24077 bp, Xanthophyllomyces dendrorhous
atatcagagatctttcctcgcaacgccggttatggacctttcaacttcctgctccttctcgtcaatctgatgatagcttagtcttcactcgctctcactcatcatcaaaccctcaaacatacaccctccgacttccatctgcgacttcaacgcgctccgaatcccatcaacatgtgcaacctttatctattcactcgcttcgaacttctcgttccaaatcactcaactgctctgaatgcagcgccaagatcatcgatttctcagatactgccagggaagattttcacgagctaccctcagaacactgggaagaactgatcgaaagctggctgtgttgttcatctatggagttggatctcggcagcggcaaagctggagagcagaaggagggcaaagatgcagagaaaatattctggcccaaagcaaaggagattctgggaggagagggctacttattggtcgaacaagagatggtcagagaaggggtatgggccgtgagacacggaggctcggtatgtcattctgcccgcattttatttcctgttctttctttctctttcttctttctttaaactttcatcaattggaccataaagaaagccgcccccatgtgtactcattcacatcccctaccggagttttctctcgcgcgcttgacctacattcttgtctctccgtcttttgcctgttatcattctcacatgtttttgttctcgatttttcatctctcacacgtctatcaattcgaattgaggtttcatcgcgaaaaacaatgtctgtgaaaaatcccatagtagggtttatcacatatgtttttttttccttcaaatgagacctttggctcgaatgctgaggcatgaagaagatggggattagctcaaaaacaattactgagggtcgatacgggtagaggcagacagactaggatgaggaatagtgtctccgaaagagactgggaggaaggtttcgtccctctgctatcttcgggtaggggagggcgaaaatttccttttgggtggttgatacatcgtctgtcctacaatcatccaaactcgagagtatgaattgaagagatgtgctcgtcatgtctttttgcttgttctctcaagctgggtttccttcttcaaacctttgggctttttaagctttgtgggcttcttcgcaagggctacacgagggaaaacaacacttttttttattttcttctctttctttcttctttcctttttcccccaaataactgttaactctagcaaacgtcatattcacttttgccttaaccaacccgtttggatccttgctattccatctgatcgaaattagactgagatatggcaaccgatcgtctgctctatctgctctttccctctcggtcgacgattcattcactctccccaaagcagcactttcaaatttactaaatacagtcttgctctcactgagtccgaacaaggtcttggcagtatccacgccggtcgtggtaacggccagaaacacggctggttgcagcaattcgtggcggcggagatgagagcattggcggacgcccatcgatgctatcatttcgttcttctggatgaagaacaacaacaggaaggagcgttcacccagaatgaaggcatccctcgaatattagtatgtttcagattctgctctgtcttctacgatatcttccagctacaatattgatatttgattgatgtcttttttatcctttcctttgcctcctcaaagatctggatgctgaatgcgaaccttgacttgacagttcggtcgtttggacctatccaaggaacacatcccgaggaccaacctgagagtgttcctcacaaagcgatcaaagttctctatctaccgcttactccaacttcgttcgttatctctctgctcggctttctcacttcctgtcacgatatgtcacttcttaacaagcactgcttggaacttttgcagagcaataccctcgacattcccgttgtcaaaagccgaatacttgccgtacccaaagattatttgtgataggctcgaagcagcgttggatcgctcatggaacttttatccaagggaggctagggagatgatgggtcttcggatgagctggctcgagagaacttgaacaggacgtgatctcaagatgcatgtgttcaatcgagagagaatgacgaaagagatcgaggacctttttatatgtttacatcaaatcagatgaagaaaataagcgaaagagacagatcgaacatgagagaaaacaaaaggatagatcaaaaggggtatgggataggggataaaccagctagcagacagatcttgctcagcttgccctcctttttagttttgctttaacgacaggaagagtcaaagcgaggttgtataaaatctacatcccttcgaggaagaggggagttataagagaaaaaaggtgaagtctagataaacactagatgaacgagattggattgatcggctctgctcttgcttcagaaaagtcaaagcttgcttctaagtccgggtcaagctccgctatgagagcactggatgggcaattggtcaaacgaaaagaggagccagataagaagaggaaggtgaacggatagatgatcagtcctttgtcgaacacaaaacggtttcagctcgacgagtgtcgttcagcccaaatgtatctgctccagctcagatgataaagaccggagaccaggagagtacagcagtttcattaagacaacaaagattttaacacgcacatattgtctcctctaatcatgtacagacctagcggaacgagctcgactggttcatcagtcgagaatagtcgttccacagagttggacaagatgatgttcgtatgcgggtcgtgtcctttgaagttgccctgatagagagggttccgcaaaaatcaacaaaagaaaacacgccacagaccagagaaacaccgtgttagctttgaggagacaaacaagacgatacggaagaggcgaatggaaagggtagaggagaaagaggacacggactgatattaatcttccatcatagaggagaacaaggacgtcgactgaagaaagttgagagagaagaaatagtgtgagctaaccaccgaggatccctctaatccatcaactgcactttataaaaagctagctagcttgctcaaataaagggactgacgattgatgtatctttctagactgcccatgatgacgggcgttggatgacggctgctgatggtgatggttaaagactaatcgaaatttccttcaacgacaacttttcctttgttttcaccttctcgctatcgtacgtttgccgtttctatattgatgttagctgcgatggatggaggaccacaatggagatgcctgcttgggctgatcctgatctgtcacgatcacttattgatcgcctcaagtttcaggcctcttgtttcattgtattctctcttctcccggctagctctgtgtagctaggtagccagtcagccttcgatggcatttacatctcccctggatatactcatacctggaccactttcgccaacgctatccaccctgtttctcggcatatctccgctctttatttgtggactcttggctcatctctcactccgagaaagtacttggatcataagattggcaattgcgcctgtgcagagttggatgttatggagattgatgggaggtgtcgcgttctctagtacgagtgttgattctcctttgatggtcctctcgaacgttgaatctgcaggcctgatccatcatatggtctgctaatgaaaatcatcagatccattgctgttctggatgaacaacgtctttggatttgtctgtgtgcttgcaagtcctgatacttcagatgttcacccttcccgtcactctgactgaccgcgcatcccggtcaatacagctatcgttatctctgcctcgatgtcttctgcctcagccataccggttcaaagctccttataccggcccttcctttctctcagggtatcagttgatcaccaacgttcttggtgattacttttatcctattcctccatactttgttccttctagtccattccctccatcttcccatacctctctgtcagccaggataccccagattgttcaatatgtgctctgttatgtaccgccggtcgctgccttagcaatcgccatcatctgtataccaagcacagtcgaggacgacttttccgtcttacgttctggatggttagggcttggattcacgttctcggcgggcatgatggtgtggtgtctcctaacagctgactggtgcctcaacaactggttgcaacaggcagccgggaacggaattactcagcccagaggaaatatattgaacagtccatggagatcgacaagtgtgcatgagttttggagtggtcgctggcacccacttttgacacctacaatcatgttttacaaagcgttgttgcttccgcctcgagatcatccgtcgggattgaagagacagttgacaaaacttgggactccgtttttgggattccttactactgctttagttcatgagaatctcatctatcctgtacggttttgtttttttttcttcgcaaacccgtccctttggaaaccgtcttgcatgtgactctgcatgcctgactctctgtgcttattcaattctggacttagatggccaacacaaatcgccccagtctaggctatctatctctcttcttcctgctccaaccacttgcccttctcctcgaacgcgccttccttcatctatctggaggaaggaaagtcagcggaccagcaggttgggtatggacattcatctggttagggttcacaggaagatatctggcagaggggtatgtgaggatggggttgctacgtcaactcaagtctgtcacggaatatcttggagccagtttgggtttatgattgatatcttatagtcactactcagaggctcgaatatagattgtttatagagatagaacgaaatgatctttgtctttactcaagctcccttggctgaatctccccaggaagcgacgacgtgctccgagggtaaatcatccggatacaactaatcgagcgaaagggaaaaaagaggttagcgagtgagttcaccaaaaaagacaatatatctgagaagagtatgtacctttccagggttccttttagatcgtgttcatccgatgaatacaacgtcaaatacggcgtcaatcacttgtcttgcagtataggcaacgtagaaagggaacagtgcagaaaagaatgagaagagggagataacgcacatgattccaagcgggtcgatcgcattcttgacggtcttcatcagattgaccgtacctaagccaagctcggatatcaggtattccttctttcctactccgactctatattttgcgcattgttcggcgcatgcaagacgaagttgataaatgaagaagtcagagactgtactagatagaaggctgttcgacgacgatagtgaaatgaagtgaaagatctaacccgtgctcgccagtacatgttccttcgagagcgatagcacgctcaaccattcgatgaacagctccatccgcaatctcatactctttctggttctcgaacaactgattgagataaaacatcgtaagaatgaaagatttagtatgtggcatgctgatcatgaatctgagatgatcctcacaattccggtgtggaagtttccatcaccaacatgtctgttgatgtgaacaaaaagtgaatcagcactggactacaaaactctcctaaaatcctgatgcacgcatgatgagagatcaagaagaacaacaaattgcttacccaagtacagcagctgtcaatccgcattctttcaagtcctcctgagtagtcttgataagctccgggagcttgctgacagggatacctatatcattccaactcgcagaactagtcagtttttctgaatcatgtttatatcgttcttcgcgcgatcaagctagaaagagtatgaacgtacagacgtcggtggaccaggatttagcgcctgggttaagcgccatgatcgaccaatgggcaacctatcaccaagcaatataaataaacacagataaccccgaccaaattcctctacatatcagcttgcatgaagatggaaggaagggtaaacaaagacaaaggatgaaggaatttacctttcgaccccgccaaatttcatcgctctcttctttcgaagcagccgctcgaaggtcttgtcctccatatttaggaacaatctcgctaaccatggagtacgcttcatccatcatctaaaaccacatgcgctcattgattaataccgttgcgcacatgtactctcaagacatgatgaggaggacaagggagtaagaatgaaggaaaacaacagaccttttcactaccctgaaacttgaagaagatggaatccctcatgggaaacttctcgtttgtgagggaggcttgattgatggctttcatcatgatggtatcacataattctacacattggatcggtacaccagcgttcaagatcttttgttgtcgtttttttagggtactatgttagtattacgcataagaatcaaacacccgagaagcagaaaagagaaggaagaaacagacctcatatacagcctccgaggcctgcttgacgtcagggaaagagcaaatcgcaactcgagtgggaagaagaggtgctagcctcaaagtagctgtcaaattatacgattcaatacaaatcaggtaagtttacagagaaaccgtgaatatgaaacaaccacgatagcagagatatatgagcaacacataccttccctttgatagataggatgtggttaagaaacatcacagtgtcaatataatagaggttagtcgataggaggtgggggactggacctacgtgacaatacccagcgtaccctctgcgccaataaaaatctttgtgacatcgaagccagcagacgattttctatccatcggtttgttcacaacatttgaaacaagtgctaaaagagatgagttcaaaaaaaggcattttcactgaagagaacatagactgaagcttgaacaaagataccttgctcgactccgggttttgatgacttctccactaggaagcacaacggtagcgttgaggaaccactcggctttagcagtcccatatctaacggcattagttcccgagcaacctgtggcactgttagtttaaaataaagcataagacagactgttatcactcatgatctttggtcgatcgataccggcgactatacagaacggacatcattcctccgatagtggctcctggtccaggatcaagctgtgcagtgtaacaaaacaaccgaaaaaggttcacatcaatattacggttccagatcaattgtttttatgtataccagaaacaacaagattcatacggggaagaaaagcttgatgccttgttcggccaggtgctcgttgatgacctgccattctacaccactctggactttgatatccgagttaggcacggacaactcaagaatcttgtccattctactcaaatcaacagagattcctccgtaaggctgatgggcaattcaataagacatgatcagtacaaagttgatcaacgctctcgattgacactcgcaattaggaggacacggacgtacagctgtgatatgtccttcgagactggttccgcctgaccatggaacaactggaactttatatttggacgcgattttcatcactcggacgacgtcttcattactctcaactgtaggttgagtgatatatgaatcgatgaatcagctaaattcggattctcatgcgcgcagtttgcctgtcgagggcaatcaatatgagaaacaagagggtcgcgcaccatatacgatcaccgctgggactcggggagcatgataagtattaggtgagaatccatggcccagcagatcatggggctctgttgacacctgatccgtaccgcttccctccttctcaaacacctgtttgatctcttccactgctgcttcaaagtctttggcgcttccaaatcttggatctatgaagggaggttcgggtatcgggttgaacacatctaaaagtagttgaggaggtccgttggtgattaggtatgtacctactgatgcggcgagtgctgttatcgcaatggtgaatagtctgtttcctctgatctgtgaagatccttggttcgtgctctgaaaacgtttagaaacagacgcggtcgtccgagggctgatcggtgttcgcccgagcgaacaacgtggacctcccaggagagctcttgcactttgttgtatcctaacagcagacatgatgagtgattatgtgagtacctgtgtgctttcagcgcaacgagaacactgatgtagttgaagaagagatggaaaaaagaatggttccccatactttttatccatacctggcacgccatcaagacgaccaggcggtccgccggcggcggatcgggccgacgctgccgaaccgctaaataccatcaaatcacgtgatatgacctgatcgtgtggcgttttgaatcacttgatgcacgttgcacaaaagaatgcacagcagacctgtaaccttaatgaaacgtgcgtcattcgtcgtaaccacagcctttctgggtagtattctcccattctcagttgtcactataacctcttcatcctcactttcactttcgttctttatcgttctttcacctctctgcttgttttacaaattcaaaggttatatcgagaatgtctgcgagtagaccatctagttcgggaccttcacttggagcgaaaactaccgtaccaggtcgtcggcctcaggctcaacaactccctggtctaccctcttcacttcggtctgcttctgcctcatcctcttcagccgcatcgacacctgcatcaacctcgttccctcaaatatctgctctccctgctcacctactccctcggactcgtcaagatctctctcgtaatccagtgtctcctcaaccagcgttctcatcttcgcttggtgcttccaaccaaatgagtcaacctactgggtctggttcaaacggtctctctagacctatgggcaagggaacaccctctggaaagggactcgagaaactctcacttccggctcgaacatccaagactggaaaaaaattggtgttccttcctgaggaagttcagaatcagcctttgccggtcattcctggtggggccaggccattggcacatccaccaaaagcggacggtcaggtggaggaaggcgagagggatcagggcagggttgacgacaggagtgaagcagagcgaatgaacaaggaagaacgagagcggaatgggtttggtagacttactgcatatgccactgcagagtcgtataggttaaggtcagagcctttcctctttttcgtggtcttctcctgaacgttgaatttacatcttagacatatacgaggttgaagtattgattccttctctaattcttctcttcgaacgatagaaatcttgctgtatttttaaagagagaacacggagccgaagtgaggatatttgatgaagcaatatatgccgtgtatgtttgcatcttttgcttgcttagcagtgtccatcttccgcgcacctaggctgagttgtttggtgcttttcttgttcacccttagatacaccttacccctccttcctggatacggaccaaatgtccgtctccgaagttccgtagccgtcaagtcacctggttcgtacagtttttcaatgaattctcattcctttggctatcatcagttgactctgaatattcttcaatccttctatttatcactctcccaggtggaggctcgattttgaacgctatggacaaagctgaagaaagcggttaccagggctcttactttcctattgagccgaccgacccggaagcgaacccgaatccgaatccaaattctgcttccacgactgacctcacctcgcttgaccaacctgaggacactgttcttcctgatccttcctcgccctcagggatccttgcccttccatcaccctcggactcatttcctcccgtttcgacttcaccgcctctgaaccgtcattctgcctcgagaggaggattcgattcgtcaatccttactcgttccaaacaagaacccaagttggctgaagcaatctttttcgattatggtgttagcgtgttcattgggttttctgaagcaagggagaaggatatcttgagtgactgtgaaagtggtggaagctggatcggagcatttggtgctgaaggggagagcgcagaggagaggggttgggagatggaggaatgtcattttgtggtgggttcttcccccgtaaatctctccagttgagacaaagaccaatcgattaacagcttgcgatcaaactccgttacatttgttcttacagtacgatccgacggctgcttaccctcggattttcaacggtacgttcttcacttaagatatttaccgttctttttcccttcactcacgcatatgcaactctgtcactccgaagatcttttcacgttcaaatctccatcacatctgcttaaactctcactctcccatgcgctggcccaatcaactaaattgtcctattacgagtccgccgtgcaaaacacgacagcagaaacggcgtacatcccgaaagagcttgctctcacaggtggtttgacgatcgataggagggacgcggtcaagttgacaggcaaactgttcaagttgaaggtcgaggtgaacctggtcagcaacgtgctaggtatgccctttttatcttgatacgaatgttcaaattcaagctaatgacctgttggaccgctttccatgcatccttctctttcttgcaccttgtctatcagatactcccgagtaagttaatttcttctcatgatgctgacacatacatcaattgaacgaaacaaaactttctttctcatattcagactgttttggagtgaagcctcgcttcagccgctgtacgaggcagttagggagtaccttgagattgatggtcgagttcaggttctgaatgaacgcctaggcgtcgctggtgatctcgtcagtctccggtcttatgtttatcacatcttcagtctgtgtgacagttgaattccattgagaaacactagttttttctgatacgcctttcttcttttctctcacggcgcgagcagttggacatgatccatgagcatgtggataatgctgggatgcactatgttacttgggttatcatttggttcgttctagtattctgtattcgtccaggtatgtgggacgaaagctgattctaacttttcattcggccgaatctcttccctctgcaggttgattgtcgtcgcttgtctggttgagtttggagaggtaagtttcttcttatcttctcttccacaccactaggagcaaatcctacataaattaaatctgtttgtcttgaacatgatcgaaactgtcttctttactaggtcctcgcgagattagtcgtgaaggcaaccgagcctgagttgcttatgtccggtcggacaggcataaagctgatcggacagaagatgatatcatctacgttcaagtgaagatggttggaagggaaggattggcgtgtctcgttctatgtttgaatacgactagaggtatcttatacattacatattcccctttttctctttctcatgatgagaagttacattcatttcatcatgaaacacataccctatcctcaatttaagttctcacaagcagcatgcctctgtctcagacgatcatcaattccagcttatccaaataatatatcagatcttaaaacccacttaacacctgacttaacgacagacccttcgtgcaacaaacaatcctttccatgccgatgaagcatggccgaacccgagactgggttgacgctaagagtcttcttcccatttgaattcctgtttccagggagatgaaagatagtttcacccccaatgagaggcgttgtaggagcggaaagatagatgagcaacgtccattcagtatggagcattggattcaattgggatcgttgggattcgtcgtagtgagaggcctagtgcgttcgagacagcgaccgaggttgagcgtgaggtgttatgtaccggtagaagaaagcacacgcaaagtagaagaagatttaggatcagaatgaatactataattgacagacagaggtagactaggagtatacgtacaaagtattgaccttccgtgtatgagtaaacccttatgttttccaacaaacctctagctttcatggaactacccgaattcttcaagtttgaaggtcgagctggccaatcatgcacgatatctattagacccgtagattcatacaaatgagctgcaaattcgggagatattgtcgaaaacctatctgaattcgcaggttttcggaatgggattcatttcgtcaggtctgctccaaagggaagtagatagtcaaattgaagaaaagatcaaccgtttgtcctttgagcttcaccacgtttggcaggaggagaatgtgtcatttggagtgtctcaaagaaacggatgaaatctttgacttcttgttggttgaatacatccttaaaagatggttcgagcatatggacttcaagcatcagctcatttgaaagcttgtcagatcgataataacgaagagagaacaaacatgaacgagaacaacttgatcttctagtagcgtttctacctttagatttttccgaaatttctttgagatcttaggaaacactattatgggcgaggaaggttctgttttcttgtctggtgtctgtttagatgtcgttgctgatcctgatgtatgtgaagaagttttgcgtgccatggctgacggtcgagtgaagtaagtggttgagcatccagttgacgatgacgttcattcattaaccgctgctgatccacctaacatcaatcaacaaccaaccaaccttccatcattcacacaggtcatcttctcttaagacatcgaacgagataaatgaaattgttcaatgaaacctaaccttcttctttcttcgctgtcgttttcgtacgttatatcatgtctacgttgtttcttcatgtgcgtcatgcgattctcatcccactttttcgcccggcagtccccaaacgtctgggccacttagtcgggccgggtatcttagaatacatgaccttcagggtattcagccagaagatttagctaaggtatggactgtgtctcttccgtacgcacaatatacggaactagactaacacgtcaagtggcgatgacacgatcggatatacatctgctaggataccgggctgactctcacagaggctcaagacgtgatccgtaccgctctaggggatcctacacccaatggtttgtcttttgtactcaggatcctatatgaaccgatctttttcctgattccaccttcatgattgattctgatcaccgtcaccgtccctgattggaaccgctctctgacctgccacagatatgctccaccaggtctcctctcaaacggcttctcagctcttggacctctcatccagacttccatcctattcgttccaatccaaatctatcgattccttgtttccagatggtatcaaaccagggatgatcatcgaggtgtctgggccacctggcataggaaagacatgcgcgcttgtggggatcgtgatggatatgcgaataaagaacctgaaggaggttgaaaaacacggggaaaaggcaagaaggagagaggttttagtagttggttcgtatcccttgtctatgtttggccttctatcccggtaatttagaatagctcaacctcattttgaactgactttttgtgagatagacacagaagcctcgatctcgcccgatcggttggcccaggcagctgagaatcaggccacgagagagtcaggccaaagtaagcgacgagtactgttctctgagaacgacccaaaactgattgcgatgcaatcgtttgggttgacgtagagttatcatcggaggatatacttgaagggatccgtcttttgcgactgcatactttgtcacagtttgtatctttcttcaagacgctggacacatatctagatgagcatcctgaagttagttcctgttgtttcaccttgacttccccgtcctactttcaactgagaacaattcacgctttctatccatgatcacagattaaatcaatcgtaatcgatacactgtcttaccatctgaggtcaccctcaataccccctgatgcaggctcgagatcgaggatcgtagcgctcatcaaacaagagctacagcgatgctcaaccagatatgagtgcacagtatgttttctctcgattttttgaaaccctcttttttgtctccatctctgatctcatcggatcgtcatgctgttagtttgtggtaagcgttcagatggcgacaaagttctcggacgtgggagagggaaatctcgatgaaccactatcaagagacgaacgagcatttctgatgcctcaactaggtaaagcaacatagacctctctttctgaggtttcacggcctttaaactcccggtatatagttcaactgatcctctaatttcctgcttgtccttcggattgttggatttattctcggggaaaaggtgtttcatggatcccgatgaaaacgaaaagattgatgtttttctatggaggaggtatggtaggtcatcgacaagtcaaacggtaagttctgtgtctttctttgtttctcttttctccttttaactttgagcgtcacggaatttacttgtttcttctcttgaactgatttgccggtcctctcggggctctctacactgttgaatagattcgcgaccatcattcccgtcctccctcccaattcttctcattcggcttatccaagctctcagaaccaaaacggcaatgcaaacggcaccaacagtgggatgtggggcaacgcacagccctctcagaaagaaataggtctgggatcaggaatcgatagggttgagtatcggatctctgtacgtagttttatttttttactctcctgctttctgatccactaagtagccgcgctttaaattcacgatggtttcttcttgcgcatgttttggttcgggatggggtcggtcattggtgtcagtctgaaggaatgttggccgatatatgatcgtcagatgaccatcgtatatgaaggaagagaaaaaagtacaacagaatatcggatgaaatactcgtctctacaaagcaaacagataaaaaaggggaagtagaagaaaagatgcgagagtgaatagcaaaaagggagatcaagtcaattgattccagatagcccatttttggacatgagtgccctctccagacttggcttgcagatcgtcttctgtgaagggtgtcgacgggggaattgaagaactaatgcggattcgatagagaaagtcaatcgggtcagtccaagaaagtttttgggttctgtttgatggatgaaaagagacaagaagaaagaagttcggatgttgaggggaaaggagcttacttccatagattttgactacctggtttgatctttgggttcacgatgaacgggtgtgcctctattgattgttgtccgaaatccaattcggacgattcgcatatcagtacccttcgaaccgaccagaaaaccacgaccgtctatgacaggtgaaagaacgaagaccaagagagaggtacacaccggtgttcaggacataatcgtctaacgaaagccaatcaggttcagattgcaagagatagtgatacttcagcgtttctgccagcgcaaagctgttacaaagaacgattatcggccgtcgggtttcgatcatcagtatcaaatagacgcaaatggttgatcaaatgaggaaaggcaaggtagacgaacgattccatgttgtccagtcgactatgggatcattttgaattcccgacaatatcgaactcattgatgtcagcctgctacaatcattgtttaccagactcatcgattgaaaggggtggatggaaacgaaccttatgacaggatttctaacgtctctgacgcttgaaaatccagcatccgctaaagagttgttcatcctttttgtttgcaaattgcgtttattgatatgtacctgtcagcccttgaccagcgatagaatagaaagaagagagtaaagataacaggattaccaagagctgaacattctccatcctttatcctaatgaatcccataagaatggaaccagcgattagttggatttgttttttgatatgtgaagatccgtgaagagtaccagattaagggagaaatcagaaaggacttacttgccaaaccttatctccggctgagaggaaatgtcgattcaagaaaacaacattgacattcaaattatgcatccaagaaggttctccttttgcggacggcacagagaaaatcgaggcttactcagtctgtacatataaaataccgatctaccaagttcaaagttcccacatcagtcaactacacctcgatcaaactttgaaaattcaaggcagcaagtagagaagaactaaaacctcactcgatggtctctggcctattgatgtactttgactcgaccttcttaaatccgaccggtcttcccgctggcttcttccacagtatctcacccttggaatcgacgatgtctatccatcgcccaggagatttcggactgtagaactcaactttctcagcttgaagtccagaagatgtcattgctcccttttgcaccgaacattgcgcaccaggttagaatatgaaggtcagttcaaggaagataattgaggaaaggaagataaggaggagggaaacgaaagtaactgacagtataataacaagtctgggtgaaacgtttagccatttccaaatcttttggcctattcaaaagctttgatcctaggcccatcatcgctctaccggaaggaaagcacggcaaggtaagaagctctgcctctcaatgagtatgaatgagataccaagcccgaaagaagcacaaacccggcgaaacaagtcaggtgttccaacgtcgtcctgaacgtccctctttcgatttctcctattgtctgtgttgccagatgagaaaaggttttttttttcgttaaaaagccatggtttcccctcagctgatgagagaatagagttggagcactaaaatcagacgtactagtaacgatttaccagggatggtcgttatctctctgaccagaactttggaagctttgtccatcgcttgttcatactgaactccatttgtcatgaacaaaggagagagtcaataaaatcgtccgagaccacggtggaatgatgccaattgaaggggaaaaaatcaccatcctagcgtattgaggtagagatccgcccaagagttgatgcatcttgatcagatactcatagtacgaatccgctatatgaaataaaaccccatcaagacatctttcagtacccgcgctcagagacgaaagagatcgagaacgaaccttgaccgccgaatgagaacattccatccaagtcatctgctgactcgggatcaaatatcgtcggtaataacggtggccagagtgatcgtctggtgaggacggtatcaatgtaatctgttactttttgaacctattgggttttgccaacagaaagatcaaggaaattaagctcaaatagagcgtgacacaaggaaagacgaggagagcgacggacgtgatggaagtaggtgatatttccggtcaactgccaaagcctcgtgagttcgagcgtcattgaccccgctgtaaaaaattgataggatcgcacacttgcacgcaaagtcaggtcgattccaatgaaatctcttccgacataaaaagaagaaggcctgaccttcagctaaacatgcctctgatggcgagccgaacgctcttggtcttccaggttggatagcagcgtaaggaatccctgtgggtgtatcgaacgcggggatcctgcacagatggcaatcgcattgcgatgagtgagtctttttaaagtctccatccaagtgtacagaggagacagaaaataagaggagttaaacaaacaagatctgcgcaagctcttccgcgcgctccaacatcaattgatcgctcgtctacaaaagtaaacgttgttgcttagttcgattcactagtgaaactctgatgcaagagaaccagaagctgctaagacccaccaaatcataagccgagatcaaacctccgaggtacctgatcgtcgtttcaaacacggccaaccaagggtagggtgattttcccggttcataatccttgtttcgtccaaatcggatcccttttctccagtgtttaccagagatgattccaaagtcgagttgacgaacatgctctctggcgagagaatactcctcgggaaggcccaatagaagcagagtgtcgagggagctggaaaggggtttgattggaaattaaatgatgcgcatgcatacataaaagatgctcgaaagaagacagacagagaggaacctactcgatgatggtcgctccccaaccagcgaacggatcagatgtcgactttgtcaacggtttgacctgtgagtgtgagagagacgcgtcgaaagaaaaacttgtcagatctgttcgtgtttcacgacaaacgcttgcgctcgtgctcgcgttcataactcacctcgtcatgtccccacgcgttttgcttatacccctcccaagcccagatgaacgcgtttcttaccaactcctttctctccagtctcttttttttctcagctggtgtctctaaagggaatgatgactgatctagttggactttgttcaatccggccagtggtctaggaggaatctttggagggacccaatctctgccgaacctgtcaagctttgcttgtttggcttcgtcgagctcgggccgggtgaagattggccttgtggctgggtagagatctttttccatactgtttggaaacactggacttccaccaggagcacccgaagctggcctggttgacaacaaagcgtgccattcggtatcatccgtcaacagggacgacggggatggatcgtctgggggaagaagggtcgaccagtctggagaagtctctccaggtttgacgactgccgtacccggtctcataccgacgcctccaaataactttcctggctttcttgtctcggatggaggtggcagatcttcaggatctgaaaattgaatgtctgattgtacggaatttgactggtcgaggtaagtaagcccaaggaggaggaaggtagacagagtagccacagtaaggaagaacgtggcgagggatgagcgaaggaatatcctaagaacatgacgatagatcgtcttggtcggcgatccggtgctcatcctttgtctgtctttgcaatattccgagagaaggaaggtgatggataggatgggataggtgtgaaggaggagcaaggaatgtatggacccagcatcttgacgccgaccggcctggttacatcatcatccgtcgtttgttcgtaacaaggcggttgaccagccagccagccagccagcatgcattcgcaatgtatacatgcgctctctcgatcaaacacatctggagggataaacaatatgtatcggttccgtatatgtatgcgcggagtgataatataggaacgcactcagacgtatgggtagtcatgtcattttgagagataagagagtcgagatcaaaagataggatgatctgccattcagattacatcaagcgggtgtggactacagcatatggcagtccacaccatctgcagaagcaaactatctgggatgaattcttagtccggcgaggaagtcagagatacatgtcgcacatataggtgtagagaagatattcacaatgtcactaacaccatatacacgatggaaatacatatggccaaacatgtgaacgccttgctctacattcgcgttgacgaacgagcagccgtcactcctctagctccactctgtcttcctcctgttctctcctcaacgtacaacatctctcttttcgccctgctgtccatgtccatgcacaatgtcgatagcgacagaacaggcgataagaacgactacagacgcactagagaggaacgtagggaagcgggccaacacgtgacttttacccttgttgagacataaaaccctcgatcctgcatcgaaccctcaagccgaccaatgagcgtgcggccgatggaaagccgagcgatctttttctcgttttccatccagactcactttgggctttgaccttgaacatcgacaacactcatctctcgctcgtcaatcctttctgcctcatctcagtcatatactatgcagtccatgtttacctcgatcgcccgaccttccacctcgagggcccttcttgctgcttcttctagaagagctttccacaccggtcagtccttgggttctcgtgcttgtttctcgttcctcttcgctctccttttcttctctttgcttttttacatctgtcttttagttgtgtagtgatgaacgactgctaacgtggttttttaccttgtctatatgttccgcctgctgtcgatctcgatgttactctataatccaattgcttccatgcacatgtacacacacaacatcaggcaagccctctgctgctgccgtcgtcgctgacaagaccgctcagattcacgagtatgttcccggaggtcgtgagtatttgtttcctaggatttctcgcttcttgttgaatccctagaaaacggctatcgcgaaatcgatcaagatcgagtagatgattctgtccataaaggttgctcgtaggagaaggagcgagattggttttgctagctggccattggtccattcatctttccttccactttgcgtccggctcatcctgatctgagcaggcgatcaacagagcttcaatttcgatcggtcgactcaaactgatttacttatactccctctgtgtctttcctcagccgtccttcgaggaggtgtgaacgatgcccacaagtttcctgaaccccacaagtcccacggttcttaccactggcagttcgagcgacttctttctgtcgctttgatccctatcacgtaagtttctcccttctttcatcttctcctcccttctcgttccgttctgctcttcacatctcctctaaccattcaaagctatctggactcttctccttgtttgcttctcttctactcgcctgttcgatagtatctccaccttcgccgttgctccctctgcccacccgattcttgacggtgtccttggcgcgtccctcatcattcactcccacatcggatttgattcctgcttggttgactaccttcacgagcgaaagttcccgagagtcggaccggccgctagttgggctttgagagctgccaccgttggtgcactcttcggcgtctacgagttcaacacgaacgacgttggattgaccgagctcatccgaaagacttggaacgcttaaacatctggcctttcatttctcctcctcgtttccctctacttttccttatcgttggcttctcatcatccatcttggcgctcttcggccatacttctttccatatccgtttttcttttttctttttcctccctatcccgattcttgttgacggctttcttgatagttacgttaatatgtgtttttaccacctcatgagtattctttccctcctatcattcacactcccttcttgtccttgatcttgaaacagacagacaacaaagtcataagaacagagtaaggctttgagaggagtttaaaaaagaagtcggccgggacggaatgagacaagacgagcaaggcccgatatgagctgcctttttacgctttctcttgtttctggtctctaggttgtatcgtggtgtctgttctactgtgtctctcgcgttcaaaagaagcgcaccaagaaagacgtatctgaggtttatttataatgaagatacgatggcgggataaaagggagaaaggtatgatggcaggcgggtggaagtttatgattaaaagaaggaaaaaagaacaagcaagaaaacacaaggttgaaaagtgtataagaaggatagcaaagcggagatggaatggaagaggagggttgaaaattatgatggtggaaagatcaaagagcaaaggaaagaaaagaagagggaaaagaagaaaaaaaagtcctatctgaccatcaagacggcctttttgttaaagttttccctccttgctttcctttttggtttttttacttgttctacttctgtccctgtccctgcccacctcgctttccacctctcaaaccctgaccgctgatgaacccacctctgccacccctctgagcgtttccaccctgtccgccttgtcccttctcgccctgcccaccctgcttacctccgctctgctgtcctccaccgagggatccaccccgagagttgttgttgtggttgctgttgctgtttcccggtcgctcgttcttctccttcctgacctcgacagtgacctttccctgtccgttgatgctcacaccaccctcaccaccctgggagacaggcaaggaagcgagaatagctcgtctggcggaaacgacagactcgaaatccaagaaagcgcaagccttggccttgacgatctcgagctccctgatctttccaaactgggactcgagtgccgtcttgagcacgtcggcatccaggtcggctcccccacccgcagcccagttggcgagcttgacgaagcactgaggcgttcggatgttgttcaccgcctcggcatggctggacaacggcttgccgccctgggcgggagtagagacagcctgcttgggagccggagaagtggcagcggcagcaggagcaggggcagaggtggctggcgcagcagacggaggaggagccttaccccaagcgcccttcgcaccggacgcggcattctgagcggccaaagcggcccatgacttgggggcagcaggcttgacaggagcagcgggggcagcagcaggagcagtagagacagaaggcgaggcaggagcaggagcaggagcaggcgcagcggccttctcctcagcaggagcagcaggtgtgggagcagtcttcttcttctcgacctcctcaacagcagcaggagcaggtgcaggtgcagactcctccgtcacggccttctccggctcggcttccttggtctcctcggaagcgaccgacttgttagcctcaacggtctgcttggcctcatcgacagccggggcggcaggctcttctttcttctcttctacaactggctcttccttcttatcctcctcaacgggcgcactgacctcgggctcgggagtggcctccttggcctcgacctgtggaacagcctcttcggaagaaacagcttcaggctcatcctgctgctgctgctcatcagcaaccggctcaggagcatcttcctccagagcgtagtcctcatcgtaagactcctccttgaggaatcggaagatgtcgttcaagacaaagtaaccgttgggctgctcggccaagaagaacgtctgagcaaacttcttccacggtccggcgtcgttcgacatctctccgatgacttgaataagaattcctccgccgtaagagggctatatgcgttgatgaaaccattcagttaatgagtatcgcgcaagggtgctgaactcttctcttcgtttttggatggcataaaactcacttgagaatcgacagaatgaatgaaaaccttgcagttgttgaagccaatcgacatgatcttttcgttgatctcctataaaggtgtaatggagaagatgtattatgagcggagtgctgcgatgcaagaaagaaccgtctcttccggtcccgatttcttttcttgcaatgaagagtatcaagaaatcgcttacctgctgaccaacgcagggggtcccgtcctcaccctcggtgccgtggatgaaggtcgagtttttggtatagaagcaatggagacgttgaggatgtttgtttacaaagttactgttttgaatataataaaaaaaaccaagttgaagaaagatcagatgctgagtgtgagaggagaagaggtcgtctgaacgccccgagacagtgacatgaagagatggacgtgtgtgtgtgtgtgtgtgtgt

SEQ ID NO: 47 - DNA, 15935 bp, Xanthophyllomyces dendrorhous
gtgtgtgtgtgtgtgtgtgtggcaaacgagtgaagagactggcaaataggagttctgccacaatgtcgtcatttgagaactgagatgttggcaagtcctttgccgatgctctcatcagcataactcggttgatgctcgtcaacaaagacaattctcatccaaggctgctccgagctcggtctgaatatgacgatttttgcacgcgacatgaacaaagagggctccaaagacttactagtattggggaacaaactgccaaccgacttctgcactggtgatagctgacggcttggtagaggtagaagcggtggtaccggtaggaggagtcgaggacgagccgttaggcgccgttgtggaagatgaagcagacatggtgatgctacagtgcagctttgggtaaggaaaagaagagatcgaatgttaggagatgctcgatcggtttggtagagaacaggaagcagaagatgaacaggatagacagagaggtcacggcatttggacaaggagtactgagcaagcacaagatgccgaacgacggctttccaaggtagcaaagacacagaggtgaagaagcagaagagtaaagacagaaaaaaaggcaaggaaggaaaaagaaaagaagaagaaagggaaaaaaaagaggaaaaggaaaaggaaaaggaaaaggacagggcaagaacactaagcagacacgaaactcacttttttgaaatgacagtcaagggatcagagataagaaagctgtaagatagatgaacaaaaaccgatcctttagatgggctggagcaagagaacggaagatgtgagagaaggtgagagaagcgaaagatgttgttgttgatgggcactggcgagagagccgacgggggaaggaaaaaaataaccctaacttttttatcgttcaccttctcttcgtatcgaccgacgagcatctcttcgaggcatcgagtgttggtagagttataggatagatacacacagatgaaggcggtagtaactaaggtaatcaatgcgtcagtcactggttcgtcttgtcaattttcgtggtggagggaaagtgttgtcgtcggttggtcaagagaagagatcttttacctgtatcttactcgttactcgtcatccgggaaggacagtcgataacaaggtcatctctcagatcaacaacggtcttcttgctctcattggaatctccaaaggtatgtctgtagagccaacgtctaaattcaggccagtcaacttatgtgttttcgatggtctccttctagatgacaccccggccgatctcaagttactcgtcgcaaagcttttatctcttcggatctttgagtcacccgacggtcagatgtggaaagcttcagtgaaagatgtcggaggagaaattctatgtggtatctctctttctgcttccttgtcgttctgtgcgcgcgtacacatgctcaagtgatatgttgctcttctgatgaaaccggtacgatctaaatcgcacagtgtcccagttcacgcttcaagctcgcactcaaagaggaacaaaacctgatttccatatggcaatggtatgtgcgccgtttcccttcatattcctcaacctcaacattcgacattcccctgaactacgtcctcttcttggaacagaacccggcggacgcacaaaagatgtatgatgattgtctggcggctttaggcaagaactatgatcccagcaagatcaaaggtagctccttttcatacctcttcatcactcactctttcttgatccttgccttttgctcttcttcttctcgttcatctctgtaagagctgactgacctgaatactggcttacgtgtcttttcatagacggcgcattcggggcaatgatgcaagtggcttctataaacgatggtccgatcaccatcatccttgataccaaagctacccaggtctcttcctctgcttcatccagtcagaccagaacgccaaacgaagcaggaacgccgaacggacagatacaagacagcccaggtttatagggagctacgttcgacttgatacaaaaagggtggtcttagtggagcatggatcaggagaagcctgttcagaatgtaaactgatgctcaattgtaataaaccagtatgcaaaaagtggaagttttcctaagatgactatatgggaacagactagaatagatattgtattgagcattgtatattatcaacaatgagctgatggttatgagtatagagattgaagcatatcaaacatttaaaattcaaagacaggaactaagggtgacatctatagataacagcgtgataaacatattcttgttatgaacaaataaacatatagaaaacgaatcgaacaaagggcgaagatgccaaggaatgaagtgaatgaataaaaccgatagaattcaaaagagattcaaagatattgatggaagataaagttggattgtaaggatggtattggtaggtacttttggaaatgggcaagagcaaaggcaaagcgagatttgtatcactcgcaagattgcatggcatctgtcaccaagacacagatgaaagaatccgattagccattcagttcgagatcgtcaagaagcgacttagaaagatgaactaccttcgacaagtgcccaaagctctgtaaatcgaacaggtttgacaagatagcctatccagcagtgtatgaaagatgaattccatcagttgggttcataaaagaagtagagagaagaacagacagaccattcatcccaacttcgacactgttttttctcgattctgatgaagaagaccctgtgagcgcacatattgtcactggccggatacctgccatcaagttcgctgccatcctttctttttcgatctttcgaatccctgagaattttcaatccgtaaaccacgataagaacgatgatgggattgcgataaaaaaaaagaaagggaaaaagcgaagagaagtggaaaagagaacaaaaaccaacctctagcagagtccaagccgtccatcacaggcatttgtaggtccattgcgacgaatgcgaagaaaccaggtggatgggattcgaacatgttgacaccgtgctgtccatcgtatgcttctttgtatagtatttttttcttatgaaagtatgcccggaaaatactgcggtttattctgaattcaaaaatgtgcaaccaaagaactagatcagaaaatcacatgagtggattaccataaagtgaatttttggggcgcacggattatcttcgacgatgaggacatgtgacttgaaagcagattgatatgaaagctggtcaactttctctttcgagcgccgcacgcgggatgtagggacgggaagtgcttgtgccaattcagccatcgggatattaggagtttcttctgaggaaatcggtacagagagtagtgtttgcagtgtcgatcgtaatttcctttgcaacaggaaagaatgtcagcgaacagttcgcacatctgtagaccaagccggcgtggcagctgatccattgtaaatccagcacacgtacccaggaccaagcgcatcgacaagaactaaatgatgagacattggctgcgaatcattctgtctcaggttttcgaacaatcttacaaccctatagcctgtggcatacgattttgcgcaagcctcgtcgaccaaattgccgagtataatgatatccttcttcagagcgacgggcgaagtgtcgatattgaacttccatctcgacaagtagatagaaagaagttggacgctcgagtttgatagtcccatgatgtggacagtatgaccttggcctaaatattcagatggaggtgggtttgcgataggcagtcgcttgatgcgaggaacgacgtcaagtggtaaagtcactctgaaagtcgagcctttattctcgacagactgtacatcaatctgaccatccatggaacgaatgattctgcgaaaaaaggtagtgcatacatcagtattgatgccgacaaggcagcaagaccgtccaaagaacgacagcactcactcgtttgtgattgacaagcctagaacgagtgaagatgacgcatgaaggtccaaataacctcagtttaaaaaaaaagatttcctgagcaaacgtggacagcacccacctagccctgctcctggatgagaagctatctcttgtgaaaactaagatatagaagtagacgggatcttttattaattgttacatcgtaagccaaagctcaatatgatagactcacaggtgaaaacaaaccatcctttagacagagagaagcaaagaacagtgataagagaatgttgtatgagtctcagaatcctcctatcttagatcatgatttgaaaactactgactttgagaaaagcgcgactcataccggttcctgtatctatcacagaaatcgatatagatcgacggctcgagtcaagaacctctgaccggacaaggactctgattgttcctcttttcgtgtattttagcgcattcgtcatctgtacatcgaagtatgcaagaagcagaggacatcagtctatcgatgagaagagaatcaaagcgcgtcgagaaagagaagaggcccctacaagattatagatcactcttctcaatccagtctcatcaacggcaatctgcatatcctccatattctcctcaaaatctaataggacctccactccacccttctcatctcttctctgagctttctcgatcgatgtgttggcatcatacaagcttcctacagaattggcagccctaaactgttgaagcacggcaaatcgatagcttaaacatacgctagatacagattcctcgacgaaatccgatatgtttaagctattcgagttggaagatagaaaattagtcaaatctagtagaaagaagtgactgagaataagagcaaaagaagaacacacaagaaaaagaaagaaaactgcttacattgtcatttcgggtggtgtagagttccgacgtttctcgccccatatattggccgccgatttctgcgacaaattggaatagcgcgaaattacgtggtcatctttaccacaaagtccaacggactggaagctcgaatgacgatagttatataaactcacggtataatccagcacgtggttgaccgtatctagaagattgctaccgcatatcttgacggtgttcacatatgctagctgctctttgctgagaggggtatcagataagaggtctgcattcgctaagataccatgaaggctggttgttgtaagcagggacaatcagtgaccacgatcagaatttataaggagagagagaacaagtgccgagagcagtgtgacttacggggttctcaactaattgttgagaggtaaagggcaccgaatgattagcactcactcagaaaccaaaaagcataaagagaggaacctacttcatggctcatatttgaaatgaacgcaaactttgcatgatccgccccctgtatgctctttaaaatcgaactcgacatcagcaccccctctatagtcctgacaaactgacattcaatatccagaaattctctaaggtcccctccacaagaccaaacacatatcaacgctagcgctgatcgatttatgctcagcactggtatgatcagtacgttctgaacatccggtgaaaaagaatatcctatccatgttgggatctcatcagcattgaatagtttgcctgatgggtgattgtctaagaatcttcccagtcgctcagagtcgtattttctgagggtagtggcggcgacagaggacagagaaacagagggtttcaaggttgaggagaatgtagacgtgggcccgattggacttttcggaggggacagatcggcagaaagcgtggatttggattcagatatgatcggtagaggtcgcaaagcttcaaggggatcgaggatttggtagttgatcgaagatgtatcgagaactcgtactgcagagaaacgagatatgtcaaggatggaacaacctccgttgaggtcgagtgtattgtgtatacgttccgcagcaagagcgtaaacctgttttaatgtatcatggtttgttaagaggttcagtacggggaagtatagatgttgagcttgagactttcgttaagagtctgtatcgaataaacgagatgaccttttgtagattggtttcctcggctaaatccccaatagcagaaacctctcggttaaagtggtcgatgactatgtttacaaagagatcagaactgttgccaattggctgtccgtagaagaatgaagtaaatggacttgccggctgataaatgggaagctcgcgctagatgcgactgtgtcatcgatctctcgatttcctatggtatcaaaacattacagaagaacgttaggctttcgggatctggcggccaagcaaaggtgagaaaaagaaattgctcacgttcatcacgagctttccaaagtcaactaagagctctttgtccgctgctgtgaattgctcgtgaggcttatcgtcgattaggcataatgttcccaacgcaaagccgtcctggttgcgaagctgagtaccagcatagaagcgcatctgaacgaagtcgtgacatgtttcaaaaggtcgataagtagtgagaattgagagctagaaacagaacttcattctcttaccggggcttctgtggatgtataaggctacaatggtaatacatggacgagttggatcgttctttgatcaaataacgttgccgagagggatttggtatagatgaagttgagataaataaaacactgacgtgaagattagtgaaccgaaagtctttgaatgcgtctaggatgatatgtggtgctccgagaaggatgctatgaccgcacatcgagctctctctgacgtaaactggtgctcgatatcccactaatatgatgccggacgtaaagtgggggtcaggaaatgtcttactcaattcgctctcaagtcttgattctattcaagacatagtcacctgaggccaacacaggtagtttgtctttgtcaaccaacaaagcgaccacagctggaacgtcgaaaaccttttgtgccatccggacgatcttgttcaaagtgggatttctatccattcctcccgggttgtccggatctgaggtcaagatcccatatcggtagagggctttgattcgttcaacctcgtctgggggtagaggaggagggagccagcctagttttcggaagtgtgcttcttcagaagagtagtccgaacttggcgattcggtgtctgaatagactaatgttgatgatatcgactctggagatcctgagattggtagttcgggaacttcacctccagcttcaaaaacatcattgtaaaaaaccacaaggtgaagtcaaatagtgaacaagctgatttcacggtctctttctaaagatccttgttatacaaaaagagttttgcaaagatgaataggccacttacgtgcatgtagccctctggcgtatccatggagccattccctaagaccaagcttattttgatggggtgtttccgggaacgattgaactgagcaggagagcgagctggtgtaagcgtcggacatgatgtagattgtgaattgcacgttatctgtttctgtatgtacaatctcagacctcagctgagtaggcagacgaccgggcaacctactcagtggagcatgtacaagatgaagagagaaaaatctgttctctgtatataaaaattattgcagatgtctggatatatcgattcatccggatgcaaatgatgcgtgggtaagcaattcaggctcaaattgtccaagaccgaaatactcctatcgctaccgcctttgtcatctaagtgttcccatgggcatgtatcaagaaactctacttgttcgtctcttacgtcgcaaactgcactacacccctatattgtccaaaaggtagagatgcggctggaagcattatcagtgcgacgcgcgctttatagcctagctttctgattctagcaatacagcatgttcggcgacaaatgaagtatagttcagattgtgttgaagattcaggttgtgtgtgtgtgacttgaatgataacagagtagacaatgatacttagtgccatcagtcacttctttcgtaatcacgacaagttatcaacatgtctgacgttgtctttagcagtcaagatctctcagtattcgatctaaaagcgcgtgcaagttctcgatgtctttggaggcttggtgccggtgttgcgaatgatcatggcaagaaggaacacatctcgtcattatttgtctcggacaatatgataaactcctctgagatgttgggtttctaagccttcaatgatgtatcctccgatgtagatcatcaattctctaccagtcttcaaagaattcactcgggcgtagatggctaggcaaccgcccggatggatcacgttctgtattgatgatcacgtgttaactcattgccacacttgtatcatcctcccactcttcagctctgtcctatctcacttcattcgacccccaacagccatcatttaggactgatcatcatgttttctggaccaactaggggaggaactagaggaggagctggtatgttcaagtctctccttcgctattgccaaactgatctggatatctgactatctttcttacatcacagccgaattcaaatggagtgatgtcaaagaagacaaggatcgaggtgggccctcctgatgcacattggacgtggattcatctatacgcgcgtcttccaactaaaatatatcatcattcttcatcgggctggttgaatcgatatttacagaacattaccttggtcactcggtcatggctgctgctggttcgtctctcttcctttgtatctagttcgcgcacttcagaccgaccgattacgatcatggcctccttgatctgtcctactgattgtgaataggtcgatggcagaaggtaatatatacattcattctctcagagttccacaacagtctatactaaagttcatatccatgtccctctcagaatcaagacattcactggtactcgcgggatcaggaaaccgcggatgaagccgctcgaaaaaaggcggaagagattagaaaagtcaaagaagctgaagaggatgcattagcactggctttgtcagttggtttcttgccgtatgtcctcagttttccaatcactgactgcttattttgtctggtcaacccacagaggattcgctccggcagttagaaagacagacgaagagaaagaggtggagcgaattttgaaggagcagcagaagcaagagaaagctctgcgtaaagcgtctgtgtctcttccacttattttcatcctcaccgaggaagttctgatcggtctttattcatctaatggcgtacagtgagcgccacgccgaaaaactcatcaaagccgaaatcaaagcaaatatcaaggccgaacgaaaagctctcaaagcgacctcccatgtgtccgaagatggtcgatcgcccagagcggtcgataaggaaaagcaaagagacagaggagaggacgaaggtcgggatcgccatgctcctcgtcgaagagacgatgaccgttcatcaaggcatagggacgaagaaagggtcggaggacgggagtatgcttcgagaacaaatcgtgaaccaaaaaatgagagagatacgtatggagatcgcgagggtgagagagaaagagatgggcgccgtggacacgactcgggaacggagagaacagaacgttacaggacaagaagtcgaagtccgaaaagaagaagtgaagaacacagaagggatagaagtcccgttaatcgagatgagcgtataatcgacaggtaagtccgcttatctcccgaatcactcattgtgagcatcacccaaacgggaagttgtgaaaactctgaaccgatttattccaacattttgctgctgttttcctatgggtttactcaacgtcaggccatacaatccgcgggatagagatgatgagagggaaagagagagacattggtcatatcaccgaggatcaagtagacactagggttgacttcaggcacttttgagccctttcgaacttataccttctcgatgatgataatttctctcactcgttttattacacacacctgctcacagcatgatactcatcaatgagatacactaactctgtccgacactgatagagctacagcttgtgatgttgatcgaatggttctcttctcaggcacgagaagttcctgtctaaccgttgttgttgttgttgttgttgttgttattgtctgtttgtttccctgcgttgggtcactagccttctgcttggctcgtgcctatgtctgttcctgagttctaagtctccgattgaccgccactcttctcttggttcttccttccacagactgatctcctctccattgcgcttcctccttcgattcctaacattctccaatccatacgatatcacatctctctttctctttactgaatccgcaatcatccagatctttctctgcgccttttcatcacactgttctttttttctctttcagctcttcggctttaaatatgcccttcacattcaattcacttcgacttccaaaacaagcccggccgtgcgacgggcctcttgatcatcccaatgcttcaaccacctctttggcagataaaagattatcatcggggtttcccctagcacggactaagagcttcctatcgaggctgggaatttcatccagtgagacccgcggagaccttcagtcaaaaagagaaacagtagtaagttctagagttttgattaaacaggccccgaaaccgtcttaatagcgtgttcgtgatttgcggtatagaatctttccacttcggaaagactcatgcatcgatctagatcagcgacaccttcctttcgacgttcccgatcgtccatcgtttcatctcctcctcctttaaacacactttcgtcaatcataatggagtctgaccttgagactcgagcgatcaacagtatgcaactcgcccggtctttatggagacacgagaggattcagacttggcggatgtcctgtacgtacttcttgggttcgtgtgtccgggacgagtacgaggtggttatcttgactctaatctatgtgataatttgatgctaaacaaataaaaatcgaaacagccgcgagcctttctgccccttattcagataaagacgggctcacacctttcaaaggtctagacccctcccctgccgaagcaccatctttgcctcctactaaagacgaagagcaagagcaggggaagtccgtcacattagcagcattgtatgaagcagcagacgctttactcaaatgtctggcggttgatatagaaataccctctggtaacacgccctccctccggttaaccgaaaacaccaaagtcgaggtccgtctggagatatgtgtgagcgaaccaattgtttgcgcagaggattcttctcggccagcaccacctgccgtctttctcacgacctgcgaacatcctgaatcaaatatctccgctggagtaaacgtccgacccctggctactactcgaaaaggatcccttcaacgtcgaacaggcggaggatcatccaaaaatcgatacttgactcaacttgtcgctcgctcatcgagtcgaattcgaaccaaaagaacgtccattcaagatcgaggaggaagctatgactgtttattaactccgccagaatcaactttgatcgtctacaatccctcaattaccaactcttgcactagcatcaacttcaaagccgatgacttctggataaaaacggtgaacaacgaggatcacacaaaccgaataatgaattccagttcagtatcaatcattcatgacgccttcagggagacacttcctgggtttcatgagcctcttaccacttccgtttcggtcttccctcaacattttaactctctgagaaacacgatgaaatcgtcccaaacgactgcagattttttgactgtagacgcttgctattttgatggccgtgatgtgccggcgagggtcaatttagacgaaggaggaaatttgatgaagatcaaatcctattcttcagatcagataaacgagaagcgcgaacggagatcgaggagacgcaggtccttgggattcaacggcgactcatggccaaatgttagagatggcttgggattgatggatgatgtggtgtaagctttcaccctcaagggggattgagcgtggagttccttgttgattgaggttggctttccttcttgtctaaatgtactcatcacgttctcctccgacttgtacgttccagccatggttcttgtataccagcattcttttcttgcctctgtacacttgatccaaccatttacatgatgaaacacatgtcttttgtcaaaagacaacacacacacagagctcaatagttgattatacatgataatcctacaagctagccctgtgaagggtatttaaattaacaaatgacacaatcttctttcagacttaacgagtacatggcgttatcctggtttgtttatttgtttgtttttttccgccgtaggaacagttagcatgtgttcttgcattgaagaggtgatgaaacaaagacgagatcaacgtactactgtcttctcgatttgtttccaatctgctcgacgttggataaactcgtatacactagttaaatatgtagaaagtcggtcgaacttggaatcagcattctcatacaagatgcacaacccatacagatgaaatctaagtttcactaactcctctggtctaaatgaccctccatatcgtgtcacgtctcgaacaatctgcgctagatctttggcgtcttccacgatgaaaacatgaccaaccatcttgagatttgagaaatcttcagtcaccctacaaagaccgtccgttgagagacaatcagttaaccggtatcacttgtgacatagaaaaagcacaacaaagacagagagagagaaaggaaatgacggaccactgttgtttgagggaggcaacgaaggcatgatatgcgttgaggtcggcgatgatctggaagcctccattgagagagatgatctgccttttgagatgtttttgtaggatgctgcaaaacggaaggagacaatgataaactttgagtggatctgacgagatggttcctctccagagatagacttacttttgcaaacgaattccaacctcctggaagaagacctccaatacatccttcgacgtgctccccttcaatagatcacaatgcatttgaagactcgcgatggcctccttacagcctttcgtcggtcccaaatccatttcggctccttcttcagggtagtattccctaggaccagtccggctgataatgatatgctcggcctggttcatcaagacttcaattccagcgtttagtccagaagcaacagcttcgtcgaggacgttttcgaatcgcttcttttcacgaacaactccgttcaaaaagtcggttcgatcaatatgaggggcctgtcgtttcctaaaataatcagcaaattccaaactaaagtgataaagaaaactagagaagaacgaaccatttctttgtcgaaatatacctggaccatgctttgcacggtatctccgatatgaactaactcaaagaactgcaacaacggcgctacacttttgttatcttcatggtcacccggtttgtatgtcttcatctgttctgtcgcaatcttaaacccaggtgcgatatgcctgtcactcaatgcttgaagaagtagaatgaagacctcctcgatcgtttccttgacacgagagcccattctgccaggatattcctggaaagtctccactcgtttcagggcttctcgatctgtttgaataagctcaagcgcaacatcgagcgaaatgagaagttgaagggactcgaacgtttgagatggaggtaggggcgtagtcgaacgcgatgttggacgagaagatgtagatgactcggtggggaagttgttgacagaaagtgatgagttgtttgtcgagatgctcgacggaacagacagtcctgataacacagcaaagatggtaggtaagtctgttttcaagaacatgagaagcaaaaagaggagagacacccacgattagtcgattttgcgttcttttctgattggtgttcatcctcgtcctcgcctagttcgaaaacaaccccgtgatcaaccttttctgatcctttcagaggtgttaccgcacccgaccccgtccatttatttggatttaacattgaaagcccgctcatggctgctgaggagccagcaacaacgtatgatgccgtctttggaatgatggtcaccggaaggaggagaacgtctcggaaaccggcaaggacgtttcgtttgacttgagcaggattttcagacgtgaggaacgttgtcggtgccggggagtctttggaggtcaggaccattgaagaatcaatttttagctggaggaacatcaggcgagaaatcagcttcgggacgattataaattggacataagggaacaaagacgagcttaccttgccatcccagtctttgcatatcacctccatggactccctgatgtagtccatctcttcgtccagatattcgtccatgttaaactcaaacatcgagaatctatttgaacggaaagcacatgatctttagcatgaaagttcgcggcagcgttcgacaatggaaggagaggaaaaggatactgacatcatgctcaaaacttccttgcggttgatcagcccgccacttgagggatcttctccctctggcgtccctgtcttgagaatgacatctaccatcttttccaccatcgcgaacactcctgccgaagctctgagaaacaggcctctccctgttgacgcgccgacatctcttgcgcgttgaaggagcggttgaatgtactgctctccgacgacctcgccaaggatccggtcgataaaagtgtgaagcaccttggatggaggaggaaacaccctggtggcttgagacccagattggacaattatacttgttaggtgcgcgatgaaaggttccatcggagtgaagtctaatcgtggtacagatgactcgggaggaccaatgatgtttttggatgggttccactttccaccccctccttcatagaagattgccatgcgctccatccagactcttcctagctcccattcctctactctgatggttcttcctcggcctgaatctttgcctcgtccgttaacttcccaccaaacctcccaacctgctttcgcccattgcttcatctcagcctcgtcctctctctcgtctgcgccttcgaatccggcgaggcagaccgcatcaaacctatcggcagcggccagtatgagatatctgatagattcccaccgactcataggctgtatctgagcggaaagaaactgcagtagagtgaggagcactttggactgaacgtctgagcttggtccagaggagctgtcgactaaggaactgaacaaaagagagaggatctgagagggggcaggagaggacggtgaagataagagaggtgacaatgtcgagagctgttttgtgtgatgagtcttgtagatctcccgccaaggagttttgcgttctgaagcctgggacgaagaagggagtgatgaagaggtagaaggttgggatgaaggattaggtttggctggtgagaatgcgaagaatccggtggtccgtcccccggtctggcttgccctgctaggaagcggagcagagatgttgtcaaagtccatcaagtctgtctcctttgatattccgaaaggatcagccggaataggaacgtccacaaagtctccaaactcatcttcggtctcgacggcggcttttgccgagccggctgaaaacgagatggactgttgggttggacgcgacttggagagagatgtcagcaaagggacctccttcgagctcttcctggttggtgtggatgaaactagagagagcgtccaggtgtgtgggtgtatgtgta

SEQ ID NO: 48 - DNA, 14125 bp, Xanthophyllomyces dendrorhous
gtgtgggtgtatgtgtatgtgtatgtgtatatatgagcaaatatgcgagtattgactctgtgatattacctgagcgacacttaccttgggaagaatgagaggcagatttcgtagactctgttgtgtcatctttcaacccaagatccagacatctcgctttccatgcctggtcttcgctgaccagcctgccaaaggcttttgagagtcgagcgagctttgggagctcgtagactggcaagaaggagatgacgagtaaatgaagggtttctggcagaggacctatccatgcgcccagttgaggcggtggcagcttggccgctaagggatgagattgatgggatatcgcatgagggaaaagggacgaagagacgatggatgaggctctgtctcccggctttgatggcttaagaggagcccaacgatccattttgtggcaacagaataggtgatgatgatgatgatgatgaggagtgataaacagatgatgggagtgaactcgaaccgccgacgcttcctttcccactccggacggtcaacgccaatcctgttatcctctctcctgttgtcgcggtagcatgatctgattctatttgcgtgtatgctgacaacaagctgatcaccatcggattacaaactgactcgactgtgggacttatcatcgtgctctcctactcactgggctcctcgctgggttttggccgctctactgacgttccttcttgccttgctgccaaggttccttctctttagtgcactcaaccttcgccactgctgttgttgttgttgttgttgttatttccgttctctctcctacacgtcctggaccctgaaagagagaaaacatcttaagagacttcctgtttgtgttgtccgtgttttctttcagccaacatccatatctcatcatgctctcccaagtcctccccactatcgtcagctcaatcattcgttcttttcaatctttgtccagtccagactctcgtctgctgccctcaaatcctgccctctccctttctgtcgacagtcactcccaattgctcccacaattcgccagcttccatcttgttccgttcttcaacttggtcttgacggtcgtcgtgtttctgtacctgatcgatgagcagtatgtcttcgacttcctcaagccacgctctcttcctcttttcttgaaaggccagacagtctggtcttttgagctgaaacacaagcagggagattgattgcgaatgatgattcgtcactttctttcaggacacatgcagacattagtcgttgtgtggacacgctgacgggaaacaaatacaactgttccgttgacatcgagcgggatccgtcatatgtcacaaacgagaaaggactccctgtgtatatgacaccttcgaacgcctcaagtacggccaggatgtctgacaaggagcaggctgtcttgactgggttggttgcaggatgcctcctcagtatgatgtttcagtgagtcgttctctcagatctcacgtgtgatcgcgcaagctctggtctacaaaaaccagctctaacatcttgatcttatgaaccctcgggaaaacagctccgactcagtactagacgtctttgcatccactatccacatccactctgaacacttccgtatggtctttctccggtcagccgtgctctactttgcatttacagtgatgagcgcttttctctttgtatgtgtctatcatcgtttttatcctctctatactatatggccaaagttctcgagtagttttctaacttctatctccctgttctccttttgaatcaagaccgccttggtgatgacatctctgagctcgatccgctcaacgtacctccctcctctccttttcctcttgtgccccatccttctttcatccaccatcaccaacagattcctcctcgcctgtaccacatttgatctcacctcttcccctcatctggcgctcttgataggagaaccaatcgtgttgatctcggtgcttagctggatggcctttgggcccgggggaacgagtgttcgtttggcttgattttcttctcatcttatatacaagttagggttacctttgcgtaaaacttaataaacacacacatctctgtctcttaattatcaacgaaacttcattgcgatatgtctgaaagggtatcaacgaacgatgaatgtcaatgaggaacagtatagtacggtacagcagattggatatataatattcaagaaaagaaaaagaaaggaaaattaagaaggaaaaagcgcttgttgaattaagggtagatcgtctagaaatcatcctcgtcctcatcctcctcagactgaaccacacgtttctttcgtgctagaagatgaagaattgtaaatgaatatcaccacacatcagtcagtcgatcaagaacaagtgagtctgagcatgcataacacccacaagctttgacaggagcagtctgtttcttcttcctatggacctcttcttcttcctcctcttcttcttcttcatcctcagactcgacaacctgcttctttcgcgctatagcgtgtgagatttagaatgatagtgagaaggcgccttcggatggaactcaagttttaatgggccaaagttcgaaaattcaaataagacttacgtgttcgtccaggaacaggcttcttgctgcccttcgaccgagggacaggctcctcttcctcctcttcctcctcttcttcaatattttcttcagcttccggcccctcgtcctctccttcgtcttgcgtgacatcagacatctcttcgtcttcatcttctgtcgccttctttcggctacggtctgtggtagataagaagagaataagcaaagtatgtcaaccggcaaatctgagtcggcagcttcgctaaactctgggtaaatagacgtactactctttctagatggaagagccaatccagctttgtccttcttggcaagggcggtttttcgtttagctgacgcgatggtcttcttggcgacctcagagtctagctcttgaccttcctctcctgccttcttgtggtttccaaggatctggatgagaataaatcgggcgagataacaggttgctcagcatggaaattaggtggagaatgaaacgtaatagtcttaccgcttcgaattcgttcagctcagcatcaggcttatttgtttgcttgtttgctctagcctataatgatgtagcacggagaagatgaatgagaaacacttatgaacagagaacgttcaggtacaaggattaaatcagtctgactgaccttggaaaggatctctgtgaatcgcttgaagaccttctcttcatagagcttgtcctgatagaatggcaaactacatagagggaaacggtctttagatgaagagaagtacatcaagataaatgcgaaaatagctcacccgtcaataagcttcttgacagaccgctccgacttgtatggcaatagagataagcagaacgcgatgtcacgccactgtcgctcgtcgctggccaaacggaatcgctggcaaagcttctcgatgatactctccgcttgcttgtcctattgtcatcaagcatcagtgtcgtcagattcttatttccaagcccgtcaaagggtgtggagagatcacgatagatgaaccggacagaccttctcaatgaacgtaaagatatatttcatcgtcttttcaaaggtttcttcgtccactgcgtgcttgcctaacgacagatgagagatgacgtcctgcaagttgttgtacagcgcgttctccttgcttgagagttctttgaagaacagcttggcaagatcccgaacccgttgatcgtcgtcttcgatgcattttgccatttcgccaagttgacctttgactttgatcattccgttgaggatcaagtgggtaagcaccatgagtgtgtgtctcttgacagtcagattctcatccgataacccaaggtagagtcggtcactgagggacaaagaaagaaatataacgttccatccatcagaaagagattctgtgataacgaatatataaatagacgtatgaacgcacctgttttcgtcaatcatgttactaaagcagacagcgatatctccaagcgcaatgacgatgttacttctgatgataggatcggacgtggtctcgaacactcggaacaacagagggagttgggtctcgcagaactgagagctgacacacatgagcttcgacagagccaacaccgctggggtttgaagcgatgaatcctaattgaggttacgcgcccagaaacaagatcaaaattggtatatatattgggtaatctgagagaaaaggggcgcaaacgagggtacgtactctgtatcgccctgggttcgcgcagacgtcagaaatcaaagggccatagaccgcaagcaacgagtcctctccgtaaagaatttcgtgctcccggatgaacgtcatgttctctccgatatcatcctctgcgtttccagagacttgatcaagatcgttgtcattcttggggtccttgttggccggggcgccagctgtcttggctagacgatactcaagaacatgacggttagtcagaacttcttgggaaacgcaaacaagacagaactcgtatatgatagatcgaccaaccttcagtagctttttgctccttccgtctcttgagttctcgttcgaccagctcgagatatacgatatgtttgagcgctacgtgccctaccaaaaaaattagttggcctagttcgaatgaattcaccaaatatttgggattatccgaagaggacatgacagtatctcctgaaggcgaggtaggtaaagccgcatctacctctatttcagcctcgagatcgacatcggcgctgttatcctctgatcctgatgtctcggattcagtaagattaagcttgccaatctctcgagtgatatcgggcgcgtcagaatcaagaatgtctgaaggaacgggtgcgtcaaatacacggtaggtgaatgatttgattatctctgcagctaacacgtcgggttgctcgccgagtaggtagagagcgttgatagcttgctcggcaacaccaaacctgtcgttgatttcgaattcacgagtaccagacgtggtagtgttcgtcagaacaaatccggatgcatactaaatcccaaaaaagacatggttcgagactgaccattgtaccgagtcagtaggcgtcttgacgagttcctccaactgctgaaagattgggttctccatagggagtcgattcgacttgtccgttagtgatcctgaaaacgttatcagattcgaacagtcagttgtcaacagcaagaacacgcgcatcttggttgcgagttcagatttttgttgtagagctgatatatgaatatctaactgctcaccttttatcttcttggcgcttccgctgatcctttgcagagcgacacatgtatatcgagccaacgtaaggtccgcctatgatcgacaaggacaggtcaagacggtcagtcttcctgatttcgacataggagaagagaacgggacaaacttttccaagtgggcccagaccgatccgaagcaggacgtcaactctgtctacgataatttctttctttgcgatcgccaacattccaaggatgatgattgctcctctcctctgaggtcgagggatatcctgatctgcgtctgttcgtttcattccattggccatacgtagatgcgaagggaaaaaagcaggaaataattgtaagagataaattcttctaattgtaggtctggctcgaataattaggaacaaaaagaacgtactgtagacctgccagagctttgcgatgacatccgggtggattgcatcctcaagcatcaaatttcgcatcaattcttctaatgaagtgatctctgctaacgttgctccgtaagtcaatctgccgatcccaccgaagcccaaatgcaacaaagatgtcaggatactcttctactcggagcgaaaagactcctcattgaacaacgaagagaacaaactaactggatcatatttttggcgatcctgctgatctgctgcttggccgtcatatcggggtcggcagatgcttcaaaatagagccctttgtagcattcgataacccttgctcggatgcctttaagttctttaccgtcctcgacaaccgcactgttgtcttttgtccagatcaagtgaagcatcgccttcaaaccaacctgtttggttccaaaagccagaccccgagtatccatgttagtggcaactcttcgagcttgagttgagaccaatcaaaatgccttaccgaggcagattcaaactcgtactcgtgagccaacttgaagaagtccattgcttccaaaacctcagcccgacctgtcgatacgagtaaatctttcaatttcggcatagccaattcgatctgtcggataaacttgagagcatcgacgtggtactttttcatcaaccgaagttgggttaattgagccgtctcagccatcgtcatcggcgccgccggcgcgctagaagtcagagaagctttcttggacttgatcggcttctcgtcctccttctcgttctcgtcctcctctggttcctcagcttcctctccattttcctcgtcgattccctccaagccttcaggaagattctccagctctcgttgctctagaaccttcaatcttgcaactacgctctcatatctttcgatccatttttgcatgttgaggtctcctccgtgcaacataccgaacggatgagtcatgatgagtttactcaatagcgcgatagcgtatcgtctgaccgacgcggatttatcttcaaggtggcgaattgcgagctcggcaaggatcggtcgttgctttgtgaacttgacttccatgctatttggtcgttttcagaacaagggatcctacattcagcccatgattgatgcaaagagggagacgacgacgacaaagaagaaaggcatgaaattaggagggagagaaaactcactccatcaatttggtaactgtttgaatgactttcattctcacccaactggtaacgtccaagaatcgatcagtcaagatcgcccaaaagttgtcaacctgtttcttcttattggcttcttcgtattcctccgaaagggcgaggtgtcgaaccagagtcccgatgacttcaaccattgccattctcatcgagtaagactagatgatataacgattaaagctgtctttcagaaaaattctgtaccaaacagcgcgtctcgcttgtccgaagaaaggtaacaaaaaaggcgaccaacctcgctattcagatgagttaaaagcagactgatctgtttcatcacgaccctgggcgtaagttccgcgatcttgagtaggaatctagagaatgacctaggtccttttgtgtcctgggcgttgaatgtctttgtagaaatgtctcggaggacttcctccgtgagctgagtgaagtctagttctttagtcaaaatagacaggagctcagccatgggttccgatagatgctcgaaatactgcaaggcctgaatgatagacgtctgggcgcctatgggccgatgtaaagagaagaaaagaagatgaaattagttcagctctagatgaaccctagacgcatgattagagagagagacaaaagaaatatccaacactaaccaaaggaatggccatggaatttgacggaaaagcagattactttatacattcccatcttaatctcgggaatcttcatgtaggcttcgttttccgcgatgtgatataccggacgggtaaagcaactaccagacaacaagtaagcatagaaaaatcagaccggactcagatactccacggaagtaacgaaatcgaataactcacttgatatatgcatctctttcttgggtggttgtccagatcctctcggtgttcatcctaagggcctttctcatgaagtccaacgtgtttggcaactgagcttcccaggaccatttttctcctttcttcccactgctcgtcactttccctccgcgtttctgtaggccggtcgagtgggtaagcgcaaagacagttgttcacatacgatagtcgcatcggaacgatgttgatagaaagcacgaaccttttttccactggccgtgttgttttcatcttcttttcctgccgccttttccgcgccagacatgaaccactgcaacaagaatgcatacatctcgagcggcgtcttgtgctccaagtgagcggatggatcattcgaggcgagtgatcttgtggcagcctctatctcggattgaagagctggtatgacgaatgtcgaacattcagccgaggtttcttacgaccaatagaacggttttctttttctggtagaggaacactcaccagagagaatgatatccagtaacttagatcgaacgatggacgtcagttgaatttggtacctacagccgtcagatgtttgaaagtatattaggaaattggtaccgcaagctgtctgactgagctagcgttcgacttgatcaacatacttcagaagactttggaagatatcaaatacttctgggtagagaatagcttgaggagaatccgttacagcatcgatagcgcctgaaatgtagattgagggttggctttagtaccgataggcctcgaaagctgattcagagagaaagcaaaacagagagagaaagtgtgaagcgatacgaacgttccaacacggccatcacctccttttcgctcaaatttggcacatctacctcactctcgatagaaatcacatcgtccggatcctgtaagatcaggacggattcctgtaggttgaaggcggctgccatagagagagatgatgtctctgtagattcgagtgatgttcagaagtccaaaacagcagctttgttgagactcgagagaggcgacgataaatcaaacgcgtcgacgcgtaacacacgcgtaaccagacgcgtcaagaggcaacccgtccgttaggagtgaggattgacttgcaccgtctgtccagccgacgatgagtctggctgagtgtgggagatacggagatcaggagaaacaaaggagtacaagactctctatctctgctggttcttcgattcaattgggtagatgatgttagcttctcggtcatgttggcgcactccgtacatactctacaaacggacttgagacacagaatgggagaggatcgactagcagtctcatatgattgaacctttttctccatcaagcgaccctcttgtattcaccttctgtgttgtttctgatctcagcacaaattaccggacagagattgttcatgacgatgggtctgttttcttggcggttatggtgggttgtaaaaatctgagttagggttaatctcccaaatcggctgccactcgtcgtcattccgtcctcgatcttacattgactcacttgcctaacctttatttctctacttgacttctatcacttgcttatacgttcatattcacctgatatcatctgtctagaatggctgttggttcttttcccgatcaagcatacgatccttctaaggcgactcccactggtaaccagttctatccacctcaaaatgacccaaacgtcaccgtcctcccgcccaagagagcagaattgacaaccgccaatctctgggaagctatcaaggtaaggctctgtcagctgtttacctctgtttctctcgatgaaatatgtctgatatggagtagtgttattcgtgatatacgtacctggtcgattgtttctaaccaactcgtctgtttcgttctctttttaccgatcttcacgtcccttgatcgtacctttttcttaccgctttactctagatgaccaagctagaagatctctctccttccaagctcggtcagattccgtgtatgcgaacgtcgatgcttcagggtatcggaggtggtgtgggattcgcaatcattcgattactgaccggaaagccaggttcgttcatacctcgtttttccaaggtggaggggcgaagagataactttttccctggctgtgacgacaaaatcgatctttgtcctcgacaactgtatcaaaagccttattcatccacctgcttatatgcatttgggatcaagatgaagagcaatcatcttaatcttctctctgagccgtcatcattttttcaagcccctctcatcgatacctctgatttttctttagcttatctatgaaacatgctgacattagctctgctgtggtgctcaatatcgacgtggtccatgtgattcataggtatctcaacggtgttttctgcgttcggttggttcagtgtcgcttttaccggtatcggaggagcagctaagtttgtccctatttctctctctgacctcgactgttcttgatctttctgaacacgtatccttttctaattctttctatccacccagcttgtactgcaataagaaacgaacggaagagatcgagatgatgcgactcattcacgaacgattccctgaacggagtctcgcgaacgctcgtaaacgacgagaacaagccgagcgcgaaaacgtccaggtggcagatcttccaccgccacccaaggtagaggtcagccagccgagttacatcagcgtgagcgactcggatggaaacttcctaggaaagatgacaccggcgatggcggagctcgcaaagtcgagaggtgcgaatgaaacgttcaccgaggtcaaagctggaagcgcaggttcgtcagcggtggctccagtggcgactggtttgccatcaaatgaagatggtcagccagagaagaaatcatggaagactctgtggatgtgatagagatgagatgattctggaccataaaggattttgagcaggcagattgaacgaagtagtatctataggaagacgtctcatatttagaagcttaggtaagcgcgattgagagataatgaattttcgactggcaactttccaaacacattcacgtagacatccatagacatcccttcctcgaccatcatcatctagatatgccatcccctgccccttcctctgccacatcctcaaagggaaagtctaagatgacagtagcagtcaaggccgtaactgtaaagccgaaaccaaaagtgtcttccaactgggctgctctaaaatcaactatagctccttcgacctcggctagctcctcatcatcaggtattgcaggcaagaagcgaaaacgggcgggagggggagagatatctggggtcggaaaatatgtgggtgagctaggtggccgagtcgagagaaaagaagaaagcttcaaaaggtatggatatgctttccgcctctccttcctctcgcttgattcgttccggctcgaatgtacgaagcgcgtcaaaggtggttttcgatctaacggacgtatgagctttgattctgtatgtgcatacttgagaatctatcagaggtcgagaaaacaattctccgccaccgtcaacaagtactgcgatctcggagtcgtcgacacctgagacgacttattcgcctcttatccaggaacttaggtcaatggtgctcgggacttcgcccgctatcgaaacaaagacagagtgcgcattcctcgtgtttatcttccgtcagtatctttgatcaaacctctaactctcgtttttatcatcctctcctcttctagaccaggcaaatatctctgcatcgattgcgagatggtgggtgtcggtgccctgggcgaacaaagttctctgggtagagtgtcaatcgtgaactatcacggagcggtcgtttacgatacctttgtcaggccaaaggaacgtgtagttgactacagaacgtgggtctctggtgttagtgcagcggacttgattaatggtacggttgtgtctctcattatcatgttgaaacctctcttatcggtagagcgcatgttcagcaaatgtgtgcatatacgatctctactgcaactcatcacttccttcgaatttaatatacagcaccgacattcgaagaagtcattgtcaaagtagcccaggtgatcaaggggaaagttcttattgggcatgctattcagaacgatttctctgttcgtcccttcttctctctctctctctctttctctgtgcagctttcttaggacgcagcgcgatctaacagtgtatttcttcactcccctttggtggtattttacacccacacgcacacatcaacaaaggcaatgttactctctcacccagccccgtttacaagagatactcagaaatgtccagaactccgaaagatcgcgggctcgagactacccggattgaagaagttgacaaagctggttttgggtttggagattcaggaggcttctcatagttccgtaagtcatcagattcactccatcatccttccatccttccatgcttctttttcgctttctttcttatcgttaacttctggatatcaatctgtgtgtgtgtgtgtgtgtgtttcttgttctgttctgtccaccaggtgaccgatgctcgggccaccatggctctctaccgaacgatcaaagacacttgggaacccaccttctccgtcgccatggtccgacatgagcaaaagactaaaccgaaatctaagactgctccggccgaatctttccccggtggaggtagacggggtgttagttcggggttgggatcgatcgttagtagtaagacgaagggagtgactaagaaagggaaaggccctggggtgggcagagtcgaggacgacgacagggatgatgatggcgataactggtgggatgaatgaaacctttttttctttctttccacactcggacaatctctttctcgcacgaagccaggattatatcggacaaatacctttgagaacgcaaacttgcagctattgaccgagtctgatgtgacaagctgtgttagcgagaagacatccaccactcctgttcatccttgtggtcgtgatgggacgtgggtcatgcatagatacaaacgcgcgcgctctctctctctctctttctcttctcatttactcacccagccgagtcttgtgccccatgtgcgccacatccgattcacgactatctgcttgatctccgtagacacaaatgggtcttccaaatcgagcagatcctgcataaattcctgcacatttccattttcagatgaaccaacccgaacgttagtttttcccaacatcagcttcgttcaatcctgtaaacattgtttgacaaaggaaaacaaaaagaaaaaagagtggaagggaagggagaggaagacattaaaaagaagaagaaacgaacctgcttttgtgcagtctcgctgcgcttgaactctcgcttagccatttccctcagactgccaatcgagatgagaatcaaaccttgggtgtcgtaaccaccgatggtaccagcatgtccgcttccagtctcaggcacgtctggctctaggtgtatcaacagtcgttcgatccgtctgatgattgccagcgcatcgcccataaatatttcggtcagacgggcgtgggaccaccttctttcgacggtctttggaacgaacgaagaaaggatgaggaactcaccgaataccttcccaactggcccttcgcctttcgcgtctgtttgctccaaagcttagcccgccggcactggtcaggaatgatttgagccagcctccaagaagatagacaatcaggaacgatggggcgactcccacaaaggcgaaagtaagttcctgtgatcggagcaatcggtctattccagatagagccaaatcaacatcgacctgagcgaaaacagatgggcagagagaaacatgagtacaaagattcgaacagaaggcaagtcaagttaggaggggatatgagaagcagaaggaggcacctttgtcttctggacttgaatgagaagcgatcggacgagggagccagcaattgcgttcttgagcggagactatcacaacagagacgccagaataagcacagcatatcttgcggcacatatccaatccatctgaggatgagaaaactaaccttcatgtcctcttcatagagtttcaacacgtccgaaagatcaccttctctgactcgtcgagataggctgactaactcaacctcagtgtacgccttcttctctctggccaagtcaatgaccatcctctccaatgacttgagacccccggagttttgtcaaagagtaacatctgtcaacttgaagtcttccagaac

SEQ ID NO: 49 - DNA, 1649 bp, Xanthophyllomyces dendrorhous
aaaagaaaaaaaaaaggagagacccacgtccatgtcgctcttcatgccttctttgctcatcagtcctccactaggatggccagtttcatctccgcttccgtgtctgacggtctcaatgatgcccattgctggttcgacaacccatcccttccagaagccgatcgatgtctccttcagatccctcaacagcgccttgacgactggaattcggggcgcgatgagtggaatgagtagtggaagaagcaacagcggtggccatagtctggtgagggcggtcggtcgagtcaacgatgaaggaacggtagtgtatcgacgaacaggcttgtcgaagagagcggtaagggttggaaggacactggatactataggaggtccggatcgtaaggtccctatcgagtatgcgctctgtagcctttccttatctcgctggtagtcttccaatcgctcctcaaagtctgggtcaccaggatggctttgaggcggctctccgggcgaaccaggaatcacatcaaccatgacgtcgagtattcgtttcactatcctgatcatatccctcatgtcccacggtttcctgtcaataagatcctgttcgtcccaacttggcccctcgattatcagttggcctagcctgcaagccaaccaatctcttccagcttcgagctctgtgatccgacgacggacttcaagccgggttaaccgtatcagcgtacggaacccgaacagactcggtgtcgaccggggaacggccgtcgtggggaacaaggaggacagaagataggtcggagtgaatgaggcgaggcgacgaggaggctgagcgtacagagagtgcgtcagagatgccaatcgatgtgggaaggctagttcaaaagaaagaatgacgatatcaaaatgagaccgactacatgagatcatacgactgatcgatccgagtaagagagaaggaagaaagaacactcggtcgatacgaactcatcagcagataccctccgatcccaccccatgcgtactttccatttctatccagtttcttccaccaagcgatctcttcctcccattgttccgcccaagcggcatgctgttcgatctcgaggccatacagactgaatacaatcctggccaacacagtccattcgaggatttcttcctccttttcttctgctgttcgccctcttctacccaacgtgttgacaggcgatctggattcgttcgaaagaagaacctgaagaacggaatagatgtctgaccgttcaggctcagagggaaggttaaggagacaatgttgtagagtgctcgcccgatcgctcggtctggacggggacgatagacgggctgtagacgtgtctacggcagaatgggggtattctagcaggtccaaccgttgtgctagaccagatattctttgggccatgaaagtacccatggtgtggtgagaggtctgcgaccagatgagactgttctgtgttgatggtagagaaagacgatcaagatggatagaggtcttgggcgacgtgatggttgatgatggagaggcttgatgaaaatccagtgtcactcattcctatcttctttcctcctccgaactatctcgtcttctttttttcttgtgagctcttgatctttcttttttctcacacacacacacacacaca

SEQ ID NO: 50 - DNA, 5976 bp, Xanthophyllomyces dendrorhous
acacacacacacacacacacgccatcagtttcaatctgatatcttggtcttgcctgtgtgtgcatctccactcgactgatcagcacagtggctaaaacttctgctggagatatagctttgggttattggataaaactgtacattgaccattcatcgatggttgatttagatagagaaacggaacagaaaaggctagagagaagaattgtgaacgaatggagaaactgcctttcctcctgcatccagtcaggtagatttttttttgggggggaaggggggtcaaacagtgacgacaacaaagagtcgaaagtttttgagaagaacgaggaaaggcgagatctagagagagtggtggaaagaatagagatatagaatctactccatcgacgagtcctggtccttggagacggcatcctttgcttctcgaatgtataacacattgttgcatctgatttgttgaggtgatggttgaagagagagccaagggtcagcctttagcaatcaacgcgtcccagaagaagcacactgatgaatagaagacgaatgagaagacgaaccgaacgaagacctctcccaacgctccggtggagactcccttctcaatctcctcggcattggcgagctgcagtatgcgtacgatgagagtcgcaagagagacacgccaaaagtcccaaggtcagtccatcattgcttgtgttcgatctgacctctccgatatcacggctcttctatctttcatggccaacgttgggcactcaaaaaagcagagaagcctctgtatggtacgaatcaagtacatacctggacgttcatatagctatcggttgagacgagataacccttgtactccacgccccacttgagcttgacatacacgacctttccggtcatctcctggaggaacggcttggggttaacgggagcctgtttgaagagaccaaccttgtcagccagccagccaaccgacagcacacacctacacacagaccaacagctccctgggagtcatacgcacgacagacatagcggatatagaaagatggcaagtaggacaagatggctgatggacgtcaaggctaaggggaaaaaaggaaagacggggggggaagaaagcctggctgaggtgaaccttaggtaagatgggttattcaaatatattcatatataccttatctaagactcttccgcctcgtcttgttttctcctcttattctatccgacacacaaccaacaccatacatccaacactcacccactcacccccgccaccttttattccccttgccaatgtcagacgacgaagggcatacctcaggcagtagatctggtggaggaggaggagggccacccggtggacttattgacgatgatctcacccttcccaaggcgacggtgcagaagctgatcaacggtgcgtctggaatgctctctttcctgctcttgttctttctgatgtccttggcttactttcgacgcgtttgtttcttgttcttccttctgttgttgggacctttgcgaatgataccttgttctgatccggcccaaccgtcagaaatcatgccggaccacatgtcttgcccaaaggactctcgggatttcgtgaccgcctgttgcgtcggtgcgttcaaatatcgttgcttctctatctgtcttgtcgtttccttgctgatgtttagcacgtctaccaaccctaaacccatcagagttcattcatttgatctcctccgaggcaaatgacgcgtgcgagaaagaccaaaagaagacaatctctccagaacacgtcgtctccgcactcaagtcgcttggctttgatgactatattgaggaggtagaaggcgtccttgatgaacacaaagagcaccagaaagtatgtctgttcctcctcacacttcttaactccttttttttattttaaaaaataggtctttcgccatctgactgtggacctatctgtttcacccaacggaaccaaaggtccgacagacaaaacagtcagcctcgtcaaaaaagaacattggtgtttcccaggaagaacttctcgcccaacaggagcttctctttgccgccagtcgagctcgttatgaagcaggtggtagcacttaggagggcggttcatcttgatcttgcctctgtctccatcgtttctctccatccatcacgcgtaaaagcagaaagagaagaagggcgtgatggcaacagggcaggcttgttcaggccaatcctctgacgtcaacctttctcctcgatcctatcctcatcctttccggtgctcttggccatgatccattctcctccactctgtctagtttacattgctcctctcatcttgttcccatctttcacgcttcgtggtcgtcttcgtcaactcccccctaccgttccctctacagaccctctaaaaacggcccccttcctatccatcaaagcaggattgttgtacaaatatccacttacctcactatcaccaccacctccttccttacatgcagttttcgaaatcacatatacgtacatccgcacttttttctttctctctatttgcaatctctggttattcatacctgtgctccgagtcgtgtgattccctccccgtactctcacatctcgtcacaaagccaacttgacattctcgcatgcacttcgaagacattgccaagtcaatcgttacattgacctccacaaagaaaactaaaaaggacacattcatcctagatccctctacttccgatcactactccacgctttctcgagtccaaagtaacctgcagagcctattctcggtctaccgcctggcgatctcacttctccatctaacggtcttgaggccgaatgaggcgagctataaccagtgggcagtccttcgcctgaaggagacgttgaagcagagtaaagtcccggtgtgggcccatgcccggaaccgaagagagcggatgtattcgatggtggtgtagagggcgtagaggggggtgcacccgaagagacctctttcaacagatattcgacaaacagttgggagaacgactgtgggtgaacgggccagttcaaacaagcgccgggcatcagttcacttttcttcatctgtcatgaacggacatcagtgcaagtcgacaaacctcgtttgctggttcagccttctccaaactcttcccactctgtctcagctgagcacctccgtttcctctcttggctcctgcccctccgaccgttgaccgttgtagccctgcggtttccctctcggcctcgtcccatgagagaatagaggacagaagtgaaagcatctcgaactttttcgggtccgcacggggagatgataggaaggcgagcagaatattggttacaaggcggctagaagagttagagtagaagaatccgaaaagggtgggtaattagagatcttgacaagatggaaaggatagcgtaaaaaaagacaaaccgatccacgttggtgtccgaagtgttctttcgtaaccgacgaagtgcctctgtcaggtgttcgttcatgattacatctagaaaagaggtcatagaaaaattgaatgttgagcaggcgatctcaacgcgcaaggggagggcaaaagtaaaaagaagaagaaaaaactgactctcgtgtctaagcttgcctatgagcaagtttttctcttttacctccttctcaaacgtctgcgctctcattgcgttcgtgtttagctcatctacctgggtctatcgttcagacgttttttttttaaagacagtagtcaaataagaagaatgatctagggttagacttgtatccgaagaattttcgctcgaaagggcatgaggatagaaacaacttgcctcggctgtggatgcacggagcttccagtcggagagagatgtgatagtatttctcagatgcatttctaactctgaaactgccgagttcaactctgcctctttagctatggtattgcgtgaaccaagggaaaaaaggaagaaaaaaaaacacatcaggatgagtacttctagctttatatgcgtagacaaccttaatgaagataaggagaaacaggcgaaccagcttgaaattcttcgagcacactctgcaggttatccgctcgttctctctccctctttgctttgatctcctccttcttcttctcttcctccgctcttctccagcgggcctcttcctccatccccttccgctcttcgtcctcggcacgctccttttccctaccggcggctacctcccactcttccttctccaagcgaagggcctccatctctgcttgaagttctctaagatccctggttcgaaggagagcctcattcgaggcagagctcgaatgttgtcggacctgagagagttcagccgaaagcgcggaagtctcttggttgagagatcgaagttctatttggagtgtttgcacggtcgattgaagcgtttggatggtcgattgggaggtctcttgatcggactgcaaggtcgagagttccgaggagagtgtggtgatttgggcttctcggcgatcgagctcctcctatagtaattaacagaaagaaaaaaaagggaagaggggagggaaggagagggaagcatcaaacgaccggtccaggaagattacaacaccatcagttctcttcaacgcctttctatgctctttgatcgtagaaacgacgcgtctatcagtttgaatgcacgagacaagaataacttactgcatcctctctcaactttttacccaaggtatctctcatgttaccaaccttggccaccaaggatttgtactgtttttccagctgttccttctctgctcttgtcttgtccaactttttcttcaataattcgacttcttcaactccattggtagtactgttagtaccaccaccaccaccggtgatgacgctggttccggctggttctcctatcggagacaatccagttgatgtaggattcaacggtcggacgatatcgatcgacgacttgggtgtcccggtctcgatggaggttagagagtcaagcgtggccgtcgcttccctcaccgctgtctgttcgctcggtttgatcaccggcggttcagatggttctgttggagcagacgtcgggaccgggggttcatctttttcagttgaactcaagggtggtacaggagcaactgctgctgctgctgctgttgttgttgttgttgttgttgttgttgatgaagatgataatgaatccgaagctggtattgatgatggcgacgttgccgtcgctttcgttgtttctgtttctgttgatgaaggtaatacagtcgttgtctgaaccaaaggagatgatgaatccgaaagaacgactggtttcacatctgacgaaggaccttcgttcaacggaaccgattcgggcccgagagcagcgacaggctctgtgggttcttttactggaacagagggagagacagcagtcgaaggtgaaggtgaaggcgaaggatctcttgatgcttgtttagacgaagctgccgagctcgtcgtcaatgtcggtgtttgagcctgagcctgagcctgagcctgagcctgggaggaggatttcttgtgtgatttcttgcccatgcttcaagagattcttcaaaggatcagacagacgagtaaaaaaaagaaagagaagaggaaagaagaagctgaagaaacgaagagagagagagagtgattgttgatgatgatcgaggccagggtagtagtgagatggctaaaaccgagggtgatcgtcaaccgggcctgctccctccgcagcggacgcgactttcgagcttcgtcttgacggccgacatcttctttgatggtcttgtacaacttgagaaacgtcccatgtatcgccggttaggaatgtatgtttcgagagtatgggaggaagataagatcgaacaataaaagtaggacaagcagcttccaaagaatattgaacaagaacaaagagcgcatgacggggtgaagagatcgatttgatcggggagggggtataaatatgtatacgta

SEQ ID NO: 51 - DNA, 2068 bp, Xanthophyllomyces dendrorhous
tatgtatacgtattgaggatctttgtattcggtcagcctgacgagagaagaatgaaataagaagaagataaaggacacagagatatagcacgacaagaaaacatatatgtgtaactaagccagaggtcatgaatgatacgtgagcggtgtcatgacctcatggaagatcatctctatcatcagcacatcggaccggaacgagagacgacatggtgaatacttggaattagcatattggcagaagaagaagctctaagatacaagaggatacgaacgtttgagagtttctctgcttagagtttcttgtgaattgtcaaagtcaaagaagctactaggaagaggtgcagccgacggttcgtcctgaggatcatgatatggctggattcaggcgtagacgtaaggaggaagggatgaacatcagacctctaaacagtacatagaacatgagacaaaggacgtgaggacgtacctctagataaggatgcgtcaacgcttcttccactgtaatcctctttttcggactgaacgtcagacaacgcctcagtagatcgaccgccatcgggttagtcggcttgccgttgcctccgacgatctcgtgaaaatctcgtcgccttcggaatggtaacgcccgcagataatcttttgatcgagtcgaggtgatctcatagaaatcatccatctgtagagataagcgctgagtcagaggacaaagatggcaaaagaagaagaaaaaaaggatagaggaacacgagagaaaaggcgaactgttggagttccgagaatatctaatatcaacgaaagctggtggtggtaatcctgaattggtagtagaaagaaatgcgcgctcagtcggcgaccaatcaggttcttggagaaacactaagacagacggaacatactctcccaggaaataaaggtcttccggtaagcatctctgccaatatgcatccgacggaccaaatgtcgattgctcgggtatactctttgaaagctgttcgtttgtttgtttatttgtttatttgttttcagagagcggttgaccagattagccgtcgagtgagaagtaaaatatatatatatatataaataaagtagcaggagagaacgtactgagcatgacctcgggcgctcgataccacctagaaagaacggatgttgagatcagaagactggtcagaatttgacaactttgtggcacactcaaagaggaaagatcatcgaacgcaaacagaaaaggggagagggaatgaacatacctagtggctacatactcggtcatgaaaccggctcctccgttcggtcccgcatccggaggaggaagcgcggctgacctggccaaaccaaaatcgcaaatctgaaagaatggaaggagagcgcgaaaatatgttggttatttgttttgctggatcaaaagccagagaaatagagctcgtacctttagatcacagttggcgttcagaagcaaattagaaggcttgaggtctcgatgcaggacgtttgccgtgtgaagcgctttcagccctcgaagtgtctgcaaccagaatgttttcaacaagaaaaagaggacagatgtacacatcagtgttccgtgagggagttggccaagccaggccagtgagggaaacaacacgaaatggatgcagagaaaacgcttgaagagaacgaacttgatagataaagtattggcagtgatcatcgctgagctcctgggtccggatgaccctatgcatatctgtttccattaactcctgatctcatccgcgcgcgttttcagagatgatgttgaaaggaagaaaaaagttgcttaacgagatgagacgacagagtttcgcttgatcactggcaaaggaaagatagatggatgaacaacttgaacgaacctggatcaggtagacttcggtgaacagctcaaacgtcagcggacggacgatatcgaggatggcgatgatgttttcgtgtctggttccggttagcgtcggagaacaaaacaagcatacgcctgtcagcgtttggaccgagaacaaggacaaaggcgtagagaaagaagaagagaagggcaggggaggga

SEQ ID NO: 52 - DNA, 8534 bp, Xanthophyllomyces dendrorhous
ggggagggaagggaagggaagggaaaggaagggaaaggaaaggaagggaaaggaaaggaaaagagctcgagtaatacgatattgaaggagacaactaacctgaaatgccggagaagcttgatttctctcaacgtcctcaaacagaacatggaatgatcgaacggagtgatccgcttgatggcaacctttgtacctgaggggagatgtgtggccgacacgctttgattggaattcacaacgacaagagaagatttgtgagctttggggatgattgagaccgtgtttaggatgagagctcttcttcttttcttctgcacacggaacgccatctagagtcccttcaaactctgcattctgggttggtcgagctgcgaagagaagaagaagaagaagagaaacagaggaagagtgtgtgtgagagagagagagagagagtgagacgcacaccatgccgtaggcaccttctccgaccggttcgatcacctggtacgatggtccgacgtgaaaggcctccatgaggttggtgtatgtcttgcagaagggttgcctaaggagagttcttctgagatgggctgatctggggcgagactagactagactagaccgaggaaaggacgaggactatgaacgagaagagaccccaaggtgatgtagctgatgcgaggccttgatggatagcctcccacaaccgggactgggacagaaaggagtgaaggatttttgttcttttttctttctctctctctctctctatccactgaaagaacagagacactgatcagagatgatctatgcaacagaggcaatacgtatggaacggtgagcgttgtctagatagcagtcgacggatgaagcaagacagttgaagaaaggatgagtgtgcgtgtgtgttgtgtctggatgaacgatcacgaatgtctcacagtccggaaagagaagaaagagaaaaatgaagacaacatagaaaggagatgttcttgggatctcttgtagtcctttctttgttctcatgactctgcttggaaacagttctcactttgttcccttgtgcgccatccggtctacgctccgttcccatccggtctatcagctcggttcccatcagagacaaaagagcaagcaggacaaaaggattctgttaaggatcatgaatgtgagacatggccggagatttccgttagggttaatctagattgctgcctagacatatgcctttgttcttcggtggcatcggtgtgttgagaagagagcgcgctctcgcccgggacaaagaagaagaagagagttgttcggtgatatgtgttttgttgtggggaacgtctctgaagaaatgtttgtgttttgaagaagtaggagagcacaaccacagacatgggcggacaaggtggtttcgagagcagcacagacatatataggatgattgcattttctgccaacaagaactagtcctgattccacacatactatccactgggttgctcgctgaacgttgctcggtcaagagagggtgtttctctatctgaggagccaacagatgttgaacgattgaggatctttaagaaccggtcttaccgtttggaacacaaccagcggtggcggcggcggcggcggccgatcgtcccggccgtgatcttctcccttcttcctttttgcttgatctactttatctgctctctcaatcatcctcgttcgtttcaaattaaacactcatactctcataaagatgaacacacctcaatcagttgtatgttcagatagcttctgtggtgcttgtgctttgaagatgagaagctgatgtcctttttgttactcgttgattttcttgttctctcactcaggccttgggatggggagtccttcttgtcggtaggatgcacctctttgtttgattcgaacactcttatggctttcagatcttccgtcctgacatcattcctggtcaactcttatctcgttccaatttttaattttttttctttgggtttctcttttgtgtgaacgacatcaacagccgcctcggcatcgtactactacgcgaaatcagatattgatgcccgacgactcgaccaacaacgaaaagggttgagacagacccaggtcttgacttgttcgtccctcttgattcaatcctctctgtgtccttgttttttcctttttctttttctttctgttctgacatgaatcgattggatcggaactttctgaaggggaagaacgtctgaagctagacgagcaagcagccgcggcaggtttgcctccacctcctaaaccggtgacgggcggaccgactcctgcgaacccagtatcggattcagcaaaagttatccccccaccagtagggaaataaaagacgatatgaatctgtgctctcgtataattcacgtatccaaatatcccaatgatagttgactttgtcgtcaagagcttcccttgacggtcagtttggaatttggatgtggatggggtggggatatgttgaggtttgggtaaggtgtctggtccaacgcgcatgtacaaacgctctttttccttgttcgacaaaacaggagctcgttcgctctggctgcaatatacacagcacacatcgcacctcttgaagagaaaatatataggagaaacgcgtacgtttgagaaagaaaataaggggagattgagtagtggtatagaggcaaaagaaagaaaagggagagagggaagataactttcgaggctgctcggaaaataaacaaacacactccccttccacctcctcattcaacattggctccgtccgttctgtctagacaggaagggaagggagagaagaaagaaaggtgcagtcgatcccgcgatcttaaagatcgacaaaggtcttgacgttctcgagccaagagacgtactcctatgttgacccgctcagccgataaagagctcgagtcagacccatgttcgttaagaaaagcgagagaaatgaaaaggaccaaccttctgctccttgtggcgctggtactcgcccaactcggatgcaaactcctcgtcgattcctcgggaggtcaagaaggaagcgaattgctgtaaacggtttggtttttgatattaagaaaagaaaaaagaaaaaagaaaagaaaaaagaaatgacaaaacgttcagatccatatgtacttttctttttctttacccaaatcacattgcaaacaggaaggaaaccataaaagacttacgtcctgaacttcagggtcaaggttctcaaagcctaacggacagaacagagaaaggcaaagacagatttttagcgtaaacactttcaaggcgcccaacaacagggagaagagagagaactaactgggtccgtcgtagacacctcgcttcttgaactcggcctcggcagtctcctcggtctgaagtttggagtccttgtaaagcgagacccgctcgatggtgaagtcaccgtcctgaatagtggtctggaacacaagggcctgggcgttctccttgggcttgaacgtgggagaaaggatgggatccagatagtgaaaaggttttagatgcaaaagactagaaaggatatgatccaaagcaaagaaagggtgcaaagagaatgaaagatacataccttggtgatcgaaactgtcacaatagttccaggcatgtcatcaaactcgtcggcctcgacgtcctcctcctcttccacgggcttctcctcgggaaggtcagaagcggcgatagtgaccttgatgctgttacgaccgaatgagtcaaagagggatagattcgaggtgagaacaggatgagaatcgaacattatagcaaaaacatactgacacctcgttctcgatcgtctttgtgaaagtgacctcctcatttccaggcttgtcggtaatctaggtgtcatatgttcaagattagctacacgacgtcgtccggcacgccgtagcgcgcaaacaagagtagggacaaggaaagaaagatgagacgtacttcccaacctcgagtcttcaagttctcggtcgtagtggccagatcatcctgggcaatgttctcgttctcgaacgtgatttcctggctaagagcggaaaccaaggcgatgtcgtctaacgaagggaacagggtctcgacaaagagtcaaagacacaaagagacgtttgtgatgagccaagataacgggaaacgatgaaaggaaacgacctaccctgtcggctagctctctggaaagcagagagagagaacgatcgggtggccacagggatgacggcccggagggaggacacggcggaggacctggcgatgagggagggagcggcagctcgggagacaagagttctgagagttcgggaagccattctggtagcagtgatgatgaagatgaagtgtgtagttgtgagaagaaaggatgtaaggaaacacggaacgaggacaacagttgatggcaaaagggttcaaacaatgtggagagcgtcttgaccaaaaagaaggagaaagaaagagatagaagccgatgggcgggaattattttgaggcacgtgtgagcacagctgtgcaagacatatgcttagtcataccgtcaggtacaccgacgcttgtcagtcttgtccctgagttcttgtgcctgacacgcagtcacacaaacggttacacccacggctacacccacggttacagatcccaccctttttccccgtctttcttcccttctcttttcgaccaaccagatcgagcgtatcccgttaggtcgtttttttccatccttccttctattcatcatcatctacattctttcctccctatccatccacacagagagcatctatttcgctcttgactacatccgtctacacgtactcttctatacactcacccagacataaaatgcgtgttacactcaatcctacagcgttcgctaggctcgtcccttccgccgtcgccaccggtcgttcagctcatcctgcctttcgttcggttggcacaccttctcctgtggcttcttcttccagattgttcctctcgtccaaccgatcaatttccttttcctcatccttctctgctcccggtttcgcatacaacaactatccttcgccgtcgtctcctcttgcctcgtttcctcctgatttccacaccaacccagagttactcgctctaggagttcctccatccacccaacagccaggatcaaacaagggcaaaggcaagcaggtcgatacccagcacactgctgaaggtggtgaagtcatcaagaagccaaagagagtgttgcgagcaaagaaggctgccatcaccatggtgcgttcatacttttctccgtttaacctagtcatcagactcggtgctcttggctgatcatccgtcttcctattggctacaccggtatcaatctcgatcttgaccttttcgtctctctccgctccatcactcccggcccgtcatccgcttgtcgttccccttcacttgaaccaatcgtctgtttgcttgtctgcgtcgttctctactctactcttttttcgtttctgcttctgtaacgacccctccatagaccccagcggctgtggcccaccttcgcacgctttcccctttcgcatcctccgcaccggcctccgctgaacagacattactccggataggcattagaactaagggctgtgccgggatggcataccatctcgagtatgtcaacgctccaggaaagtttgatgaagtggtcgagcaggatggagtcaaagtgttgatcgacagcaaggcattaatgtccattctcggaagcgagatggattgggtcgaagacagactaaggcaagttcctcttctacattctcacctttcttcctgtcgacccggtttgcttatctctgacatatcttgtatacacttttacagtgccaagtttgtgtttcacaacccaaatatcgtcgacgcttgtggttgtggagagtccttcaacgtggctgcctcgtcgtagattccatagaactgatcttgtcgttcacgtcaggatgagccatcctgcatcactcatcccacttgtacattatacacttggacctattcggttcactcttccacactttctcccatctacacagggtttctcttttcgatctcgttcgctcttcactacttttctcccttctccgccggcccttcttggtttttgttacaatagatctttattctttttcgatcttttcttcctcgctcctaatgcctgtccattttattccctcttgttcagaaacatatccactgtcgatcatgatactgtctcgttttctttgctttaacctaggggtacgttagaaacacatggtgataaaacatagagcagataacagatatgtgaggatggatacagtggtacatgataattataccaagcctctcaatcacgtagacaacaagaggtaaaaagatcaagtgacagagtcgtgttcgtacccagaaaactattgactggtagagtctcgattgggattcgaagatgagccagtgctctgatagccatcgccccttgctttaccctttagtgacttggatgttccaaacgaaccgaacgtcggtcgaccgattcctgcaaaccaggccagactgttccgtgcaaaaggtaatcaagagttacttcgatattactgcctgacacgttccagaagagaggagaaagaatgtaagaaatgaaaagatcaaacccaccgaacgaaagcgggcagagctgtacccaacacgtttccccagagcataatcgtccatttttcaaatggagccgtcctcacttcagccggcatgagcgccaagatgacggaaatatggagcgcgtccccaatggagaaagcagcaaagtaccgtgtaaggattgtctcgtgagattgaggatccttctgaagggtggcttgaagagcaggtatgacgaggaatgataacagtccaaggattgccatgcctaagttgaacaaacaatagttgtgcacacgtccctccaatcaatttcatgcctggcccacatctgaagaacacagaggaaaagactatacacacagcttcccatcccaccggccaccaagatccctctgggtccacctccacccccactgacgagtgaaccggccaagacacccgcgtcttccggtcgcaagaaccactcgaagaatcggttcggaaagaagattgcgtacgctcccgcgcctagcattcccaacggctcgccgatcgcgagtgcataatagtatggtttaggaagtggactagctctcgggaagatcattctgtacgtggctaactatgtgaacgtcaattgagaggatggagaagagatgatcgagagacgacaacgagagaaacgatcgagggatcccctcaaaggcaagtcggggagagcaatgacgacggagggtttcattcagcacgtgggggcacagctttcgtcacaagttgtaaccacttgcttttttgaatcaagattattgtaccagaaaaatatacagccagaatatacacctcttcttcatcatagtgaggacgcaagtttgaacatatccacgtatacgcctacgcctacacctactcatctcaagctctacagatgtccaactcggcagctctcaagctgctcacgctgatcaacgtatcggccgctcggtcgactgcccgaccacgctcaatccctgcttccaaagttgaggacactactgccgagtctggtcctcctaaggcaaagaaacggaagactgtcatcttcggagaagagctcatcggtggtcccagtggcagcggaagtccagtggttgctaccggaaatagcaaaggaaagtcatcaaaaaaggccaaggtcgagatcgacagtgcgccagccgaagcggcggttagaaaatcaggtggaaaggatattgagctcgacaagggagactctgacgacgaggatggggatggcgaggggaagggagaatctaccagttagcacttttattctttctgtctgaagtcaaaagaaccgattgaacgatgaactcatttaaaaaatctcgcttctcctaacctagctgcatcttccatgaagaccgacgcgttccacacccactttgggccgtcctcttcggcctcttatttcacaccctctacaattgcgtctgctgctgaaggcaagtggactcagtccaagctctccgacactagcctcggtaaacttgttcaatcggttccggaaggaatcgacgcttcttctcttgacggaacgaaagccaagattatcgagtctctcattgaacagttcgataatcttccctcgagttcagacggtcaaatggacgatttccagacttcgatcttgtccctcattggcggctacaaagatctcttcctctccagcttggagttgaaccagcgagagagaacaagggatgtcgtccttctgcatgcgcttaaccatgtgctcaagtgcgtgtcaatctttggttttgattctattcatacacaaacagagagctgatcatcgtctcaatctacttctttttgccgtaacagaactcgacgacggatcttgaagatgaatgagaaactcgcccacgaagctgctg

SEQ ID NO: 53 - DNA, 11319 bp, Xanthophyllomyces dendrorhous
cctacccctacttcatctgcctctacttctgaccccagagatcaagggttcaccagacccaaggttctcatccttctccccttccgatccagcgcactccaatgggtgacctctcttctagcactcttccctcctgccactcaatcacaaaccgagaacaaatctaggttcttttcagagttttcgcttccgcctggtgtatcagaccgattggtagagaaggcgagcgagtggccgaaggatcacgtcgatacattcaagggaaacgtagacgataacttcagggtcggaatcaagattaccaggaagagcgtcaagttgtttggaggattctacggaagtgacatcatcgtggctagtcctctgggtttgaggatgagcatagaaaaggaaaagtacgtctccttttcccatatcctccttatttcaacatcttgttctctgtggaacacaaactgatcgcatcaagccttcgtctgtcaaacataggagttctgatttcttatcatcgatagaagtcgtagtcgctgaccaactggatgccatgtcgatgcaaaactgggagcacgttcaggttagtatttgattctatcttatgggaacgtgatttcggcgcaggcgaatcatgacacaacatgtcactgacattttgtacttggcgagcagtttatcttctccaaaatgaacgccttgcccacggattctcacggatgtgacttctcacgagtcaagccatggtacctggagggacagtgagtattcccgtgcatcctgtgaatcttgacggctagatctcatctctccaatctcttttctgttatttgcaatctacaaaagggcgcaataccttcgtcaaaccatccttctttcgtcctatgagactccagagatgcggtcactctataacaaaagtctgacaaacctggctggaaagattcgaacagaacagcggttcgagggagagcagatgaagattcggagaggtgtcaagcaggttcgtcaagttttcctccaccagagtctaaagcattgttgttctttctgacataagtttatgttaccctcctcacttctagacgttcacccgatttgagtctgttgatcccaactcggaagcagacatccgattcgatacgttcaccaagcaagtcatgccctctgtgctcaaatcggcggtcatgtctcagaacactatcatagtcgtgccgagttactttgatttcgtccgagtgcaaagttggatgaggaagcagcctgacctaagcttcgccgccatttccgagtgaggctttcttcaatttgcctcctatcggtatcattgataaatcaatgtagctaactgatcactctctgtcttgtcgattcattcatctaggtactcttccaacccggagatctctcgggcgcgaacatccttcttcaagggctcaaagaacctccttctcatcaccgagcgtttccacttttaccgaagataccgactccgaggagccaagacctttatcttctaccaactccccgatcactcaatcttctatcctgagctcgtcagtttcgcattcctaaaaaacagagagggtgatgaattggacgacgtcgaggttgatgagggagaagtctcgacaaaagttttgttctccaagtgggactggatgagattagaacgaacggtcggaacggaggatgcgagaaagatggttcagcccggtggagatagtgtgtttacgttcatctaaacatgacattttctctcgccagaatcagaatgatgcagatgagtcttgataagtatatttgttcaatgcttgtcgattcaacagacgagatgaaatctacaatcaagaaccttcacgacggtacgatggggtatgaagcatatataaaagagtgtatgaacaagaacaaagatttcgtcatattataagtacggtagaagaaagattgaagagaagaagaatgcatagacgatttccagattaaaacatcgctgacaaggttgtatcaagagtttcttcatctcatgattcttcagtggttggatcaacaagctctgcccagggccgaggtcgaatccacatttctgttggccgccgagtgacagcctcggcgaatttctctccgttcggatcggccaaagaggcgggcaggatatccagaaaataccgccgagagagcgtcatgatgaacgatctgagctcgagttgctgatagcatcatcacagccgagtaaccaacagaacaaagaatagatcagaaaacagaagtgttaaaggactgaatgctgaattggatatgtaccgctagtctcgagccataacacgctcgaagacctgtaccgaaaggtatacttggcccagcgttgatgtcaaacgacccgtcggctttcaaccagcgttccggtctgtttggtttaccatatgcaaatacaaaaggtatgaatcaagacaatatgggcgatgtttatttagtttgaactcagatatgacagatggcaacgaacctgaactcatcaacatcgaccttgtcttcccatcggaacctccttggtactgtacctttctcagcctccaatcttggcaaggtgctcgactttgtagcacaaccggccatgcccatcatgagaaggaaggttgtcccctttggcatgacacatccgttgacgacagtctctaccgtagctaatagaagaaacacaattgagatgagcctctgattgcgtagagagagaggggggatgatagggcatagatcaaaggaacgattgtgcaatcaaagagggtatcacccacaagtccgaagagtggtcatgaccgtctgagatacgcgcagaatctcttgtatgactgcatcaaaatctgaggagatacgaagagtttagcatgagctcaataccgatctataacattagcaagttatagtctcaatctgatctgatttaaagataaggagaagaaccaacaagggagcgaagtagagtgtatatcctcgtaagtgagagtatgctctctaacgtcgggcaagacatgcttgatctcggcgtgtaaccttctctggacgtctggattgcgtgtaaggaatctcagcgcccatcccatggttgaagatgttgtgtcgtctccctggtatgtatggagagagaaaagaggtgatcaaaacttttggtatcacgatagtattcgagatctatgcttctgacgtacggcaagaagcaaagtgctcatctcgtccctgatctcctcaattcgaagattagcactcttcccattttctcgctcaatatcccactctttttcgaggaccatttctaacagacaactctctttagtttcacctagccgaacttttctccgtccctcgatgatcttcttgttcagcgagtcttccatcagtcgctctgcttgacgaaacttggccgatctgagacgatagaagaagtgagagaccgatggaaatgtagattcgacggggatagcctagatgatatataacatatctgtataaggatggaggcaaacttattgacatctgacaagtatataatgcgtacttcgaaatacattcgactagctcggccgagtgcgttggtctcgatagggaatcggttccgtcccattttccctttccgttcaaccacggcgatattagcctccagttgatgatatccgaatccgaaagcgatatcggagataatatcctatgatatgtttcacgaaagagcggataagcagcttaggccatgaatcggaagaaagagagcagtaggatcttcttgagaacaaactcacgccagtcagaaaactcaagtcttgcatcacttcaaaacatccctcttcagaaatccgttgaactgcatctcctaaagcttcacgtttagattcccatctatgtatcaaggagatagacagagattccgatggtctagctagctagctcgctacttgtttctattggccatataaagtactcacagattgaacaagttctcagtagtttgcacaatgttgggcgtcagtaacttgagattattttggttcataataggcccgaagaatcttcgatgattctaaggaatagatcataaacaagacagtaagtttaacacagggaagcaacggttggtgcgaaggtaacagaagtagacaaacacaccttccaaactgcgtctgtctcggccaaatgaacaaatccagtcagaatatcgaagtacctcaacatatagagtgactgcctcgctctcactcgttggtagcgcgagagatcccccttgagtatagatgatgacatggttgttcaaaacataacacaatcagcattatctgaacctttatgtaccagcaatgattgatctttgcttacaaggagtgataggcccaaaggccttcaagaggtcatcagatcgtcggaaaattgagtctttcttcataactaggtagttttgtcgaacatggcaaaaaacacctgtcaaaatatgtaatatcgaatgccaggtatcctctaacttactatcttcaattatcatcgggtcgcatatcaccacggccgtattccaggcaagccaatggaattgatagaaacctagagagacgatcaaaaacctccatatcagggttcgtaggacagtcccaacaattggcaagaaaaatcggtaggcgcttacctccgggaaaattggctgcaatgagctcgtagtaatcatgaaactttctggttcgaacgtaattcttgatgattggccggagatctccaaaaaaccactccgtggtttccatatggggaactccaggaatatgccttggcttggacttgtaaatgatgaagcatgcaaacgaaatagcgaggatgtaaatcgcgatccacagcatggtggatgaaggcagattgaacaaataggcggatagagattggtgagatggtagatgggtcacggatggataggtgatggacaagacaacaatctggctgtccaagattcctcttgtgttcttttatagtgcaggctcaagtatattgcacgtgtttaaagaaaagttcaacgaatatggtgtgatggtatctcgtcttgaagaagaggtagtattttcggccaaggatacggcccaagtgaagtgagaaagcttctctgtatcaacccgaagtgaatgtgaagagataagataagagacgggctttcgacacgtgacgtgatgattgcaattacgtaattaggggcgtaaccattttgtgcgtcgatcaccccaatcccagcacgcttgataaccctacccctaacctgagctccttcgtactacctacgtcgttccatccgcttatatctatcgccatcatcagatacatcacaacagcaagtgatagaagaagaggctaagacactgaatacatatctcgacatgtcttttaacgatcttgaacgaggagttcctctcaccacgactaacgcatcctctagctcgaatcaagagttcgacaagcttcaatccagtctatcccttcagatcttcaagatcaacgcgaacgtcaaaggaatcgataaacttctcctaaagctcaatggagcgaacaatctgacgagtaggaatgttcgggacagtctgtatgtccacttttctttttctgttttcacatgccggccttcgtcgtcgtcttggtagttcgtgagcaactcgccgaacgtacttctgtatattcaccaacccttcgattcggtcacccagatccggcctcttagattcaactcgggaaattgtcaagcactcttcatcggaccttaagaagttcaccgcattcccaccgtctcctaatgctcctgtgagtgactttctttgtcatgattcagatttgttccgttctaaaattggccgaatgtatgcaacatgccatgttggctagaataatcactgactggtgtcctatgaatgtattcacttatcgttctcgcactcccaaatctattgaccgcagaatcgaaaagctttgcagacaaagctttccagagagtaccaaacttccatctcggctttccagaagattcagcgaatagcagcagacaagcagcgtctcttggtcgaagaccaacggaaggaggtcaacgagttgcgttctttcattttctccgtctatactaccttgacatcagatgacttactttctatgtgctcatggcgttctctcccatgaacagagaaactactcatctattagacttggaagaacaaggcagcagtcaagaacttcaacagcagcaacaagagcgaatacaagtgtcgtacgtgctcatctccttttgtctatctatcctcatcctcccgactgattactgacacgtgtcgttaatttatttggaaccttgtcgaaccgatatgtggatggtagtcaaattcctgcccatgaacttgaatttcaggaggcccagatcgcggagagagaggtcgagattcgagagattgagtccgggatccacgagctaaatgagattttccgagaccttggcacgatcgtcgtcgagcagggtggaatgattggttcgttctatgttagctgaagaacgtgttcggacagatgggtggattcctttaggggttaaaaagaattaaaatgctgaactgtccaaacactttgacggatacatccaatagacaacatcgagtccaatatcacctcggtcgaacgtcacacttcggctgccaaccaggaactctcgaccgcgcacgaataccagaagaaagcgggcagacggatgctttggcttatgctcatcttgttaatcgtctcggctatcgttctgacagcggtaagtgtgctttgccagcttcgcagcttaaacgtcagagatataatactaaattcgcgctggacttgtctttgaatctcgttctcagatcctttcttgaggcttgtaaagtcatttttgtgcttcagattaaaagcgaccatcctcagaaccccttcatttcttttactcgatattctgatctagctttgtacttttcactctatagcaatctcttgtttgatatgttcggtcaatgttcctcacctacgtatctttggataccatcatcgcttcacaagagatcctaatcatctctcttcccttgctctctttgcagttgttcaagtcgaaacgacctcttgctatctatactgccatcatggactccgctcgtgttgtactccttgtcttctacattttgataaatgacacattgcgttacatcttcatatggaacatctttggtgcttaagcgacctgtccgccttgttgaaagccctggagaacgctgttcttgagctgtcattaaacagcaatgtgactgtcgagtcagagttgatcgaacatagaaaaagagaagagcagacaggatgatatgggaaagaacctaccactggactgatctcttttccatcgtccaagaagtaaccgatcataagcaactttccaattgccttctcttggactttgcccaaaatctcgccctcaaactcgaccacaagttctcccgaggagagtctaatcaacaagagttcctctcctttagcggctgatcgtttggggaacatcgccttgaaaggcgttaaagcgctctcgatcgcctgcgtttttaaggtggcacatctgtggatcagtatgatacatatctagctcatgtacgatcaaaactcacctcggcttcggattccgacatttgactagctttggagaggagcttgactctagcctgaatggcacgaacgaatccatctcggagatgatcaaatccggtgtttctcgtaggaactgatgacaacaacgggcggatacatgtaagactggaagctttggaaacgacacatccaatggcatcaacgtaccgattcgtaggacacaaggctgatcggactccaaaaactctttcatcgacgcttcactctatgcgaaaccaagcccggtcgacgagaacagatacaacacaaaggatgatacaggccaaggacgtcatggctgatcagaacttgatactgaaatcgaaaaatgaaggatggttatgtggaaaagacctactcccatcccaggcttctcccaccaggtccccttgggcgcatagaaaccagcagcatagaccttgactctcaagaaagacaccgtacgaactccaagtccaaccagagccagaggggcgctcgacggactagccgactggagagattttggtagaatagaaagagggaaaggaagggatgtagagctatcaactagttcaaacagaatcagcaacaagtggaaatcagatgagcataaaaccaagacgtggacaaactcttcacattagaaggtggaggtgcctccagctccaacaccgagagaagtcgagtaggcgcaaattcgaaatcttgatcaatcgtacagatgaacggcaggatgtcagacacagaagaaatagatgaacaggtctttttcgacgaccagaagagacgaacccttgagcgaactaccgacgatccagcctgttgtagccagagctgccagtccgatgactgctccactcggtctgacccatcttgcggccacgggtgcgactcgaggaccggcaacgtagctcagcttggaggttgatcgaagaacctgtctgatcatatttgatgtagatcagtatgaaggtaagtgggtaagatctcctagatttgtgccgatctatccgatcagtccacagatagatgtggtgaggttctctggcggtgagacatttcgttttctctttcgtctctttccttccatcaacgatcatcctgcttgccctcaaccaaccctcctttcttctcttctcatcccgttccgtcttcaatcttttacctgagcaacctttccatgtccgttatggcagctcatccgtcgttgcctccgacaccttcaaatgcaggcaaacacctcttctctacgcgacctcgccagcaacctccccgagcccgttctgcctccgcctctcctcgacccaaacaatctccagcaatcggaccatctttcccttgctcaccactagctaagaattctcagtcccgactcagtcagtctcggccggtcagtcctgtcaagcaaacgtctgaattgacactatggccgccaacaaccgctccgaacgcggatgagcgtcggagtcgaagccgtggagccaagaaaggagctagaggaaaggaaaagaagattgtcctcgaagaagcattcagctccctagagctcgacgctggagtcccttctgaagcggatgtttgggatatgccgatcaaggcgagcggaagagatgtccttacggtaaagctttcatttagttctctgcactgtctctcttgagctcatccattcgtccgtcgtaattcatttcattcaatctatcttcagtggcagcaaacctcttcttcatcttctccctcgaagcttccttcttctccacgaccccgagctgctagatctcagcagggacagccggtctcgacgtccaagtcgatcgctccgttcagcaggtcctcgaatcaacctctcgcagggccttttcatcacgcttcgtcctcatcgatcactgcagtcagctctaattctaatctgacctggcaacaagccttattcgagacggcccaccctgcctcatctaggccaaagatccgacgccgggcatctctgggaaacgaatcgggtaccgcccctgttcatcttcctagattgggcgtacccgtcaagtccaacagcatccaccatagctcgtctatgaagaacaagcgcgtatcaggctcgcctcccaacaatggggaacgcgtgaacggctcgtcatacccggctggaacggtcggatcggattctggaggagtcagacgccctgagggcgaaatcaacacctatgctggaggaacgttccagaacgcccccttggcaggggacttgcccaagccccgatttggtgctcgcccctaaggagttggagaaagggaggccttcatttctttggaggagctccttactcgtgtggccgaggacagaaagagcgatgagggatcttcccttcaatcttttcttgaattgtccatcacgtctggcaacctttcctaaactgctccctactgcttggggtcatctcccgagtacatatttctcgcccctcttctctctttctattcaggttcattttcttcggccagcatcaactttggccttctatttcttcttttctctcggctcggcgacctcggtttcaaaacgtaccgaacgccaaacaacagctgtttctcacgaaacagtcttttctcggccttttctatcatactcgtctattactatcacctcaactcccttttgacctacactcgcccactcgttgtcctcttgacagaactgtcaaccattcaaacgcatctttatgccaccttcgaccaaccattcgcctctcgtttcgcatcataccaagcttggtgcttgacggctacaactatccatagtctcactgtttcttgtgtgtgcatgctctcgaactagactctctctctcttgtcctcctcaatatgtaacttctcctgcgttactactccttctttgaatcaattctatctgggttttttggtctcggtgtgttggctgctttgcggaaaaaaagaatgacttatttccaaggtctctcgctgtcgctttacttgcctcgtcgtaagtcctgcctatcgtcgtttcttctcgtgtgtacgttcgacctgactcatcgtgttctactcttgctttgaactgcctgttcgtgatcgttgcctgactcgtacagccgtcaccggacacgttctataaattctgtccatgtagagatgctattcaactagcattaattgccaatatcaatcgctatcatcccctgcctcctacctttctcgttatctctgccctgttctgttctgttctgttctgccctgcgcctgtctcttctccttcttcttagtctcttttcgaagctttgctctaagattgaatctgatatgactttgcggtcgtttatacttgaagtcaaccttctgggcgtttgcctttctcttcgtgaagtgatcatcatgtttggattatagtttcgtccagtagaaaaaaatacaatcgatgattcatgctcaaagtccgtgagaatgaactatacgtaccagagacagttctggttattggaaagaaggtcattcgtcaagggtttcacgggtattgatctgctgaacgcgtgagcggcccccagtcggagagatctgtcggctgagtccgtaagaacgatgtgaatttctacagactttccaccatctctctctcactcacccgtacacacacacacacacaca

SEQ ID NO: 54 - DNA, 7556 bp, Xanthophyllomyces dendrorhous
acacacacacacacacacacaaacaatatcatcaacatggctaggatcatatcctctcctccaccgagcaggtcgacatcgacgccaacatcaacgctcggaccagacagccaagacaccttcaacccataccctcatcagaagacattacctggttcggcgccaggcgaacaaacgtatccgaaggtgttggacccgtacaccggtcggtatgtatctacgaaacctgcgaacatgccgttcttggcccaccaacggtacaaagcgtctaaagcggccgccgatgctgccgctgctgccggcaaggatgagaacgcgaatgggaacgacggacggactcgatcagaaagccagacgacagagaggggtatgctcgggtggctcaagacggtcgcctgggcgatcatgttggcttgtgttctcggccggttcatcactgggagtcccgtatgggggtatgaggatgagattcgatctgtctggaacaagcatctctggaaggttcgtccttcttttttttccgttgaggagggcagagggaatgctgttcaactcggtcttattctttcttcttcctgccttcattcctcttttcatcgaaacaccatccctgatggccatggacccaatggtttctgaacattttctgcgtttcttttccctcttgctcttcgtctcttcctagcctagacaaatccagttcaacctggaccaactgtccgaattcacaggcaagaacccggacagaccgatctacctgtcgatctctggaaaggtttacgacgtctcgagctcggctaggatctacggcccgggaggatcttacgggatgttgtatgtccagtcaggaagagaggagagagagcaaggaagtttcatttagtctttcctgtgagctgacagcacgggctttttcttctcatttcctttctctttgttcatcctcaactctgacagaacagggaaagacgcatcgagagcgttcgtcacgggctgcttccaaaaccatcacctgaaccatgatctccgtgggataggacctgctgaactcaaggtgagtacactgaatgaggaaacgcagaccagagattcgactgtgcctcttgtgatcatgaatgatcgacgttctcaccgatgtatcctttaccattggatcattcctcccccctccccccctctacgggtgtagtccctgacgaactgggaaaagttcttcgccaaccacaaacgatacgttcaggtgggaaccgtcagcctgccgccggtcgaccctagggaaccgatcccggggccgtgtatagattctgcgccgaacccgcctgccactcgacggggcaccgacccagccgtccgagcgccgcctgtcccgcccgtccaaccggaacagacggacgagcacgacaaaagggccacactttcggaacacaaagagctatagaaaaggacggtctccatgctttctatcagatgaagctctctggcttggcgcgccccgcgttgtttccaatcagagaaagaaaaaaaagagaaaaaaaaagaaaaaagaagacatctgatatcgaccagaagctagttatattcctctccctctcgctttgtaaaggatgagaacgagcgagatgacagaggacgagctagaaaaagagattgactgagtgcaaatgtattcaatcaaacaagaacggctgaacgaaagaaaaagaaagaggaaaagagtggccacttcttgttaatgatgatgatgataatgatgatggtgatggtgacgatgatgatattgatgataacaaaggtgacgacgaagagaaaaagcccggtaggaagaaaagatccaaagaaaacaggttttgagagatgcgcgcatagaatgtcaatgtaggtttacaaattaaacaaacaaaaaaacaaaaaaaagaaagaaagcaaaagggatggttaggaaaagcaagatcgatcagaccacgatcaaagactcggctgaaagagagagtagaaaagtccgaacgtggtgtatacgaatgaaaacagacatgatggaggacagattgtagacaatacaacttggagagaaagagaaacattgtgagaaaaagaccgatatgtacaccctacgaaagtgcagatagcaaaagaaaggaaaaaagaaaaaagaaaaaagaagaaaaatgcagagaaaggaatctccgagctgagctgtctaaacggacaacatttagaaacccgattggcccctcgaccggcactcaactttgtcgtcgacgacaggaggtcgatcggtgtcccaatcttcgaccccacacaccaagtcatcaaactcatcctcctcctcggccagtcgtctgtacctttctactgcaccttcctcctcgtcctcccaccggtcaccctcttctcccgcccggggtccgtccagggtggaaagtgtgaactctgtaggatcggacacggtctcatcttcgaaggacagcccgttcggtctggtattcttgtcggcggaaaaccttcgggcgacagcggtggaaagtccgtttgctgttccactggcagcaccggttccaggcagcagatagttgttgttactaaacgaagaatgacccgagaatgagcccgacgggctccccacacgctcgcctatttctcgtttgagttcaccgagcgcgttggccgtggtgctcatcagcacaggcacccgtttccatgaccgaggagagatcgtcgggccgtctccgttaggataggccgggatgatcggccgggcgggccgaccggtcggatcacctagcgaggattcaatcgccttttcgagcaaccggtcgaacgatcctccgctatgggaatgggagccgacaggagtgtttcctctggacggatggcttgtcggcggggtcagcccgtcggtcaccgggtcgaacggatagggcgaggtggacggggaggtcaacagaacttcgttccgaacaaccaatttagacgtcgatgggagagatggaaagacgtggtggaccgaagggctgacaggaagaggaagatgatgaaactcaaactgatgagatagatagagcggtccggggagaatcttgagcgacgaggagatcgtctgaatctctgcacgggaaagcgacctaaagttcaaggagacaaatcccgaaagatgtgatgagcattttccgttcagccatcacgagcagtagaggaaaaaaatgttgaaaaagaaaagaaggaacgagggaggttaactaaccatggcaccaagccctgtttatgattctccgccagactaccttgtttaccgtctggttgggttgattcgaaatgcttcaatccgatatcctcgatctcagacccgactgtgccgagctcccaagcggccccctcccaggacttgacctcggcttcgagcccgccgatgttggaaccagaaacgatgccctccgctcttttcttggccatcatcatcaggctgagcgccgacgacggacctgtcggacttttgggggtcggactgaccgatggggttgattcgaccgacgtgggtaaactcacaggacagaataagactttctggagagagagcaggccgacggtcggatagaacaccagtatgtcttgtgcagtctcaggcaggcccaacggaccagaaacggcgtctgcgtgttggaaccgaccgggtgaaaggtctgcaggacggctgatccgaccggattctaccgaccggactcgttcgggagcgaggaagcagcaggtgacgggaggcagggagaggtcaccgacgttgggcgccttgagcccggtgctcgagagaagggcggacggggcagcagcggcagaagacgcagatagctgggagagctttcgaagagaagaagagaacggaggagagctgggcggcgtgaggcagtctcccggaggaagaaccttagggatggacattggggagggtgtcgaagaaggaggtatctgtctagtttgatggatcctcaaagcgggttgaacggctgtcgagagaggttgctgatgatttggcaagcaaaggaagatcagtctaggacgagaggaagagaaagaagaataagccggatcgactcgagcggcccaaagaaagaaggatactaaccacgtcgagagcgttgaggactttgccttgcctgtggcctgtaggaggtcctccgtacgggttaagagggtagacgtctacacagaagaagagagagagaggaggaggaggaggagaagagggacaggttccaatgtcggccgtccggtcaggcatctttacgaggacgacagaaagagagacagcgatctgacttacggagcgtgcctttccctgtggcaactgccacccatctgccagcgttgtcccaactgacggacttgacgacggcttcactgacgcctcttctgaggacgtatcgttcccaaacttcgcccgaggaatgtcctggtgccgggtgtggggactttctaggcggtcggatctcgaccacggcaaaggagcacgagggggcctgggagatgagaagcatctgactgtttggggagaacgacagatgattgatcggctgggccgaacgggcggtcggagatgggtaaaagtgaacgagaggggatctgttagccgggagggaggaaagggtgtttggaccggtgctgttgaccgaggcagaggagagtggatgaaggtcaatgatctgaacagattgctctaccctcgggaacgaagcctgttggccgggatgagattgatgcgagtgttggtgggatgagaaagcatgttgacgggactggaaagagtgttgaggagactgataggaatgctgaccggtcgagtaccgatctcgtgaggaggaggcaggcgcagggatcggcctggacttggggatgtgaccgtccggggtatcggctaacgaagaggaagaggaggaggaccggtcgatggtgcctccggtccattcaccctcttcgtcgtcgttggcgatcttgctaggatcttcctcggtctcgatcaccctgtcatccgtccgacctgacctcgagcgagatgaatctgccgagccccatgcgggtaggttgtgggcgagactcggtctgggacggtcgtgaaggatggtctctgttctagtgccggaggccctttggaggagcggggcggaaggtccgggcggctgggtggtagcaaaggcaagcagcctgtgtgagagagtgaacacgggtgcttgggacgagggataagatgcaggaaacgtgatgggtgggcatagtgtgtggaaggtggcaggatgaaagagatgaatagctggtggatcgagtgtgctctgtaggtgtgggcgcgggtgcgggtgcgggtgcgaatgtatccgtgtaaagacagaaagagaggaagaataaggggtcagcatagccgatggctagagagacacgccaagggagagtaaccaagctaacggaccactacaactgcatgggatgagcgttgaacgttgatgatctttccatcgaggatgattcttttctgaaacatcaatgtctctgggtgatgtagcacgatggccgacacaggttgattcttgtctggcgctggaaagtggagcctgtgaagcaggggaagcagaagatgagggaagaggatagacaagaagatcaaggtcagaaggatgactgtctgtagaggtaagagggacgacctcttagaggtatagaactgacgcgacgagaagcctatgcggctcacgaatgagtgttccgagtaggacgtttcctttgacgccttgatggacccagtcatctttgcgatcagaggtgatggtaagaagctcgatgaccgagtcggtttgaccggaagatctgccgaggggtgcgtcccagatggtgagagatcgggcggtagcggtcaggagacatctatagcaggggaccggatgatgagggattggcaagaggacggaacatgaaggtcagagacaagggacggaggggctgagccaaggaaagtagagaagcaaggagaacatgtagaaaaaggccgtaccgttggggaggcttgtttttgaccaagggcacgatatcccacccggaccaaacgatgttgggttctcgatctgtcctgtctgaccggatcgagatgatgtctccgagagattgagaggatcggacgaggtccggtgtgaccgtggacgacgatgatgatgctggtggtggtggtggcggcggcggaggtggtgggtgtgcgatgagggacgagaagtgatgaaaggttgaggtgagggcagagacggttgtgtgtgagacggcagctgctgccgactgtgcatttctagcgaacgacgtaggtaccggcggttgtgggctatttcgacatgtgtgtgtgtcaggacagatgagcagagttgcagaaagagcgttgaagacaagacttaccttgtatgtgtggctggaagagagcaggagagggagagagaaggacatgaaggatgaggccgagagatggacgacgatggtgacgacagaaacaacaacagaaaaaaaaacaataataatgataacgagaacaagatagaaccaaggccaaccgaggacgacgaccggacacaacagagagagagagagagaacgagacatgaacgatgagtgcttctgacaagggcgagagaccaaacgaaaagagaaagaaggacgacgtacgattgacgacctgacgttctctgtctgactgtctctgtgtgagcgggagatgactgacagggaagcgatctggaccggtggtggagacgatgctgtcaaccattccggccggatcttgaagataactcggttgttcgaacgacgtggtggaagcgggagcgagagcaagagcactacagacagccggacggacggaagatgttgtgcaactggttagattatccgaggacgacagagaggacgaggacaccagagagggttgatcaaggagacgatgatgatgatgctgatgatggatggaggcagtagtagtagaagtggtagtagaagtggtagcaggggtagcagtggtagcagtggtagcagtggtaatagcagcagtattagcggtggcaggagtcgtagtcgctgtggcagtagagggcgtggagtgatgcaccggtggaaggacacgcctgtggcgctttgtcattcgaacaggcacacccgacttgatccgaggggggaggggggagagggcaaaggaaaggctggcttgtgtgtatgcgtgtgagtgggagtgtgagtgtgtgaaagggagcgaccgattgaccgacagaggaacggatatgcagacggagcgagggaacgagggagagggagagtgaagttgaaagtgagtgaaagctagtgacaggacagacggaagagaacggtgccttgttcctgatggggtaagggacactagaccgagcacaatagatgacgagtggcagcaggagcaaaacaatagagagatcacacagcgcgagagatggatagatagacaggtagacaggtagacagatagataggcaaacagatagataggcagacacacacacacacacacacac

SEQ ID NO: 55 - DNA, 9796 bp, Xanthophyllomyces dendrorhous
gtccacagcggtacactcccagccggccacacccaggaaggtcagattcaacgtcggcacgaaataccaggtgctcgatgtcatcggtgaaggcgcctacggtgtggtgtaagtttgtttcttgctttgtttgcttgcttcctctttctcagacaatccttctatgccatacttgcactcacacattctcgtacacacattcacattcacatacacaaactcacactcacatcctctctcacactcagcgtctctgccctccatcgagcgtccggcgcaaaggtcgccatcaaaaagatcgccccgttcgaccactcgatgttttgcctgcgcacactcagagaactcaagctactaaagtactttgccgagatgggggtcggttcacttcctcacttcttgccgctctctctctcactctctctcacacatacgctcatggctgaccttggtttgttctgctttgtttgctttttattcctggtaatctcgtcgtcgtggtcctccttgtcctcctcaaggtctcggagaacgttagtccatcctgattctctttgttttctcttgttgttcttctttcttttgtcttgccttctttctttaccaaagagaccaagaaacctctctttctcagcccctagactgttgtttcccatcgcaaggtttccttaccctcttctttctctttgctttccttcccctagatcatctcggtcatcgacatcattcgcccgtcttcattcgatagtttcaaagaagtctatcgtacgtctcgagtttccctctttcctgttgcaatttctttccctccatttctcacacccctcttttcacactccttctcctacagtcgtccaagaacttatggagaccgacatgcatcgggtcatccgaacccaagatctttccgacgaccacgcccaggtttgcattatctctctttctctctctccctctactcttctcacatacactcacacttctctcttcttctcagtactttatctaccaaacactccgagcgctcaaagcgcttcattctgccgacgtcattcaccgagacctcaagccatcaaacctcttgctcaatgcgaactgtgatcttaaagtgagcattcatcctcggagcttgtctacccccctacccctctttcgtctacctctcctgttttcactgaccaccagtctttcaggtctgcgactttggactagccaggagcgtcaaaacggcagagccgaacggaacggaaacaggtttcatgacggttagcccgttctctctctgttcttactcgggtacagaatttcgatcactcacacacccttcctctctatttccctcccccttgccaccgctcaggaatacgtcgctactagatggtaccgagcccccgaaatcatgttgacgtttaagcagtacaccaaggttcgtctttcttcctcttggcaacccgatcggacagaactaacctaaccttcttggcggcctcccttaggcaatcgacgtctggtctgtaggctgtattttagcagaaatgttgtcgggcaagccactcttccctggaagagactaccatcaccagctcactctcatcctcgacgttctcggcacacccactctagacgagttttacgccatcaactctcgacgcagcagagactacattcggtatgtgctctcctttttcctttatcctttattccattattttatcatcacctgacaattgccaccgatcattctcttttctcccgacccagtgcgctacctttcagaaaaaagaaaccgttcaacaaaatatttcccaatgctagtcctcaagcctgcgattttttgcaaaagaccttgacgtgttggtctcttcttcctttgcctgctttttcccttcctccttggtgcttcctctttcctactctctgtgcgccacttctgacctcatcctttccctttgttccgccgtgcagttgacccaaagacaaggctgactgtagagtaagtgacgagtgggatttcattcccttttcttggaaagctccctcctaaccggcttgctttatacgttctccgcttccatcgttctttcagacaagcgctcgaacacccttacctggaagcgtaccatgatcccgatgatgagcctatcgcgcccccgcttgatcccgatttctttgattttgacattgagtgtatgttttgaataatcagaaagagaaaaaaagacgtagaaatagaagccgcccttcacatatccgttgtgctgaccagaccttatccttgaatttctatcacccacaatcgcacccacagtccagaaagatgatatctctcgggaacgtctcaaagagctcctcttcgatgaaattatgagcttcaagtcgctcgattaagcacttcctctcgtctgctctgtttcaagccgatcatctcgccctccatcactttatcatcatcaccacggtccccgtcactcggtcctcacccgcccccgccccgttgcttttcaaactgttcatgtttcacttggcgtagttcgatcctaggctggtcccagagatccgactcgtccgttcatctgatccatcgtctcacgtctcacatctcgcgtctcatgcttctgacctctttaagtcacgtcctcctcttcaacgattcagtttgtttcccctctctctctctctcttccgtgtgttccacacttcgagccatctattcaataggccttgttttgtccatctttccttttccgatctgtaatcctagacaccagtcccaaccgcatgaccacaacgatccttgatttctttatgtttcgtttctctttctctggctgtgttccgtccgtcgttccttggtattctttttctttttttggggttctcttggttctctctacgcgactcatgatttttttgccatgtccttatttcctttcaacgccgtgaacgttgatgatgattatcatgttgttgttgttgttgttgttgttgttgttctcggatttgatgaacaccgagccatttaagcaaagaacagaaagattgaaaatatgtatattcttgaaaaccaagctagaaaagaaaaaaaaggcgtaacaacaggcaacctccttcttctcggaaaggacacgtacacacgagaagcgaggacgaaacacagagagaaagagacagggaagaaaacaaaaaaaagagtcttttgagacgagaaaggaatatatatatatgatgttgtccacaaccagataacaaaactatatgaccaccttccaagcgaggagaaaaatagccaatcaaaaggcgaatatcctagctccccaaagacgcattccgacccaccgcaccggaagaaaacgttgttagcgtgattcttgaagaacgaaaaaatagataaatagataaaacgaatcaaagatatgaacttacgaggattcatcgtgctgttgggcgtgcatcatcttgaccacagcgtcgaccaccgagaggtctgacgttcaaatgacaacgtcagaaatcagcatcaaaatcacgatctaatcctggatcaaatcgtgctggaataaaactaggatatatatgtatatatatataagcaagagaagtctcacctagatcagcacccatgtccatccccgtcaagacttttatgctcaggtcgtcgcctacctttccgatcacttccacgtacgggtccgacagatgagattcctttgagtttcgaacgaggaagcagagggcggaaaggattgacagtccaaaaagttgtttatagctcttaagacgatggaccaagtggacagaaaagaaggaagaagaaagtagccaagctaggacaaaccctgttcaagtgcaaatccacctagagtcgtgccccccccggaacgaacgccaagaatgaaagatgctctcaaatttcagcaaacttaccagacgagatcacgtttctttcaccctgactctctccgtcttcagtgtcgatatcttgcgacgatactgacctgtccttgatcactagcctcgactacagcggtatccccgttcaactgattatcatcaaaaaaaaatcataaaaaacaaatagcacacaaccctgaagtcagtctttatatctcaggcccagacagctggctcgttttccaagggtgaaagactcacctttataattttgcatgtcaatcggacagtctgccaacatgcgtttcaacatttgagccgaccacgatcgctcgtcagctttgcttgaggttcgaaagtgcactagaaatataaccctcttaccttgcctctgtactcgttcaggctgatgatcaagacgtcagaaatcaatgtgttcaacacaaagaagaagatgatcaataaaaggaaaaattcctgtcagaacgaagtcttgagggaaacccgagaagaaagcaacgtcatctctcacagagcactgttgacccgagctatcatatccagtagcaacgattaaaagaacatggtgtaaacaagagctggctgtcgaagaagaaacccaaacaagtgaaaccttacgggtgttcgaaaaagaagccatgatgaggtcgaagaagcgatgaaatcgagttgatgttcgagtcggaaggtgtgtttgatcacaacttgaagtggcaaaaacgctgtagttcatatatcgtgacgcgactcgacgcgacgcgttgtatgccacatcttacgcgacacacccccgcctttctcagacccgattaacagcaagacacaactgataattcaataaatcttacacatcaccccacagaacaagaagaagaaacctctccaaagacgaagatcaggaaaatcgagtaaagaaaacaaacacgagaaggaaatagatatatctcgtttgagatcaggataagagaaaagatcaggaaaggaaagcttaaagtatggccagcaacaacaacaatcttgcgcccgaggaaaataaagagaaattgaacagacggaaactagaagtataggaagcaaaagagttcgaagtaaacgccgtcttcatcgacgaatatcggttcggatccaatccgcgtttaattaccactcgcataataattcttgtatgtcgaccgtagcccacttccaccacctagacttttttctccagaagctaccactggcgaaacagggtccacagcaggtccaggaggtggagtcgccagcaaggccactggtagtgctaagggaaacagggttcgatagtgcgactcgagagaacaaggtattgtcgttgacgaggtgtgcgaatgtagggcatggccaggcaactctgccccattggcttgaagcttatttaaacgctcaaaccagagagttcgattcgtagcacactgttgagcatatggcgcaaggtcttatcgtcgggatgaatataagttgaccgaataaatataagtcacgttacccctgtgggaaatgtatattatgaaacacaacttacctggcatcacagtggcggcaccatcaaacaaaggttgagtaaaaaggtcgatgaatgccacctgtcctttagcttgcatcgcggcatcggcttgctgtacaacagagactggtagacgtaaatcgagttccaggttggcttggttgtgccattcctctacaagaagagaaattcaaatcagtgagtaggaagagaacgaagaaaattggagacgcaaggcaggagaggctttaccgagtagagcagtcgaccaatactccgatatttggtgaggccgacactatttaccacgcaataaaatggttagtatgagtctaatatcatcagagaacatactgtgaacgaactgggttgctgatgtctgcacatttcatcaatgcttgatgaaaaagaatacgatcccgctctatagatgtctcctccgtggccacctcggtgagtgaagccatgaaggcgaaatgcatagacatatcggtcgccaaaatagtgctgaacaagattttccggaaatcactgaacgtcgtcgagatgttttcgcgagccttattcacttctggatttgatgccaaggcagtcgagagtccactatcgtccgaaaactcggatgtaattggtgacttggacgaaagatgcccaacaaacaagaagccaaagccgtgacgcttaagaagactagcgatgagaatacagtgcatgttttcgagagcagacttgtctccatatactagagataatggagccttcgcatttttctacaagaaaagaaaattttgaaagtcattggtcagcaatttgatgtcaatccgtacacccggtgttatcatgaggaacatcaagaagtcaaaggctcaccaagaatgcgttgctcaaccctgggtgtgctccgtcgtgaccgatagcagcaagcatgagcgttaagatatcttggggtctgaaaacttccgaaatccttcctgttttcttgtccaacgatcgtttccagggtgtcgacggacggtctccgtcgcaatcaaggagcaactggagcggaggaacgagaccaaggtttaaaagaaaggtatacgttgcttgtaggacatcgcaaccatgttggtagttactattcgcggttgaagacatacatccatgaaaaacaggaagccataagcttatcgacgttctgacgccgatgtcgaagaatgaagcgagagcaattgtcagaagaagaactaactggtaagggttgtgcgtgtgatatatttgacggatggagagcaagaatcgtctcatagccactatggcatcatttcaacaatacacagttaatttttcctcaagtatctgaagatgaagaggcagaaatatcatacctgcatcgatcccgagatcccagaccccctctgtcataagaacagcctcaaacagaatgcatgtcgtccgatacaaatcatctccggatagttcgtagggtttgaagtcccaaccagaaagcttctcgatcaaacgtgttctggtgtcttgattcattggccctagcagcctatgatgtatttcgattgatgaatcacaagatcgaatgagtttccagaattagcggtttgagacacgaagagaaaatttcgacctactccaaatctgctactttgtctgcaccctgaatcgtctttttgacctgaaggtgcatctcactgaccaactcgcaaaacaacgcgtctccactttctgctgctatttcagccaccggagtcaagcctccctcactccagcctgcaccaacctccgctccgtccgcaacagcctgtctccacggaccccgcccctgttctgactgttgctccggcaagtaggccgatgagatctccccatccgatccacatgctctcgacaacgtcaatgcaagtccacccatatcaacacttgcccgacgggggagattgtaatttcctattgaacaaagattcgcaaacggagcggataggtcggagatcgtgaagagatccttttggtcaggtcgatcgggtttgttggttcgcggtgtgaacacagtttgccggcgtaggttttttggaggtagttggaaagatggggatggaatagccggcgttattgtagaagatatggacggagacggagaccccgagacttgtgattgagaagcgtgctccatagcggattgaatctcttcagtcaaacgagaagtatgaaaggggaaggtgatcactctatccaccccagccttctcgcaagaaagcaaggtactcggagatagtccagagtcgagggagtatactatgatcgcaagccttgagtgagttttttcacgactcgagactaacagcttaatctctttcaagcactcgaccacgctttcgtctatctctgccaagcctgcaggactttggtcctcgaagcagaccgcggttgaagtagagctttccttagcgttcacattggaggcatggattcgaggggccgggatgtgatttatcggtatgaacgcgacagtcatagcttcttgaggggaggatgaagttggcgagctgacatcggctagagtaattgagatatcgctggccgacgatttaagcagtactacacagatacaagcgaaagaagagcagagtatgagaaacaagagtggaccatgtcagcgacgtatgtcaagtttttctttgagatccaaacccccaaatatcggtaaaattaacgtggtgatatggtatagatatctgaagagaatcagatagactatgagtacgacttggatgggattgaacatctgacattcgttttgtcactggccggtatgttgaacgatgtaggtgacccagtcatatccctcgaagcaacacaacacacatatgaactcatctacttctcgactataacctcaatccactttctttgggtgtagtcgatacaggctgtaatgaaggcatcgtaggacacgcgacagaggatggagacatacctgtgatgcctagattgactaacgagtccttgatcgaacccgcacctttggatgactcccaagtggatggcagataaggactagttgtcggtcgtttactcccactctttttgctcctgtgctgtttccccgactggtatccaaaggcacccggtcctgaagagaattgcgagaccgagggtgaagtatgaggaccgttgttggtagcagctgcagaaaaaactgaaaccgattcgggattgcttccgtcttgttgatttgcgaacttcgtgttaaacgggatgagaaaagcggtgatggatgagaacggtaaaggctgagacatgtcagtctggcgagagaggataagacaggaccaagagaaagaagaggggaggaaagaaagttatgttgtagtagtggtcaaggcaggaagtaataaagaaagaacaaatgaatagatggcacatcaaggtctctctggcggtgagccaatccgttaattgctcgagcgacttgtaatcacccatcttcgacgcaaatcatttgctcatttcaacttcatcacattcgtgatatttgagaaacacatcttgcgcaaacaacaatggtcaaatatctattccatattcattatcataataaaacgaagatgaaatggccatgcttgaaatcagatgagggtgatacccaactaaaggttagatccaggagcagaagtgcccggcaatcattatgtcgctacttggttcaacgatagattatgttgtcagggtttgtttcgaagctcagattctcgacagattatggaagtgccatagacataggcatatgcatggtgatagacaaaacgaaagatgtctcgaatgaagatgacagaatccaagcttgagagaacagagaaaataggaaaagaacaacagtgaagaggaatgcgatgaagtatttgtatctcttcgtcgctcggacataaaaacaagacaggaagggtgtatacagatatcgaaaacaggaaggtaggaatcagatatagtcaaggttgtttgcattagcacacaacttatcccatccagtgtcaggggcgcaggcaagggggctgagtggggatggtactcagtacgcttgagctcccaagagggaagggatcatgcaatattgcagagtaatataaggaaattgctgaagggaaccatgaggatttgacgaggttccaagcttgaaagagaaaaggggagacagctaacgactacctagtatatatgtcattcgagatatcaagccaagcaaacacaagcaaacacaagcaaacacaagcaaacacaagcaagagcgaagagataccaaggaagagtcaagatataaccaagagagagttgagcagtaccaaaagactgttgcaagaatgggtctac

SEQ ID NO: 56 - DNA, 306 bp, Xanthophyllomyces dendrorhous
agacgttgtcgaagaaatacctccggtagctttccacaagtacgttttcagcgggtccttcccgcatcatgccatctcctacatttcttctgtagagagagttaccccagcctcgtaaggccctccggttagaggggtaaataggcacctcctgcctgcatcaccacaccaccctttggtgtgatctcttctcggtaagcctagagggtcctgctatacgttgggctcccgtcgacgctggtagggcagcggagaatgagtgtatagcagggctaggtttacggttatcgtcaacatgcgtacgga

SEQ ID NO: 57 - DNA, 712 bp, Xanthophyllomyces dendrorhous
ttctctggcgagtcttatagactaaagcccgaaggtaaactagaaacacgaggtggccactgagagggaaaaccctctcgctatgtcggccccgagatccccagcgccgggaggcgaagaggaggcagggcggaagcctagtgtaactagcttacgcacggttttagccgacgatgagctgtaaaaataaggaacaaaagaacaaacgtatccggttcatttacgattagccggatacgttcggtggcaaacgattgcagagagacggaggaatcgaccgcatctgcaatcaaaaatggggagtaacgatcggcgttactccaaagaaacttcagagtccgcagggctcccatgttctgctctctttcgagcactagaaagctttcttattatcgtggtaagaaagctttctagctaagagaactccgctgacggctcgttgccgtttgtcgcttcgagacttaggtcagcggtagaaggggtgaccgtgagggaagccggacagaatgagctataagctcagctgtcctttaagagaaaggaacactcttgcgagcaattctcctttctcttaataagtcaattcctagtggcacactaggctttggtgaagctttcctcggagataccggtacaggcttcgagaaagcttctttcatgagcccttccctctatagtctcctatcaagcgtactcttgtacgctagatcgg

SEQ ID NO: 58 - DNA, 739 bp, Xanthophyllomyces dendrorhous
agtaagaagaagaggaggcatagaaacgggacctccgaaactcggcggtgaggtccgggacacaagaaactttcccacgaacacctgagtgggagagtttctttcttcggggcaggggcccctaggaggattccccccctctgacctcgttcttccccctgagtccacaagacgaggatgtggggtacgaggggtggggggatgaccgactaggtcgctcccgaacccgaagaaccaggcccgagcccgtggggctctcggccctcccgtaggacgatttctccaatgtcggtactcaccggcattccgagaaattgtcctacccgagggcgggacgaggagggctctctcgcagctaagcgaatagcgtaagcttgagcttatgcaagagaagagctctgccgagttgatttcccagaacaacaataggcgtagccgattgttcgtgacggggaatcgaacccgttctcggcaactagggccgagcgcaccacgcgctccacgagggaagacggtgacggagtcaaaccgtcttcacgagggcgaaaacctcgggccttgtcgttaggcgaaccatcttatatactcctttgcgggagtcgaacccgcctcggcttccacaagcaaaggagtgagatgtgagccagactaggccaaaggtttctcgaaagagaggtgctcgggcctactgcaagcagagctaggctctgactcacggtgagagagaaatgacctacgg

SEQ ID NO: 59 - DNA, 3824 bp, Xanthophyllomyces dendrorhous
ttctgcctattccgacgacaaggagcctgtgagcagtaacatgacctttctccaggcgaatgggagtcccattgcccagtggtccacttcggaactgtctcttcgttctgtgtagccagagagaccgttcctgcttacgtaatgaaacctctagagaggagtcacgactcagtaaccaatgctctgccagagccccaaattttcccctttccataacatgggctagagggtgctttctcctatagtcgaggcttaccaagtaagactaaacgcataggagaacgtaactcctaccaccatgttatgtccgcggaatcctccggactagacgattatacgtgaatcagttgattcacatatatgggatggctccctcgtctagctcaccccgttcagcgtctggttccagcacaaagatctcacctttgcgggtacaccagacgtccatctgtggggcctaccacgcatccactattcacatcttccttctgcctttgtacccatcctatactcctctcagcccctgtgttcacgacacacaaggagaggagcacaggacaaaggcatcagtaggatgcgtttaatgtctgcgctgtggacagttacggtctagtaagtggaccaacgcctaacacctgcgtgcgcaatgtacaacaggcttgtctttattccgcttaggagtggagctcgcgctcttgtctgcccttgcccttcatccgtcccccactaggcttgcaagcctcttgggatatcgggtagaattacaagcactctttttcgcatttctaacagttcttccgggttatgatactactaagttgtaaccttccatttagaaacgggttgaagttcccggaggctttatcattaaagccacaaatatccacccgcaggtggaggtgcgtctccttcatataatgcctcataacaccagactacccaaatcgtaaagactaggaaacaagatcactcctgattcccctcttacgaaaccaaaatagtcaattttgtggggtgtattctccaaacataggcttcgagcttgatagcccttcagcactggtcctaaccctcgtggctaagcagtatctccagtagcgggagatagagttcaccattggagggcgaataccggtcctttcgtactaggtattcgatgctctttgaaaacaaagcagaagatagaagccgtactgactcacgtcgtactgaacccaactcacgtagcttattactggacgaacagtccaacccttgtaagcgagtgcacttacaggacaagctgagtcgacatcgaggtggcaaacatcgactccgatatgaactctcggtcgatattaccctgttatccctagcgtaacttacttgttgatagcgaatcctctcgtagggaatccgctggtcaatagagcccggtttcccgattggatgaggtatccctctagccaattaggctcatgatagtcttaaccgaggttaagcggctaacccctactccagatggagcgaggctagagccgagagctgatgctctgttgatttccagtcaacgatcatgaaccattgctcgcctttgttattttgtgaaaggcttccgtcccagacaaacctctccgctatcagcctattggatgtatagtcaatagggtcgctcctctagcaagtttctcaggagcgtcctcattaggactccttgctaggctgaatagaggaggcaacaccgattgttgctaatagagagaggtgaagttgctagggtcttctcgtcttgctgcttttaagctgcatctgcacagctattgcgacttcactgagcctattcctgagacaatggaaccatcactacaccattcatgcgggacaccagtcaaatgccaaggaatttcgctaccttagcactctcaaggttaaagcggccattaacgagacccttacaggggctgccgcttgacagcccaagctaaggtcgcgcatcgggcaggtgtcagcctgcataccaatccttacggattagcgcagacctgtgttttaggtaaacagttgcagttccatgtcgtagtccactgcaacccttacggtcctacaaacagatttctctgccgcataggccctaattttcttccacagcttatgtcttgtacttcgagacctaccgttaggcagatctaaaccccacttaagaggtgacccactgcttcatactcactaggttccacaagggatacagctgcctttataggcgaacgtacagactcattttgtcgagttccttaggaatagtttactcaatccttgccttattcaggctgacatccggtgtcggatacggtacgggatctcagtccacccatcctaatgggtcttccgattacaatagttttcctgcaagccctttcaggcttgaagattgctaaggctcatcagcatctcctcccggaggatgccttagaggccgcgatgacgcaaggttggctaccagagccttgcaaaccgctgtgtcttagggcgaaaggcatctctacctttcttacattactcacgtacgcattttcagctcaaactatactccctggggacagcaagggatcgtttagtttgagggctccactacctctagccgtaactgcccacagttacgtacacccccgtccttcgtgggtgtaaatagggttgtgctagtcgggagtccgatcagctccttagtgccttgaatcaggactcaggcgacgctcgaccgtcgggttgttacacccacactatcgtatagcgacttctaggcttaccgcccggttgtcactgcatcggctaagcctctaacttaggagctatacagcatctcgttacccgattggggctgtttccctcatgtcccagggccttatcaccgtgggactgtgccatgagcgcaggcactcgagtttctgggattaccactaaaaagtacctcacggccaatttagaggcaaagccatactctcgggtgctgttactcacgaccgctctgaggagcctgtcgtggagggccagctataacccgatatgattggcttttcaccactttcctcaactctcctgggcatattgcaacatgcgtcagttcggtctttagcctaatcaaggaaagatcattcgggcttcgggtgctcgcattgactatctagcgcaggcgctagggcttcggttttaacctcgccaacactacgttctcgacgcacccattatgcaaaaggtacgaactctagcttaaagctactagagttctgctatcattatcaggctcatcgatctatttcactcccataatgggttctatttcacccttccctagcggtactctacactagtgctttctctccatcttcctcgtgggttacgatccccagtatagaaggcttctacaccttctagacagcgctagcgagctgttgtcaccgccacagggctaataccttctctggcactcttttcgagtttggcgtactcctacgtgagccgcaggagctggtaacggtagtcgttttgcaacgagggctcctttcgtgctatacctattcagagccctgtcaatacagggattcccctactaccgttatcgggttcgggggttctatagtaaacgtagtttactaagggacgccaattggcttttcgacattgtgccgcccatatggagaaaagcaaggggacttgcctgacaacgttctaacttacgaggcattacttcgtacaaggaggcctcggaattgaaccgagaaggccagtaccccctaacgttggggtaggagattactcctcgactaccctgagagagctagtcgtctcaa

SEQ ID NO: 60 - DNA, 1306 bp, Xanthophyllomyces dendrorhous
gacgagaaggtatgtttctgcctgtcctacctttatccgagtctaagcttcatgctgatctgccttccacttgatgtcgtaatccagactctggtccttgcgacctcgattgatcgcgcctgccggaacccagctctcatcgaagataccctcggatcactcgatgtgatgacattcatccattgtgacaccgaggcgaactgtcgaacgctcgcggatgagtggctgaacactctagacgaaagcgaccaacagacttggaggcccatcctcgagaggcaattgtctcacaccacctcagtcaagacagcagggatcactttcccatatctctgaaatacaccatctgtcagccttagggagcaactcaagtctagggtaaccaaagactcagcgttctgttcctcacgaggaacctcacatcatttctcgtggcctcctctccttcctggcttgaccagctacactagacgcaggattggcttcgacgacgatagggtggaactgtggaaacagatccatcaggagtacacaggatacacgctcgacatttactatgagaacaaaggacgggcttgcgcatgccatggagatgtctgcagagacgattgcctctgtgactgcggtctttgtcagaaacgagccgcaacggaatgcgtctgtcgtcttcaagagcgttgctattgttggatctttaacgcctgttgatgtccaatctgtaacccggaaacagaggagaggaggattgaggcagaggagaggaagctggaggcagaggagaaagcagagcagaggaggctgaagacacagaagctgatggagcttgaggcagagcagaggaagccgaaggcagatgagtggaagcttgaggtagagaggatgcggagggaattaaaaaagcagtttcaggcgcagaagtattccggggtccaacaactgatggcagctgcaaagctagtcgaccgacaacaggtagcggcagatatagatgcaatcatcgcggaagctgcaggtaaagtagcggccatcgtggaacgcaacgagacatatactgcggtctatcagaggacggtcatagtcgcgcggcagaagatctacgagggaatatcttgtcggatcaagactttcgcagagagggctgcccaacgaacgtcggatccggtcgtgcgacggcaagggattgcagtcgtgcggaacaggacgattctagagactcccatgcggctgagtctggaggctctgaagcaggagacattggagcggaagagactgtggagtgagatggagtgtatggagaaaccatatg

SEQ ID NO: 61 - DNA, 357 bp, Xanthophyllomyces dendrorhous
gaccactgcgtgccgtgctcggccagaccgccgttgtccagagacatgtcgagccctcctgcggtcgtcgagagcagcgtccgacggcctgggtccagccccacgacttcgtcctctggctgcacaccccacgagacatactctgctcggtgacggtccttgccttcgccctcccatctccatccgtaggcgtcgatgccagatgaagacgacatgagtctcagcattccggcagacactccgatgccgtccggactgagcgaccgggcgaattgtcgctttttggtctcgaccttggatatatggaacgaccgcctttactaagtgtcagagtcatcccggaaggactcttctgtc

SEQ ID NO: 62 - DNA, 33296 bp, Xanthophyllomyces dendrorhous
cctcttctctttctccttcctctcggacaggaggggacagttgctcccagagtttatgggagagggcagtgcgctgagaacgaacagatggatcagatatgtcagtcattgctgcagcctttcttcagatatctcctcagatgacttgtcttccttacctggctgatactgatccggctctggatcgtttctccgacgtttgtctccagccaccaagagatgagccgagaagcccggcgcggcatgttcaggacgacatggttctggcaggccgtggtccacgacttggctttggcagcaaccatgctgctcagaaatctacgataatggcaagtcgctcagtcttcgttcgcagtcagctgcatcactgtcatcatccaggagatcactcactttgagtctttgaactggtgctcagcagggaaagaggcgtcgcggaagttgttgagctcttgactctgtgttggcgctccttggtgcaaatttcctccacgcgtgttgaaaccaacgtccctaaaaataaagccgtattgtattggggagattcggtatctcccctccatccgcgcagaccttcgacatgtggatattgagaaggcgagacgcgtcaaatgttatctttcctagccgggcaacggccgactcgatcgggccagccagtggctcaaaggcgagtaaagaaccaaagcctatctttactgtccctgacaccatagggaccgctgacttggcgtggatttccaccctctgacgagggatgtaaaacgggcagaggtgattagatcgccttgagtgcccaacctgaccgcaggctgagcacgtggcagtagtagtagtagtggaagcagcagtggtagccgcaagggaagactttgccgaggcctgagccgtcctcttgcgcttcatgtcgaacacaagaggagcggcactcctcaaggcaactgatgatttttctgatatgaagtagtgttctgatgtgaaggaatgttctgatatggaagagtgctctgatcatctcgagtccgttgtgtcttataagctgttgggattgatgcctccctgtttatagaaaattcttatcattggtttcccctctgatgggttcgactgggtgtcggtcatgatgaacgacctggtgaaagctctatcgtccacagacagataaacagagaaacaaaggaatggtgagacagattgacggagaagatatgcttgatcgagctacctgcagctgatctcaattttctttgagcacgggtgaagagtgaatttccgctctagcgcttgttcccaatcgagtcctcactggtttcccaaagtctcatatacactacccagctgtcacagtgagatagatcgagaaaaagagaaaggcgatgaaaaccagctaaaaatttcatagctcttcggaaagagtcttggaactccgcgcaactaagaactggagggcgttgtctcaagaaggattaacaaactacagcttgaatgatgctaagactgctgaaaaactaagaaagactcctagaattacaacaagcgatgttccacaagctgatcttgtactttgatagaacaacttattacaccaggatcgtatagcatagtggttagggttggattgaggattcgcaggagtcaccgtaagcaggaaaggctttgcttttaattctattacaggcatacaagtaggcgtttcagaccgaaaatacaaaagagaggaacatctacgcagatatctcgtcctcgaacaactctaagctaagaaaagaagtaagaacaatgcgccacactttccacagaccctgaatcctccctcatctagaacacccaacgaaagactctctttccaatcttttccttgctttcgttctcgacctccagggtagacagtgtagcctcatgttcttccacttcgtccaaaccttctccaagattaatttcctctagcttggtgagcggccgtcggccgataagttttatgacagcgtagacaatcacgaacaggataggagcggcgtaggaaaagatgctagaaagaaaagatagggtgatttagttgatccgatgcgaaataactgaaagaagaagggaaaacagaagagacatgactgacaaactggggacatcccaacctcctttcaaaaagacagggtatccgttggaaatcaagacgatcgcggcaagaacaagtgcataccaggcaccatatggctgaaacattgatcggtagggtaatgttgatctatcgatcttctgaacggccatcgctctgtaccatctgatgtgtgtcgcgctcatattcatccaggtaacgatctgggtggcggtcgagatattgataaacctgttatgtaacatgagtgcagtagaggaagatggttagatgatctcgaattatcacgaaaggaggacaaaaagcagacgaccaaccactcaaggactttattggctcgatcggagcattgaagaaaactgaggccagcaaaacaaagcgtagcgatcaaagcgtatacaggcactccattcctgttagtgcgcttgaatagagcgggagcgtgaccagcttgcgcgagaccgctgcaaaggttgtatggacaatgtcaggctatcattcctttgtttctgtatgaaaatagcaacaaagtaagacatactgaagagttcgagatccgcagaagagaaatgcgctgcctgcagagaaaatgctcgttactaagaaattccgaatatgaaagacaacagttcgtaagatacgtctattcaacttttaaagcagtgcgaagcgtactgatcaataccagcgttcacaacggaacccaggtatttgatgtggagcctggtcatagcagctatataaggagatcttccggctagatgggaacgcccgggttagaaggaaggactaagcaatcatcgacgattaacagagtagatgggtaagacgataagctaacctcccgcagagttttccgcaatagcaccgttcaggattttgtcattgtagggcacgacaataccgacggcgagcgcagacccgaggaagctataaatcaatcatcaccagcaagatttggagcccaggtcggtacgctgtctgcattgaaccaagaaaataaacatcaaaaaacttacaagacaattaatcgaacataaaccgatttgaaggcactaggaagaacttttcgaggattgatagattctgatgcctatagaagtaaaagaagaaaggagagaaaaacagaagttgggctcagcgtacaagtggaagaagaaggaatataagaaggggtctgtttgtggaactaaccaccaaagacaaaaggtctggtccggcaatggtaaaagatgctcccagcaaacaggtccagaaccctcgaaagatagccgtggagttgttgccgtagtaatctgagatagggcttgggttcttccagtatctgaagccgtaggcatccttgagaggatttccaccacacattgtcacgatggtaaacataaacagtccaaaaatgaggataatcttgcctgagaatgccgaggtcaaatgagatcattataaggttgtgtatctttggcattggattgaaaaagaaaagatgatgagaacgtacagagaacgatccaaaactctgtttctgcaaagaactttgaagaccacttatgaagcagggaataagcaactatgcagagcgccgggacaattgccggatgtatttccttttgttttgtacggccgaacagagagggagatagacaaaataagaaaaggagaagagaatagaaggaggtgagctagagaccactcaatcaagaagaaagaagaagccacttaccctggaccaataaccaagggcagcatggagggcagtgatctcgaaacacagcagggagctcattgccaggaagtaggtccagccggtcgctccaccaaacgcatcatctacataccgaccagcgaatctaatgaaggacgactcgaccggcagctgacagaccatctctgcttgaccttcgttcacgctgcgttggtagcaagggaagaaaagttagagaatcagctgatcgattttgatttgctgaagtcatacataggaagaagaggaaaggcgctgaccagaaaatgacggacgtccataccaggaatcccaagagaagcatcaatggccctcccttgactgagtagatcggagaagcaagacaaagggacattaaattaatgagcgcatcgtctctggaaccaaacagacagaggctgatctcctactgagacttcctccaattgccaggctgaaggaccaaattcattcagcatgatttatgagccactacgaatgcgcatggaaagaacgggaaacgcaagcaaggacagaggagaacgaacaagacgtatgtaccaattgttccaccaatggcaagaaacctgatctgtttggccgtcatcactcttctcgtatggttcatctgtctgttcgatccaccttctagaccttcgacctcctgaacgtccaccaaggcgacgtccttctgagattttagttcatccattctgattatggggatttcttctcctattatcgaagagaaagataaggaaattgggtagaaaggacttgtgatgtgttagagagaacgactattacggatgaatttcttgatacatcgtttatatattgggaagctatctcaggccgaggaaacggaagaggcagagtgatgtccgtctatcagtatcttgatcgaacctcgattgtagcaatcctgcaggttgataaactgattagaagataggatcagattcttgataatatgggtctgttagcgtgctcggagggtgagactgagttccaagataagttcgatcaccgaacgagagggccaagaacgaacggaatcaataaagtagtgaaatactttgattatcgcttccggcgcaccgcgtacttcacaatcatagcatggggagccgtcgggcggatcggctgaacgacaaatgtagttgagccccggacttatctttcttcaacttgcgaggctcaacgtcttctctcatcttatctctctttctggttctttcgccattgcttgacgagttctctcagaggttgtgtgtgtgattgtatgaccacatgtctgtccctcgttgctgactgatcaccgttcaactctcaagccatcatcgatctccaagaaagaatcatggaaacataaaaagcaagggagaaaagcgaaaaaggtatttactttctcatccttttgaagttaaactacatgtttgattgtttttgtgtctgtctcttcgtccgttctgttgttggttcgttcgttcatttgttcgcttcgcatcggttcgatcctttgcagacacagttgctcttctgtcttcccagatacatctactcttcgtcatcttcatcatcctcctcggtgatgtgctgttctcgtatgaatgaattattcagtcagtgacatgtcagcttcgaaagacagagagaaactgagagaaactcacgtcatacaagggctggacactcttaaggaagaattccttgccctgtggcttagcacccttatcgaaccagtagatcaccgcgttatcagttaccaactctgcgtcccatgcaagctgtgcaggatataagatatggttgtgaagatgtccgaagttgacggatatgtttataggaaagaatcgaaacccccttgttagcatcgtctagccaatcttgccggacataattcaaatacagtcaaaaacgaacccggacaagagaagggaaggccttcatcgccttctgctcgtcataacagaatacctggagggtctgcaaaaagttgacctgctccattggcttcttgcagaagtttttgagcgccggtaagaagagctgtggaaaagaacgggatgtcactcaaaccgcctttcctgacatggaagtgagagacgagagaagaaagaaaagacaaaccttgacccggaggacttggtctttggaaccagaccactcgaacgtagacatgaagttgttccaaccgatcgtcaagatgtccgaggacgaaatcgaatgctcagcctgctgagacgtcaagtaaccaacaacctaaatagatgtgtgtattttttattatgagcatagaaagtaaacgatcagaatgacgctttcaattgggctaacttgacgaagagcagaatcaactcacgttctccttccattcttctccgaactcctcttcctcttcacagtttcggacaatccatcggcccatctcctccttgacaagcgcagtctgtcgcttcgagtaccattcggccacctgaggtaacccttcagccttgaaatgagcctcaacgtgggccctcgaacgctggttgacggggaatacatcggccaagtccttgaacgtggtcttgagcaaccgaagcaaatggtcggatgactgagcgctcaaataggccctgatgaacgaagtcaagaaagaaatcgacaccgctgataaaagagatttcggacaagattgagtacgtcttctacagaactgcaaggtcataatcttttactcacaatctttgacgaggtgatccttggtcagattttgaaggcactcggacgaggccatgccctgagcaataagtagagcggcggcatcagccaattgctccctctcgagcaaagaccactttgtgatgctgttgtgcgtgcagaatttacaagacaatcgtcagatgaagaatcaagaagaaaaaggccagatgaaaactgagatgctgactattggactaaggcgggcaaaacattcttctcgaggggcttctgaaggtatttgtatcgcatgatgacctttcggaggacctcaattttgagcttgatctcctccaagagagcctttgaatcatgctgagcggccccctgttcaggctcggactcatcttgctgagccattaccgagaacgttgatcgcttctcgagctccttgtcgacgtagcttcctccgggttggagaagaccaccgacaaggacgatttcgaacaactgatcggcatacttcaggtactcgagcgtcgacccagcggtgatcagctttgtggccaaggtgtcgtagtccgtcggaggaatcgggtggagaagagttaaaagagcatctcggaagactgtggtgagagatggaaaagtcaaacagattagtaaagtttggtagttgtgatgactagtcttcgactgttttccttgttttgtttgtaactcggtatgcaaaagttgcatggaaacatcaaacacagaaactcactctcgggttcaaactttgcgttcgcagcggtaacacgtttacgttgcttgatacggactccagtaagggagggctgtaagatatggttcgggtggtgatgatgatggaccaagtggatagaacgaggtatgaggagaaaaaaatgaatgagacgatcgggacgcagggccaaagggtaaaagttgagaaactgacgtaccttgttgttgccagtagcgggtgttgaggtggtaggagtagtagactaccggatgtaagaacaaagcgatattcagatgccattgcagcaaagcaaatggtttgtacatggattggtcgatagtcaacgagttagtgagagtgctcgtctgtgatccatcttaaaacagacacgaaagagagtccaacgcaagggaaacaaagcaagaaatatgaaaagactgaccatgcaccaatgagggaataggacctagtagaagaaagagagttagagagagtgatggataagagttgtttcaaaagaagcagagagtggaaccgaatgagaagaaggaaaaaagagtcgaaatgtttctgatggagtcgaatgaagagtcgacgagctggttaggtagaagctacataagactaaatgaatgaagtctcgaatcatatatatatgtatatgacgcctacgtatctcctcggctgaagcgaagttcgcctaggtgcagagagggagcaatagataccccagcataaacatccataaacagcatacagcgacaatgttgcgcttgatatcaaggaccagctggaagatcttgtgaacgagatgagatagatgagatttgtcaaagatgacatgagtgacatgagtgacatgaatgacatgagagtacacatcacaggcagcaactgtcgaatcagatacaaaggcagcataaccatttcgttccttgatcctcttctttctctcacatcgaccattcaactcgcctcgttcattcacagcctctttcggtttctccgtcgttcttttcattcttgatctttctctttgtccttgctgttcattccttcccctcaccgccaacctccttatcctctaaatagtcactgggtggtcctctgtttactcgaagtctcactctccgttccacccgacttggtacacaaacgatgtcacctccgaatcggtatcaactcttaccacactctgctcttcctagctttccaatctttggtcggaagaagcatcactcgttagcttccatacctcgggttcttcttatcctgagtctctgtgtcccagtcatcgtcatcacgtgggtcttctataaactcgccctggtgtctaatgcgttcaggacatacgagaccaacccgccggtattcatcgagcccttcaaaggcaaaggtaaagaggttgagagtagtgtaccggtgttcccgagctgggtaacttcccagatgaatagtccggacaccattctttggaacgtcaagaaggagctatctagacgatacatcgagatcggtcttccggtacgtccattactccatccgctctcaaagccaagactgtgacgatatggacataatgaactgactcctttcttgctatctttctatttctaacttgtttcccttcttggataacaccctgtacttatatttcttcccctctctaaactgacaggatctcactgttggatgcccggccatcagatcgctacgatcagacgaatcaggttatcttgaacaacgttattcccacttgtttcctgaaacagcaaccaatcctacctcgccctacatccatcaaccccagggttactttattgctctgaatcttttcaactcgaaagcggtaatccctcatctgttcagtaccctccttaccgttgccggacttcttggtccgtcaaatgttcacgtggccatatttgagaacggctcttgggatggtacaccaacgttgctcgctcattttgcaagagctctctctgcgctaggttcgtctcagcttgagttttcttttttttctttcctcttatctttttattttccttcttaatgcatgaattgaagctcgactaacttctcaatatcaattgttgctaaacgtaaacaggcgttgctcatacgattcgctccgattcgcacgtcaccgactggaataacgtcgaccggatcgctcaacttgctgaatacagaaacgttgctctcgagcccgtgttcaattactcgccctccaacccgcccttgttccaagcacacaaagagacaaacctcaccagacatccgatcttgccctcggacgtcttgttcatcaatgatatcatcctctgcccagccgatctactcgaattgttgcaccagcggcgtttccaaggcgcaagtgcaacctgcggactagactggagagaagctccagaaggaagtatgtggaggtggttgagaggttggttaagcaagaactataggttttatgatagtaagtccatcgccacactctttttgtatacttttatctatctgtgtcttgtcgactaaccttggaccatacagattgggttactcggtcaatggaaggctttcctctccggcctcgggtagatatgtttggcgaactccgggatggcgttcgtgaactcttccactgggattctgatccaacatatctcatccgatggcgtgccgctatcccgctccccgtctactcttgctggaacggcatcattgctctctccgctcgccccttcctaccacctgcacaaggtggacactctttcaagttccgaaatgggcacacagccgatggcgaatgtgccgcttccgagtgcaagctcatcgccagagatttttggggtgtaggggagaccaaatgggtgctcgtccccagggtcgcagttacttacgaagaagaagggtacaagagcgaatggatcgagaatagagtccgaagaggtggggtaccggggatggacaaggatttgaaggataggcggtttagacacgcgcctagtacggcaatgccgctagaggaaaagattgattggagtatggtcaagaacccagaaagagtcgtctgctttccttatcatgtcggagacagattagaggtttgtcgtgtcctatttccgtcttgttactgacgtttgtactcgatcaacggcgttctcatccttatcattctctgtacttgtcttttatcgtgcattcagatctggcccctttaccaagaggtatgttttgctcaaactccaaacgatatttttccatgcgtattaactttgtccttctttcttattcctctaacagggctcatcgatgaactcatcaattcttcatgactttaaccgaacgtcagctcatgtcccgtgggaagacataatctgattcatctgaccgccaacatttatcttttcaactctggtccttcctcattccgggttttatttttactttttactatttccactgtctcttctctcttcccagtcaacgtttcaatggtgcacacgtgcggatttgtttctggtcttctcgttcatctctccagggtctcgattgtcatgcttgttccactagccatgttttcattctatatcaacatcttttcttcctttctatatatttccctctcgtctgtctcttcttcggtcaaaaaattccttttcctccctttcgtccttgttccctcctttactctctttgtgccccaacggacgagatatctgcttttgcccctaaccatttgtcaattagtttcttctgtttcttcctgctctcttgatcacccggtcacctttttccttagtcgacgaaataaccttcttacgactgcaagcgtcctctatttatccccctctttctgcaacctttgagaatctaaacttcgtcttcttttcttttcactgtaaataatacctttgagttttgaacccggttcatctgattgttagtttgcaggcaaatgacaatgatctctttcttcttacctgctccgtcttgcctctcgctctttcctcagaagcccaggcacgcgcctagtgttataatagacatcacatcacggcgtaaccaaaaacttgaacagagaagaagagagggatagaatggagaatcaacctccaaacctagctaatcgaagagctcgaagttgggcgggtgtcaattctggttcgggtgatggttgtttggttcctcctccaccttcaccatcatcaaaatcctcgtcgtcgtcgtcgttgtcgtcatcatcatcgttgtcgtcgtcgatgcgatcggtaggtttattgggttggctgagctgttcctcctgcggttgcggtcgtgacgggaactgctgttgggcaacgagaggggggacgggtaagacgaaatcctgaggtaaaccttccatcgaagctttcaacgcagcctggagctgttcgtcctcatcatcataatctctgtctctctggtcatttgtgggtcccccgaatggtgatggtgtggacgtgaacgtggatgttgagaaagtagtgggagggtcggaaaagatatcggcgtggtcgtcttcttcgatttcttcatcctcatcctcatttcctactagtcctacctcattctcatccgcatcgtcgtcgtcgtcttcaacgtccatcgcatttcgagctcctctatttgctcgggcagctgaacgatctcgttcctcttgttctctgattgagacttcgatcgcaagtctcatcatttcctcatcttcatcatgcctcggacgattccttgtctttgcactggtccgtccacttccacttccacttccactggatcgtctgaacgtagaagatccaatctcgcgaatctcgtcatcatcgtcatcgtcgtcgtttatattcatattgactccgaccaagttgggaagaggagaagtcgaagaaagcgcgcgtccgaatggtgtttcgagagatgacgggtcggcttgtcttctccttctatttcctctggatgtaccttctgtctctgactctatttctcgtgatcctcttctcggtgcgataggtgttgtgatgttgagcatttcactaacatgattagtcgtatttggagggatgaacgagaaggaggacggtggaaaggatgaagaggggatgtgggtgtcttggaaagcggctgcttggtcacgctcgaaagcagccatggtagcacgggcacgttcgagagaaatttgaacagggtcggccggatccactaattcagatcctactatgggtggcctaacaatgggtccaggagcagatggagtagtattttcaggctcgacgttggcgagcgaggcagcaagggctgcttcgagttctgatgcttcgtctgtcaattggcaagaacaaaatgaaacaacctcgagttaagcattggcagaactcgatgttcagttatgaaaacaggaaacaactgaccgtcgaagttgccatacgctccccagtcgacctctccacctacgctggtctttgaaattctcgagtgagtcgacctgtctgagccagatgtagcacttgtggctatcggaagagagactgcaaatctatcggctgctgagctttccaaaaactcgctctgaatagaagatgacgaagaagaggacgcagaagaacgaggtcggacgacaaaaacagagtagcctgtccatactcggggaagaactggttagatgatatgcttagaaattgtaaagtgtactgagtcataccttcagactcggcttggtttagaaccattgtaagataggtaggcgacacccctgattagacagaagcagattcagtcaactatcttcactcgctatctcgcatgtgagagttacaggaagacacatacaagcgggttgagaaaagaatgaattcaagttgtaccacctatcctttctgcctccaaaccggcgcaaggtaaaccagtgagagtctaggtttaggatgaatgcctgttgatctctgggaagacatagctttagataagtagctgagcgaccaactcgaagctgaacagacaccaatgcttactctggacgatcccaatgtggccgtaattcttcactacgccaacggtcgagactgagctcccaaacctcaagtcctcgatctagaacttggacactgaagaagcctataacagcatggaatcgcgcaagacacgtcgacgacacgatcagcattcttgcttaataactgttctgacgcatgggaccctcgcattccacgcaccagtgtcatccatgttgactgattcagagcgtgcttgactcaaacgttcgttttcgtcactgtccaactgaagagcgattgaggcaagatcggtgggttcaaaataatgggactgtagaaggttgttgagagcatgctctgtagagaaacatcagcataggtttgtgcctccgacatgcatgaaagacttgtcggaaagttgatatcagaacagaggtcagaaaacgagaaaggactaacggccacacatgttagagccaggctcttgggtctcgtgaaagatacctacacggacggagagaacatgaacagagattgatcagattatgaacttgacagagatatgaaatacattcttacgagatacaagatccatgatggagagaccgcgatgaaagttatgtgatggaaattgataacgactgtattcgctgtggtggtggggaagtatgcagatgagagatcaagagacggattcgtggaaggttggaaatagacagagtaagatcttaacgcgcttcatgtgttaaaatgatcaagcgtctgagatacggattaacacgtcggcttttttgtgctacgctcgacgcgtttaaggttatcattcaaatattcatttatttatctctatctcattaagtctgttgatcctcacacgaatatggtcaatctatttctctgtttgcctttctcttgtccatccatcctctccttcttctttgccatcgttctcttgttcatttctctcccttccagttgaaaggcttcattcgagacagcctggatcatcagtagcatacgtcattcgttaacagtttttgttcttttttatttttgtctggcaagtggatccttcttttatcacatttgttcctggccaacattcatccgacgctcgttgtagctttgctgatcacatacatctctcttttttctcttcttctgcttcctgtcgactctctctttttgccaaactacacttgatatcggtttgcttggacagatacagacgttcgaccagtctggtcgaaaacacaacagtatcctcgatgtcgtcccacctgaccccccggccatcccggctatcgggaattccaaccccaggtcgagtctctctaggcggatctggtcttccaactccatcaaaccggaaggtttctttaccacccccactacctaaccaatcgtatcaagcatctgaggataagactctgtcccgggctctctccgatgctatcaggcataaccctcctccgggttcgtccagaaacgccccatcggaggacacaatttcttctcctgggtctcaatccttcttcaatagtaacaccaatagcagtagcatcagtggagcaagtttaacccaaaccccacgccgaccttcatcttctgcttcgtccaacagatcgtacatgggctcttcatcagtagcgctgccgctgccaagaaccccaggcccgccggcacttcggtcgaccggatttccctctacccctacgcccggaacgtctggaatggcagcccgtgctggacctaggaagagtcttttggccagtagtactccccgaatggaaagcaggcacgaggccagaccagggtcttctctgggtactgcagtgggaggtaagggaccagcagcagggttcaatgtcggagacagagtgaggatcgacagtatgggcatggagggtttgctggcttacgtcggaaaaatcgatggtaagccagggatctgggctggagtagaacttagcggaggatttgcgggtaaaggaaagaacaatggaacagtcggagagtaagtccgttgaatcattttgagtgatagcgtctctcacaccatcgcgaaactaactactattccctctctcttacttgatctgtacttacctctagaaagcaatactttacttgtcccgaaaactgtggtgtcttcctacaacactccaagctctccgccccgactacgactggcgcacatcctcctcgaccgtcttctgttgcatccaccagaagttctatccgaaccggttctgaatctggacgctatactccgtccatctctggtcggtctaccccttcggtttcaggtagggctacgccttcaatctcaggcagggcaacgccctcacaatcctccagagtgttgacggcgaaaaggtcggaagaggagaaagagttggaaggaaaggttacagctgggagccgcgcgagcaaatatctaggtgagacgtgatataatcatctctttatacttcatcttctctcaacatgtttcttgcggttaggctcgttcttacttctatcgccttcttctttcgccttcctgtatgacatatcaaggtatgacggctaaacagctcaaggatcggtctgcctcagactcggatggaaaaagcgatttcctctctagatcaacaacaactccccgagcagttagaactaccggtctcggccaacctaccccaacccgcgcggcctcttctcgtcaatcgctcggcgcctcgtcctcctcacatatcacccctggtcgactctctcgctcaatcacaggtggaccttctcgttcgacgcctacctccgagatgcctcctccaccatccccttctaaactcaaagcaaatctagcagcttcagcagcaacgacatcgtcggtatctcatcgaccgtctagtcgtcaatccgactatccttccggcagctcccgatcgtcctccagaatgtctgatatcggtcttaggccgatgacccctaagagcgaagcgattgtctcactcgaaacgaccaacacgactttacaagataagattgcaaacctgatgcgatcttcgtccaggcaatcagatcattatccagattcgcctggtaccggttggggcactcaaacgacatcacctcccactacgcgtacaactaactccactgtctcaatggcaactccaacaggaggaaaagtcgagccaaggacagaggaggcgtggatcaagcaaaagactcgaatcgatcaactgctgatcagagtagattctttggagaaggagaacttggggttgcttctcgaacgtcaacgatctccagagccctctctgcatccttctaacaacacttcttctcagtcaacgaacaaattggcatctccaggtggcggagtagacaatgcggccttgatggcctctctggaagcccgagcgatcaatgctgagcgtcaagtccaggcgcatactacccgattgacgatccttgaatccgaattgtccgccgctgctcaaacggcacgaacatctcaaacaacaattgagcagtttgaacagaccgctcgtcaaatggaggaggatcgggccagagaacaggccgaggccaaggccggattgaaagatctccagagcaagttggacgacaccgaggctctggtgaaggggctgaaggaagcggccgaggtcaaagaggaagggcagactcaatatggcgcggaggtccaagcaaagaagaaggagattgagatcctgcagtctaaagtgacgagactgggaggtgagttggctcaacagaagagtgagttgggcgcgcaaatcgacgcacttcgacgagcaggacaggtcagtcttttattctcaagcgtcttgaagatgaagagatgtatgtgatgagaaggctgattgagattgatatctcgaacaaaatcatgatgaattcaggaaacgatcatgctctacgaagaacgactcaacgcggctgaatccatgcggcttgacatggagagcttccttcgatttaaagaagaagagcttgctcgatcaaaccagcgatctgcttcccctacttcctcctcacaaccttcgagcagagatcccactcagaaagtgatcacagcgatcgagattgacaacgagaacttgattgaacaagtgactcacctgaaccgacggattgcctcttttgaagaacagatcgaggagtaccaactgcagatcgagtcggatgaggctgctgtgagggtgaaaactgatcaggcacttcaagtggagaaatctctcagaaaagagttggcggcggcaagaacgcagatggaaggtttagtcaaatcagagagaagcgcgaggtcgggagtgacggacatagaggaggctctgagggagaaccacgtggctttggagaacgcgagaagtgagatagaagggttgagagccgagatagctgtaagtgaacagtattctctatcaattgttttcaagtcgatcagactcggttgtttgttaaaaaccatttacatgttttgctggtttcccgatcccttatcttgtctcatctgtagaacctggaaaattctcaaggcgaatctcctaatctagatagaaccgaccgcgttcaagaaatcgagaagaagttggcaactgaccgggcacggttcgaagaggagatcaaacaactcaagggtatgcttgaggaaattagagcatcaagaggtgaggcgctcgaagcggctgctagttcgagattggagcttgagcaacgaacgggtgagatcgaggaacttaaagaggtgagcatcttgtcttttcgtcccttctacttgcgttttttagagttcaacttgattcgagagcttaatgtctaattgatatctgatgatctgggactcaaaggctattgatgcactagaggcaatggttgaggagaagattatgactgaagaagatggtctcaatagagagattgcatcagaaaagtcgacccaagaccaatccgagcaattgatcgagttacgtagagcgttggcagagtctcaggccgaattagagattcaaactcaaaagcatgaggttagtaatactcgacatttattaattccaatatcgagcgagaactgattcttctccttgatcgtcggtggcaacgacatcttcatagtctgagttcaacgatcttcagagtaaggttgcagaaattgatcgtagaaaccagcaggaggttcaagaagtaagcgcacaagctttgttcaagtatgcattgtaaattcttaaccgaagttcttctattctctatataagctcgagaaccttatcgagtccaagatctatcgagaagacgagctagagagggaaatcgaggacctcaagtacaagctttctcagcctagtaaatcaagttcgagtgggacgcactcgcgcaatcataccggagaagctcagactaaaaagctcggtagttccgcctcccgaaatggtgatgcactaggtgagaattgacatgtcttatttcttattctcgtatcttgattttgatggtgaacggtgtcgagctctaactcttatctctggtttttttctgaagaaacttgcgagttgtgtgacaaccctgatcacgaaatccaagactgtccacgtaggtcctctcatttactctggtttgccctttagactgaagccgcaacagcaaagaaactccggtcacttacgagatatatatctttgcaaaaactttgactcagtattcaatggatcttcctcagcgacccactactctcctcggtcgtcaaatggggaagatactgccgattctgttggaaagtcttcattgccttcgttcaagaattctggacttttggctgaatcaacggacaatagaccgtggtgtgacgattgcgagacgtttggtccgttcttccttaccccgttcatatttttcctcatgctcttgtttgatctaggacaccatctgatttctgttctcgaaacatctttgcaatatggcatcgattctactgaatgcaatgtaggtcatcccaccgaagagtgtgaatatgctcaagagatgttctagatatttatatatacacatacatgcgcgtgaaagagatacccattctatctgagagtatgtctcctcgtctgtctatacgttatggtggcatacatcgtttcatgtggcctctttctgacatttggcctctttcttgctggctggcggacttatagaccaggggatttctctggatgatcaactttatgagccattattccatttgattatcgaattcaatatcgtcagataagagtaggagaagcgagcctaacaaaactccatgatgaaaataaagaagaaaggagagggaagtaaaattaggagaatgaatagagaaatttattcttagtgttttcctctgaaggagaagtgtttgtgaggcgaagacccaatgatcgattttctggaagcatccactgatgaaggcgatccgggaacaggtggcgggttgttcaaactgtttaccgagccgttggctagtttcatcgaagtgaacgagtgagatgctccagcgttcgatgtgaattggcggaactccaatcgaaggaagatgactccttgtccctcttggaactgccaatgacgattcaaaaaagagggaaggaagaacaaaccagtcagaggatacaaaacacaaaaaggatgacactagcaagagggatttcttacttcgactgcgactctgtcggccgtgggcgcagttggcgagataaacttccagatctgtaaagatataagagcgatcagtcagcatcaatcactcttcatattcaagtctgattgaatgagataaatattccttacatcaacatctgcgacgcctaggactctgcccttaccaatagccttgtgctctgaaacggacaaagagattcggctgatttctggggtgacggagaacttgaaactctcattcctagaagcgaatcaatattgctttgtcaaacagcacacacatccgaaaaattatcaaactcaccattcgggagagacagacttgtggtgtctcgtcttctgagtctttcctccgacactaagagacacttcagccttcacttcttccgctagatccttggcggacaatacggtcacgctcagacttccctctcgaccttgtccgttctgggaagcaaaatcggttgaataagtcacgggagaggtgccctccacggtctcagaagtaaatcgacgagggccatcttgaatgtcggaagcatcgtcgacagggacctcgacaagctagataagcaaatagatttaaggctgaattagcgcagcttcaaagatctcaatgacatatagaaagaaacataaactctaccatttctgaaccattgtctgtctttttcttgaccagaccaatctttcgaccagcgaatcctccaacagaaccaacgccatgtccgactaaacccacgccctcttttaagaggaaagagtgaattgtcatgagcataggacaccaaccgactcagagaatgtaaaagtatttactgaaagctgtctttccaacacctccaacgatagccacaggcgcatgtccaacctgttttaacggaaggataagataagtggaagagcttaatttcaaacgcacagtctcagaacttacattttgaacagctcgcccagcggtagagaatgtggaggtgttctgcgtaaccccgacgaaacagaaggtcagtttcttcgtctaccatgaaagttcgtaaggatcaagaaacaaacctttcgagctctggcgatgaccgcaggttggaagaccaatcggattcgaatactgccctgctcgccgtgcttgacagtcgatataggaatggtcgcttccaatgcttcgaaaggttcaataaccgcgagatcgatcaaccctttacctaaagacttggcttgctcaagttggttccagtcaaagatctcaacttcgaacaaggctccaactcgagaagtcacactggtttcgaacttctcgttccaaacgggactgagagtctttttctatattgatataacatgccagaaagagcgatatatcagcattaaaagctcgaatgtcgcacctatcgaaggaggcgaagacaccgtactttaacttcactcttgaagaccttttcgccgttactgtaaatgtaaagtatcgttcagtactaatgctgagatagcataagcagacgaagacaagaagttgtaagaactgacaggttgaacacggcgtaaggatccgactttccacttcgatcggcaccacgaaggccgtgaccatcgatcaactcgaccttcaaaagacccatgttgttcgcgctctctgatttgtcacatacaaagggttagagttggaaatatagatatacagtgggaagaagactaacctctgggctcaagcacaacatcgacgggcgcgtacttggcgcagatcttgaccgtgctctttcggcccgatccattagtagagatcagagtaagatctccgggagtatcctgcatataaccggaacgagaatcgtcaagatttttggcagagatgcgcgaagactgcaatgagacataccaagtattgtctgagaaatagattcgatagtcttgtgagcggatgcacatatctgtataagagtgtaaagaaagaaacatactcaaggaagaatctggtatccaagctgatttctgagaagatatcctctttcctgagacacacgaaggaaaagagccgtaagccacggctgagcatatcggagtgagcagcactagactacagcgaggcttacttatcgtcatcgtctccgttcaatctgaggcaaattcgaccaaggtcgagctccttgatctgttaacgcaaagtatcgtgaggtcatgtttctaagatgtagtgaatataaatattacagcgaacgtacgaaggcttcaccgacaaagtcccatgccgccgtggtacttctagaataaggagtagtgaactgatgtatgtcgaagtcaatcagtaaatgacatcgatgaaaactaaaaaaactgaacgaaccgatgcccaatagcctgtctccaccaaaacctccagtcggcccttcttctcgagttgtccagagacgacttggatgacaaggagtccggattctagattaagacataaattttcaaaggctcaaaaattagacaacgaccaggttttgtagaaattcagagtgaggggagagtcttacgggtattcaacaagtcctgcctagtcatgaccactccagtctcttccttctcgttagcagaaacatcagcaccctctgcagcagtatcgccaacagcattcttcacttcagagacgtttggagtgataggactcataggactggagggaagggatacgggggaaggatcgtctttcttttcttcgaatgaaattccccccttgaggcttacggcagagaagaattcctaataatcatatagaaccaattaggtcgattaccgatggccggaaaactaatactgtgacaaacggatgatacaagtggaaaggaagactcactacgtcgtagaatagatcacccttgtaccctcccttagacaactggatcttcttctggcaagacttcctaccgagcgacacgtaaggagttcgaggatcctgactctgtgtggcgtattctcgaacgtcaacctcaaccgatctaggcgattttgtttattgtcagaccgtttccgatcaatgcaaaaattagaacatcaatctcatttcaactctgatcttgtgaagcgagaaaaccaacgtaccccaaagaccgatctttggtaaggttctggtaatccataacttcgagtgtgcatcgctcagaaagatgatgcactggaacatatgcatagctgtcccaaacagggttaagatctatgtggcgaaaaaaaagttagatgtgctcctaaccaccatctctttggtcaagaagagaatgaacatactgttatcgacgacttctgttcgggccaatacgttgccggcgctcaaaactcgaacataggggtccgatttgccgcccaaagtcgcttccacattcctgtaatatacaaacatcgatcagttgggttgctcgcgtcggagaaagggcaaaaaggcctatccacttgacatcgacagctttcttgagtaggatcttgaggataccgataggaggaacataagcttgaagggaaaggtcaataacagtttcaaaaattcacagagttagcttcacttgtcagaacgaactgggcagtttattagcagtgaaaaggaaacaacgaaccagctcctccgttcaaacttccagccatacccagaggtttccactccgctgagattcgaattcgtcccgttttggcacccttgagagggaaccagtcctgctgcttttccttggccatgaggagatcttgaagggaaacagtgacccgccctaacgttgggtccttgacgaaatctcgatcgtcaaccacagcaacagtcacgacggacgagctcttgtccatgaccaaaaactcggtagacgactcccaagaaggggaaaagttgtttttgaatacctgccatgataaagtagagaacagacctcactgatcagtaccctccatgtagaacagaaggaaagtttcaaagagattacgaactcctgtcttgtgagcggcttccttggaacctccaatgaacagcttagcataaggatttactccacctggcatcagaattttggatccatccagctccttggcctggtggatggtcaatcggcagatacccgtgcctgataggagatgatacaattgagtcaatttatcatctctatgaatgttggtgctatcttaaactagatctatacttacggctatcaggtatgacgtccaaagtaccgtcggcgagtttctcttgttgaagaaccgggaaaaagtttctgagggacaggcagaatttcaacctatcagcaaagagcgcctcgaacatcacgtctgaaggatgaaggaggtggatgaaacatacgcatcaaatcggagctgacctcggggtcggccttctctcagaacgttcatcgagatggcttccatggtcgaatcctctttcagtttggaaagatcaaagtcaaccactcccaaatcgttgtccttccggctacagaaaacaaacaagcagaccgaatgttcttagagcttgctcctgttttactcggtaacgtttgctcattgacaaggtacttactgctcattgtaatcaaagacgtttaaggctaaactatcattaagactggaaaccaagatatacttggtctctccccactgaggattaccggtactcgaccttggtttggtcttcgcgacaggggccttaccggccacagcgatcgtgacatactaaatcacatgagagaaagtacagaacgtatcagccgttttgtcgatcggtgtgtaatcgaagatcatacgtacgggatccggacttccacctccaagcttggtaccctccaaccctcgagcagagtgaatgttgagctgaacgactccaatggccgagtctagaaaagaaaaacatatcaagtcgatggctttgttgactagcaagaattaaaagatgtcactaacccaacggagcgccggagagaagctgctcgagattgagagtgaaaacatttggatcgtacatctgtagcaggtgacaaggcgagcatgtaagccggatggaccactttgttgagttggaagaacaagtcgtgcttaccattggtccgagattagcgtgcacctgatcacggataaagctcgagagcccaggaatctacaaatgttccaagcgcgagattgggcgcgatcagcgtcgcgcaagaaccagagcaactaggacaaactcacgctagcaatatcaaatccgagagtttctcctccaattggtttcagcgcatagtctgtatatcaatgataacgagaacgaagagaaccaataatctatccagttctcgtgtgaaggaaggaagtttgaaaagtcaagaaaaagagaacaagtcagtgtacgtaccgaacatgggcttttccaaaaaggacatctcgacaagttgtacgtgagggaagttgttcatcagtttaagcttgattcgcatgttaccgacgaaagacatatcctcgagtagaacagggaaaggagctgagataaagctgtttgaggccgatataagatgagcaatgcgcatctctctgaactcaacagatgaaaagaattgacgaacccctttccgactttaatctctagaacaatcttaggatttgtctggaaagcctgttctcgaggggtaatatcactcatatcgttgggcgtgaaagaaagcttccaatccataatcacaacgtcatcagctgtcttggggaacgttcggacagaatcaattcggggagctggagatccgagcaaaaacaaacaaactggtgtgaatattctatctaagcaaataacacgtcgatgcggatatcggagggcatacctttgtttccaagagtaaatgtagtcattttgatgctctcgattcctgcaattgcggtgttagagagaacagcatccacgcttgccacgattgtcgaacttaggacaggttcctatcattcatatatgatcaatccacagacgcgtttagtagacagttgaaaggataattcaaaataaaagggacggactaacgtagattttccagaatcgatgtaagaagttgttgatccagtcagcgctctcggtctcggtgatcaacctagttttgacaagctctctctgaatatcatcccttgcggttttcctaactcgggtgatagaaagctcgtaataggtcgcgcaaacagccagcaagatgatgttccaaccccaaccgagccgaaagatagcaaagaaatgagaggtggctacggcaaaaaagatgacacctgcgttgtggtatgtctttccgtatgcttgctcagaactgtcaaaaagaagtgaaaacgcgtccggtttagtacgaatgaaactgtcaattataaggacaaggaagaggaaaagaccttacatccaagacgctaacaaagacgcgtccgcgcttccaggctgagcatctataccgctcaccgctctccatccaatcttgtactgtcgttgttgttgtcatccacacggcgaggacaatttcagattccttctctgcagtgtaactaagaacctaaacggctatgaactcacccagtcagggacagcctgtaacggcttcgcggggatagctccgggcacaccctcctgatggtagtcaagcccaaaaccacatgttgtaacaaatcagtacaggtctagttgaggattatctaggcaaccggagaatcctgctaacttgtccaacaatctggtctttagatggcgcggcgtttgctttgccgttggttttctcgttggtggctttgtccaagtccttggcagtaaccgtaggaaggggtgcagggttcgagccgtcatccacggcaagctctttagtagaaacaaccgaaaaacaccgacagatgtcacggatgagcaaacaaacagatgatccggataggagtgtacgattcgcaagcgaaaagaatcatagttggtcaactcggtacgcgtcaatagcatcataaactagaccgaacaaaccagtgactgcgtttcctttgatcacagcagacggttgaagtccgtcgagcgtgttcagagccgcccgatccttcccagctgctgctttcttctcggccgtgctcgcgtcaggatcgaatgtctgttggagatgcaagcgatgcgaccataaggatcatcgatttgttgaatcataagaaaggaaggcagtcagttcaaggaaaccgaccggtgcacacggtcgaaccaattcgtcttctagcgaccctcagtcctgtctggaacgtgtcctcgattgaaggctgcctgatttctgatcgctcgtcttgatatacacaggaaatcgcagccataacatcatcccctaaccggtttgaaaatataccacaaaagagaggtgaaactcacgtgaacgggagtcccccgagcctcatcgatctgaacgatctgagcctcggtctgttgggattttggatactggttttcggcaggaggcaaactcatttacctgtagagagatgtagaggaactggaaaggacgcgatgaggtttgttgtaaacgagaaggatagaaaagaatgaaaaaaggaggggacggcggttaggaacataaaaaggaggcacgacggcgggaatgtgatgatgagatctttcaacgttagtggcttatcaaaatctctaagcgcagcaagaagaattttggctctcgagtccctgctccggctttcgccccggccagccgatcccgcttttatatcgagcgccgcagtactttgttccggctggttgcgtcggaagtatttgagcggtacaggcctttgtcactttccttgcgtcaaggcgaagcgacaatatgaaccgcccacaaacagagattgataatgctggccggctcatttataactccgtaacctatccggacgtatagagcgtagatgagagatatgtatatagataaccggataacggataacggcaatttacttgacggtatcgaagcgtggtacggaggtcgtaaagaaagaaaaggcataacaagctactgtcatagaccagaagcgcagaggtcgtcaggagagtagaaggaagaaaaattgagaagtccataaggcagaaaacatatacaacaagaaatatttgtctagaaatatcgaggagaggagggactgaagagaaagaaaaagaaaaagatacaaagaagggatagggagataagacgagatggaaagcatgctaaaaagattgcgttcctctagttatgaatcgttcgtctcctcctcaacatagcgcctcctccgtcgtcttcacttccaccatcagtctctccctcatcgtcctcatcctcatctcctagcccgagcgccccttcaactcccacgcttgctgctcggcctctgccactagccgtcctcggctttgtctgttttccgtcttgctgcctactatgtacaaagccgaggccgactccttggaaacttggaatatcttcctcgccgggcgtagatggaggagttcgttcttgggaggaactggttaggtccgagcttggcaacaaggcatgacgctcgccgggggtggtcatgtatgccggagtcgtcgcacccgagtttgagggcgaaggaagaacagtataattggtcgatagagaaggaagagggacaaccggcgaaaaaactgttgcccagtcaaagtcaaaaagataaacggctgtctctttttcctctctgatgaaaatgtgatgtcagcaagagagaaagcgcaccgaattgagaggaaagcttggttcttcgagaagatttgtctatcttttccaacaccttgccaagcacgggttcccctacgcccgttagacctaggcctccagcaagttcagagtcctccttgaagacgctcaccggagatgatgcaggcgttaatggcagcgttgaactcgaggtcgtgaacgtcagaggcttctccagatcgagagcactagtagtagcaccctcaggaagcgaggcggtagtcgtggtcttcgggctctgaacaggaactcgtactcggcgtgttggctatcaaagaggtacaattgtaagattaagtctcttagatgtctactaactaaatagtactaactatgcgcagagttctggttagaagataggcgacaaggtcctatcaggaacagcacacgtaagccgaaggtcagtaactctattaaaaatccttgctacattcacatcagagctatttgaaaacgtgcgagagatcatactaaccagaagaataagaaatgccaatggaccagagacgaggcaggctaggattctaaaagtaaaacatatccattctagcagactgctagcgaaaccggtcattattggttgcaacctgccgagggtggtttcgtttcggagcacggatgaccatgcagtagaaacagtcgaactcgggtcggaggacacatagtgtagcaattgctgatgagacataagttaaggatagagggagtatgaatttatacgatgtgaaggaggggcgtgaggatggtgaaggctggtgatgcctggaacgactacaccgaaaactcccaacgaaaagatcgaactacgcagaggaccggggtttaccaatcgaacattcaacgttggagaggtgtatgatttatgtcagaccaaaagtaaagattgatggactgaataagcggtaggatgaagttatcaatggtagtaggaacaccagatgaagatggtcctcaagaagttcaaggaggagagacaaaagaagaggatgcagaagatctaaacaaaagagaaggcgtgacactggttacggctaagtcgtaacccagcgaccaatcatcggggccctaacgcctcaggatacaagcgacatcttactctcttcttccatctttaagtgctccttccgatctaatccatccatgcctcccaagtctgcagatcctaccctctatcatgtggcctccaaagggtctgtatatcctgtctttgttactgatcacatgggtctgaacgacggcaagagcgggagttctctaagaggagagcattgtactgactcgttgcatctatctattccccctaaattatatcatctccatttgacttctccttgactctttcactctactagattctggaagaaacttcgtacgtatggatcaaataagtaagctgtaaagatatcttgcatgtcaactgatttgggaatctttctttctggttgtgaccgctccaggtgacaaaaccgtgatcaaccccgagatctctaccggtctccctattcctcttctcaaccgataccctcctcctggatctcgcccagaaccttacgcggttcctgctaccgctgctagtgaccctgcattcaatcctgtaagttctcttcacatctggactcggttatgcagctctcttgggattgactctgagcagtccatgggttgagtatcatgtatgctgacttgtcctcttcctcttgttcaaacgcacatagtattggaagcgtgatgtacgtcttgaaagattccaaacatagtgatcttttaaagccagggctcatcggtcgcatatgttgcatcttcatgtttctgttccagactcgccgaaactacccagccactagtgtaatcactcaatcgtacctgaccaaccttctcctcgcttccccagaagggaaggctgcgttcgttcttccttccatctttcaagattcttccttctagttcgatgctttatcgtgtatcgcgttcttctacacttgcatgagtctaatttatcccgatgttgatctctattctaggattcctggtcccgactccgctcaaaagactgctgtgactgacaaggtcgagcctgagcagactgttgttcacaccctgcctgccgtcgtcagtcagattttcgaggtcagcaagaagaagacgtacgacgagtccaacttgcctcctgtgatgcctgtacttaaacggcacgcctttcaacgggccgcggatcctccgcaaaatgagtttgactatttgccaatgtacgccaaacttatttctttggagatttgtgctcaggccatctagcgatcatcactcgtgccgatgttgacattagttatctttccttaacacaacaggcacttgcacaaatgagaaaagccatctggctatcaagtgattggcaaacaaatcaatccttgttgttttcttcttctctttttctctttcttatcttgtatcttcttcttctccttccattgaggtacattttcttctcctccttttgatcttgttgtgttggtctgtttgattgtttgttgaaacttttattgtatgtcacttctattgtctcccactcttttctctatcgctactttaccccagcgagatcatcaccaagcccccatatacacgtgtacgcgcgcgcaagagcaaggctatgtgaccagagtatcctggttgtatcaacgtgattctgcgggactgtttaattcatcaactaggtgaacagatgggtggataaagagggacaaattagatacggcaagacagttgaaacgaagtacatagagaagcgattattgtaaaacaagacaagagtgccatttccaaaaacaaaaggtcttggaggtttttacgcgtacttttcttggacatatctcataaaagagagagagaaaaggatgtattcagataagctgattagtgaaaaacgagaaagagctggagcaactacaggaaggggtcctcgactcggctctccaccatcctctgaccttcttcgtttctggacaaagaataagagaggaagaatctacatcttcgagcctcatactacttgaatcctgatccatcctccttgaccaagccagcctgcccgatcaatctcaaagggatcatccttctctttgaaatctctaatttctcagtcctccattcgatgttcgggttgtcgtaccttctaaacgtttcgaaatgagcgggtacttcttcgcctgtttcttggtctctgacgagtgggacaagatcgatgggccgccagtcgacttgcgcccaacaaaagccggagacaattccggtagattgaactggccggtcgtctcgttggtgttcatgctgaccgagatcgggttttagtttggtattagtcgactgtcgttctcgagcaattgtattccccttccttcgcttagtgctatagaagatggcttacgtcaatccattcaacttcatctccgactgctagatgcaagacttccggacagatactctctctgcaaaatcacgtcccaatatcaaattcccccgagaaaaagaaaaaagaaacagcacatgcgtgagaagcagattagatcctatcttctttccctcctttgtagagcatctctttaggtttgtacactatatcgattcgctcttcctcgaagcgaacacctctctttcccgctaccacagttacagatacacagacgtccatacaagtccgcagcgatgaaattataaagctcacctcttgtgtttcgcaagcgcctgagacttttgaaaggccttcatgttcctatactgagcgttctgagtacttatagtatcctgagaatagaacgaatgggcgaaaatatccttttctccatcgactgtttgttcgttcgttcgtttggtgttcaccatccaaattccaacgtcatttatatattcgtttgttcgttttgtgcattggattttgtttcaagaaccagacgggaaagaagtgaacggaaaagggtgaaatgacaagagaagagaaagaaggaggatgagccgaaataccgagcgaggcgagaccacctatgacttaaaggtgacaagaagaaaatacgaacgagacatcgtaaacatccgcacacctccggccgagactgaacgatacaccgacatcgataccatcaacgacattggcggtgacgacattgatgtcgatagcgactgcagcactcttgatcgacctcctatgagctcgacggtccttgatagaccaagactcgaaggcatcaccctacaaagaaacgacatgttctttctttcgtatcaatcaacgacgtcgtcgtcaactcagcgttgttttagttacggctgttggttggtttgaagtgggggtgagctcgatgtggagaggtatcctgatgggatgtatgggcaagatagaaaaacaagagattagaacgaaataatgacaagatcgtccgcgtcacacaccccacaccgtactagaattatgagcgcagtgatatacgatatccgtcaatcagcttcagagaacaaatcactttcgaggggtagagtaaaacacatggtgtaagacagagacgtctcaagccaaagtgagagggcataagaaagtgtgtaacgtgagtctcattatatattg

SEQ ID NO: 63 - DNA, 8491 bp, Xanthophyllomyces dendrorhous
gagtgcaaaaaaaagccaagtgatagtggcaagtcctaagaaaatccgaattgatgtatgtgatatgggtatcgttaaagtgtacataaaaatgaatgggtgaggtaaaacggacgagcagatgtacacgtccggttatcaagcttgtatggatgttgaatggattttgttttacagatggaggcaatgataccgaggaagctatgcaaacccaaacagatgaaaacaaaactgaagattggacaggctgaaaagcggaaatggtttggagaggttaccgaaattatgcggtaggcaccgaagggataacgtcttgcatagattctaattcctgcgctggtggaccatcaatagatatactcgcagatgatggtggcggtggcggtggtggcggaggcggctgcggctgcgagaacgtagcgccgagaacaggcgtggtcactgtcggatgctcgggagggtctgataggctttccggtggaggaggaatcatctgaacgccccccactggggaaggagcgttctttccacgaccgaggacattgattccgtcgacctcgtcgatctgtcggaagcaacccatgtctaccaagagatcccagatctttgccgttttgttaacgtcaatcttgatcaaccctctcgcctctcttctccttaagtttccgcctcgtctggcatattccctgaccagcgtctctttgatcatcaggtagggcttgggcaggatccttaatgttgaacacaattgttgttccgcgggattcagcaagtggagtgaggccgaggtagcgagattgagtggctgaggcggcttgcgcgtcccgttagccgcaacatatggattcttctcctttttaacgacctcgacctgactggtttgtcctcccagcgagattcggttcgctccgccacgggcagacttgacgtcttgtaagcccgatgttcggctttctaagaggatctcgtaacgttctgcgtcggcaacggtggtgatccctttggaccgatatgtttgtagctgggatatccgcgttcggaggctttgttcatatatcaggccttcagagaagacctcgaaatcctcggccgtctgtaatttggcaaaaactttgtatttctggataatccccttgtcctttggtggtcgcttcttctcagcagccatgatttttttgtgttctgtaagtcctctctggaaaatcaggttcttgacctctcttcttcggtcgagcttctcgttataaatttctagcacggctaatttaatctccagatcgtcctcgtcttccacatagtctggagaatctgtggagagcacaatcggctgagcggcgggcaccttggtagaggccgccacaggttgaggtgtggatgaacttgaagggaatgaaggcgcggatatggtctggttgaggaacaatgatgaaggttctataggagtcgaaaccccagatgccgagttcgatggaatcgggcgagatgtaacggaagagggaagtgtctttgttgaacctggcggtaatgtttttgttgatgatatcgagcttggctcaggggtggcagagtctctgctactccccacactcgctgcccgctctctctctgccaggatgtacgatggtaaactcgatccaggaggcggcactttcggggaggcgaatcctggtggggctgttttccctggaggtgctttctttgagcttgatccccttaatcctttggcacctgcgctccgacttcctccggctcctgcactcaatataggaggttggacgaaggacgggggcggtaatttttgggcagtcatggaagagtagtcatctccccagtcgtcgtcatccccctctccgtcggcatctgggtcgggctcacctaagtccatccgggaggaagcagcatctgtcggagttggcggcgggagcggagttggagggactaccgatggtggattagggggtgcttgtgtagaagggacgacaacaggtagcactacttcctccatcttgtcgtcatcatcctcatcctccactacgtcctctggctgttcgtttccgccatacttgaacaccaaaccaaactccatctccttgacagtgttctctgcgtcgtcgtaagcgacctcgtgttcgaagtcaagtcgacccggcatgaagcctgctatttcatgattggtcggagcagacacaagtggtttttgagcggcgaggttggatatgtctacaacatcagatatagtttagtacatttacagaacgactgaatcagagcgaagagagaaagtttatgagaaaacttaccgcgtgtggcggtcctcatctcctctatccgtcgtttctttctctgcaggaaactttcctggtcaatatcaaaagaaatttctcctttctgcgctctttctgccaagccgcctgttcccatcagacgtatgcgctctctactttcttctctgctctccgctggcaaggactcttccaacgcaccgacccaaacctccatgtagtgctcgcggcattcttcttttgtgcgtgttccgacgtgttccgatgcgtcctgccagttacccaatccgtaaaggtttaggccttcgatcagtaggagctcttcgtctgctccccaagcctcgtggtagatcggatatgaatgttgctcctattgtgaaaagaacgtcgaaggaacacggtttagacaacaagcagtcagtcggttgggaacacggctatatgcgggtgtcaatagataccagccagaactcacaacgactcgatagggatgccagctcttgtgtttgccgccttctttacctttacagaaacacgaagggcatagatcgacttcctcgcaacctatggctgcacattttatgcgaactgtatgggtctgatgttgggacgcgttggaaagaacagtttggattaaacatgtcagcggaggtgtctatctgtgaagggagggaacgagacagaatgggaagagtggatacgaacgcagtcgaggaagcaaaagtcgcagttatctaaggaagagcgtgtggtgatgcgaagtgttagatgattgagagtcgaagcgaaaggagagaagacaagaagaagaaggagagacgtacattgaattcctcctgtcacagctggcggaaggaaagataaagatgaagatggagagatggagatgacatggagatgaatagatgaacgggggccacgtgagaagagacggaagatgagtaagcgagttgacagcaaaaggaacgaggcacaggaatagaagaagaaagagaagggtgacgcgtgtgagatcgatcggtttccgtagtcgaaagtggaaaaggcaggaaggagacagaacaaagacaagagggaagaaaagaaaagaaaagtaaagtcctaaaaacacgtacccgagtgttgttcattctcagcatctttttttcttgacgatacagtcattcaaacaccaagatgacgaccgaaacgcgttctaaattatggagggagaggttgtagagggagattggaatgaaagatggcgagataacaaggtaaaaagaaggccggaacgtaataagagacccttcttttttcttcagtgcttatgttgagtgagtggagagaaaaaaggggaacggggatggtagagagagtaaacggggtgtaaatgagcgagtaatcagggcgggtgagagtaacaggaaagagagaagaacgggtaaatctgggtgagcacgagcttagttaggttctttccgctttcggatgtgtgcctggcttatccgcagtagttcactcgaataaccctaaccagaggtaatcagcacccacatgtacaccttgtagtgatcactccagatagaacacgttcaagcttcatacacagaaaaccactaggttgttcaagatgcacccagagaatccatatttgctctgtcctcctgatttctcaaagctcgcaaagtcaagcgaagagctcaggccgttgttcgtgtgcttggttctcaactcgttggctgaggatcgctaattcaacccggaagctccctcctttgtctttgaccaacacagtgtctttcttaatgcatctaaactcccagtgatcgatttcaagaatccagcggcggtaaggtgatggcaactttttgcgagggtcgtgtgtatctaacgtgcggacactcatggtcgtcttcgttttctctttctctaggtcagggcattgtcaagggccttgctacatcatgatcttgacctaaatgtcactatcccggatgatagattatgtccaacagtaagaatttacgcacaaaaaacccagcgttatgttgaatctatctgcaacatgctgaagcagtctcatattccttacaggttgctaatcggttagactatctactctggatccgctcccttctgagaacacatgactgcctttccgatgttgccctcaagaaatcatcagaaaagattagaggcatagacataggtaccggctcgacagccatctatcctctcatcgggtccaggctggaacctcaatgggagttctgcgctaccggtatgaggagaaactattcttctgttgcccttatttccggatacactcgactaagactgacgaacgttcaacctcaacctagagatcgatccgaactcgtttcatcatgcgcaaggaaatatatcgagaaactttctgtcggatcgagtaaaactcgtcaaaatcgagcctccgtccgggcaggaacaagaccgaatcttgaagccatttgagctgtttccggatcttcagtacgtggtgtccatcatctcaaacgtttttctgcgtcttttctcgggactgactgagcctgcctgtttatctcggctagattcgagtttacgatgtgcaacccacctttctattcttcttggcaagagattagctctttagcatccaacaaagaattcaatcctcatgcggtaagaaactcgagcttccctattctgcatggtctactcgatccgtgtacccgctactgatcaaaagaagccccttgccatacagatatgcaccggggctgaaacagagatgatcacgactggaggagaagtcgaattcgtaaagaggatggttaatgagagcacatccatggggattcaagaccgatgcaggttcgagcgtttctttttaacgtccctttcaatccggcttgtactccgtcgggcaatggatacgaactcaaccgaggcttgcttttttgacctagatggttcaccagcctcttggggaaatcaagttctataaaggacgtcgtcgacctctttcgttcgaggaaagtaaggcccgttccagttgccctttaattaggctttattttcaaaaactctatcacgaacactgctacgagatttgttgctcatgtgttgtatcaaatgctagataaaaaactatgcgatcgccgagttcattcaaggtcatacaaaaagatgggcgcttgcctggtctttctctgctctgtacctaccagatgtgagttcttctgtctctgctctcggagcctatttatgtttatactatcttactcaagccctttgatccttctttcttcgcttcggcctatcttcatgatgacctcaggacctctcccgtccgacatccaaacaactgcatccgtttctcccgccttccaactcaaaatcattcacctttccacccgatacgtcgattgaggatctcgttcgatgtacggagcgtatccttcaggctctcgatggagtctccctatcaactctctctgagcctatcacggtcagctctggatcgcattccgattcatcagagaacccgactcggccaacctcgagttcgactcgatatctagtgagcgcgcgagaagcaacatggtcgagatccgctagaaggaagaaacacgtccgagtcgagaatgagataaacccgatggagcacgacgtcagcacagtggatgaacggccgttcttgagtactcttcttcgatttgatcgtgtgggcctgacaaacaggggaacaaaccggagcacagataaagatggggacaagaatcgagaagacggggacgagaagggatgggagatgagtatgcatctactaagtctgaagacggatgatatcgaggggaaaaataggttggcatgggaaggcctttggaattttatgttgagaaaagttagggaaggagtccaggaatgtgtagaaaaatgaatggaaaccttctgcgaaaacgttcttggagtcatcagagaaatcttcctcatggcagaaagtttgttattattaataacaagatcgtttctgaaactggatgcatcaagatgttatcggtgttcctaacgagataagacagcaatgaatagaaaaaggaatatacaagtcacacggaagatgggtttccgtatccttagaagatggaagtgaagaagacacggagatatgtgcggcaagctatttcagcctcgtctcaatctcggccgagccattaattagtcactgacggtatccctcaaattcggtacacttgacattagtttctactgcctgaattctttataatccgaaagctcgttccatccttctctcttcatatccaagaaaccccggtcgatcctatccaaacgggcgaggtaaaacaaagaagaaataagagacaagaggagggaagagaaagcaaagatgtcgtttgcttcatcaaatcttctaccagaagagaatgagtccatcctacaatcaatagagaacgacgtcgaagggtccggctggttcagactaccgatatatctagaagaaagacccgatcaaccgtttgtttgtttcgtcgtggtatgttctcgtgttcctctcttttgctggagttggatacatctgctgctttacttgatggtcttttgtttatcgctagagccgaacaaatgatcatatcatcccggagattgctcattctattgtatgccttttcggtcttgggtggattatgaacagttaaagacaaagccggggatggaacaagctgtggtacgccccttctcgttgcctccggtctgttctttgccactgtacccagtatcttacaccacatcacgcttgccgtttctctctactcgccgatttctttttaaaaggtggatatcacaagagatatcagagcggaaacagaccaggtatcgattgttttccttttcttttcgttcttgcgagtttgtatgcatatgcgaatgtcttttaaccttgtgatgaaatctgatacatcatgtgtcaacagaatgagctcgaaggttcgtcgcaccatcacgttcccgcattctccgatatttgggcccgactctactctgtgagatgaggcaggcaaacaagtaagcttaactcaacaaaactctggtacatctgcgcggttctttcctcctttcgaagtgtacgcccatcggacgttacaagccaagtatgaagccgatcgaaacatgttcgtacagtgcaattctttgcgtatttgtgtgtgtgtgtgtgtgtgtgcacttgcgaggatgatctatttcgctgatgtcatcctctttttcattccatgtatgtaggatatgtattgtgattgattgcaagtacaagatcttgactctttgattgtgaccagttcctttactcatacacacgcgcgcgatgcattcaatccctttctttttcttgcctcagacgactcggcggaagcttttaggactcactatagagggaagaacatagcagtacgtccttgggcgggagtatgaaagttagacatcaggaatctgacgaagttattctgttttcgtgtttgaccgttagcggttgtacaaggctggggtactgtctgagcctcctaaactcaacttttttgtagacgtccaataatcatatatgtaaacacaagggagacaaaggaaactagagcaagaaaaggatagaaaatattgggaaggatgtgggcctctcttcaatgtctccttctggtagaagctgtctacagaaaacaaggagataaatccatgagtggtccatgtgtttcgactattctttcctccgtatggaagccgtcaagcgtgttaagccataaaggttgaagccggtttcctactctcgaaagagttaggaagccgtcatcgttcgcgaggctttttgtgttggggattttggtttgtgaaagagaaaagagaagagaaagataaaagaatacaagacaaaaaaaagaaagaaagaaagaaaggaagaatgagaggcagacgaggcaaaaagggtaagaaagaaaaggggaaaccctagaccaaggttcaatcagaattaaagtcagctattctttgtccaacgaagagcaagccttgcctgcccttcagacagtttaccacacacgaagagaaagaggaagaacggacagaacgaaagaggacacatcgactgaaacttgtaatgactgtgcgggacttgaaacagagcataacgcccgttacatccgcaggctgtgtgaaca

SEQ ID NO: 64 - DNA, 17807 bp, Xanthophyllomyces dendrorhous
ctttgactcactcccactctccttttcttctttatgcgtgcagacttcccccacgaaaaacttgcctaccattttgtccctgtacgattaccgtaatagcctcggtgctccctgcttcacccccttgccgccttcgtcccaaccggctcagcagtacaccaagatgatctacccacctgcacctccgtcaccaacgctgttcccaaattttccctccccgaactcttctagctcgatccctgcgttcgtcaacagcctccagacatcgccttttaaccacttctcgctctcccctccagctgccgaacttaatggatcattccttcagcagccaaccgtaggattcaactcagatttctctgtcctccaacagcagcagcaactccagcatcaatcacagccgcagcagtcacaacaacaactttccatgttgaacaatccatcaggcttgcttcaatcccaacatctgacgtttggagaaccaggggagggtttccagttccgtaatcttatccctgcagagtacgagccagctgaactctcgatggatcaattgcgcgagttccaaatgattcaagagttcgatcaggggttgtctcatcagtcgccccagacgatccaaccgctggcagaaggtggaggatcaaacggacgaggtcttcaatcgatacatcctcatcaacctcagttgggtgtccaggttcatcagatccagcaacaggcacagcttgctcagagtcagatccaacaacagctcgcagccgctcaggctcagaggatacagcagcaacgctatcaagagtctcttaacagttcgtcctcgtccgatgatggacacgaacttggcagtagcgaacttggattcgacggccttgccgagctctctggcctccctcaatcaaatccgccacagtccatgccgatccagacagctcccatgtctcgtccggcaagcagagactctgtcctatctgctccgtttccaatctcatacaacaacactcacggctatgctcatgattacatcaacaacagaagcaaagcacgatcgtctggctctttgaacaagaacgaaaacgtcttgctctcaacaacggcgacgtcgatagcgtctcctggacaatcttcctttggtggctctcccgaatcttcatccagagaaccaagcatccagcctagtcccttccaatcgacaaagcttccttctacccggccctcaactggtccagactcccacgctctacctaggttggatggcttggttggagagggcagtttgtacgttaacgtgaagcaatacgagcgaatcgtcaagaggagagcccagcgatcgaggttggaagaactcggtagggtcgccaaggctcgaaagccgtatctgcacgagagtagacataagcatgcaatgcgtcgcccccgtggtaaaggtggtcggttcctcgtgggtcttcttttcgctttcctgaaacccataacttcttcaccccttggggttgtatgtgcatgtactgatcgatcgttcatggtcttcgttgtacagaccgctgaggaactcgctcttctgcctcctcagacactcacctcaccccccgaagatgcatcctcattcgcctctccagagggttacactcctatgcccgttgtgccgagcacggcaaaagccaaaaatttgcccaaaaccagagggaagaggaagaggtagacccgttgactttgtctttcaaagaaagaaaaaaacccgaaacacacgcaaaaacgataccaaaacaccaaactcataaccacagagataatatcgataaccacaacgtgccgggtcgcttgggatcacgggaaagagagatagagaagatgcataaaagcggtatgctgtcgtctatgttcattctttaattgctatattcttctctttactttcgttcgttaatacctgtagatgagatactatatttctatttcttctctttcttcgacaattcttccaaccttctttcttcgttttttgttgcattttaaccttttatcttgttgcccttcgtatctttgtttctcttcatttccacacgtttcgatctcaacggtgtccatgagctttcacgagatcacaagatagatgacgaaagatgctcgagatgaagaaaactagtgcaggatatgaatactaatagaatctgatgaaatatacaaaaccaagagaaaaaacacatgtaatcaaacgccgctagaaatatgagacacaaaagatctctggctgccctgcgtattcctcgttcatccttcgccccgcttccaagaactctgtccaatcgatttcctttctcctctccttttcttcctcttggcccattctctcgtttattatataggaactagttcttgttcttcttgtctcctcttttctcttcttcttctctttggccatttggagagatgccatctagttctttcgtcaacctcaacagagttcgtcgacagaaagcagcggaagaggccaaagcgactgcgacatcgacagtaacctcatcaatcgcaacgccttctgctcaaactcaatctcagaaccagcaaaatcaacaacagcaacaacagcaaagtatctctccggttccttcactccatcaacaaccacagcttcatctagacccgacacattcttcttcctcgtcccaatcagcttcgtccgtcttggtctcgccgatcgagtctacgccgaatacgacggtgttcagatcaccagcttcatactcatcccaaggatctctctcgcctgcttcttcctgttcattaaatataggcggtctcaactctcctctcagcccgactgccacgacgacgattagcggtcatccatgggcgatctctccttcggcgtataccggaggagggggaggatcctcggatattaggagacatcaatctacagggtcgagacataagaagtaccttagttcgactcaggcggaaagcttaggtgaagaagcagaggaggaagacgaaggggatggagaagaaggtgggaaagacggaaaggaaagtaagacggctgctttaggtgggttgacgaggtctggtttagacagaatgggaaatctgacaaggcatgggagcttgccttctaaaaatagtggtatgttatgctcctttttcttctgttcctcttacgacctcatagagtggctggataaaggaacaggaaggtcggagttcaaagtcaaggccatggtgctcatctcaaatgattattcctgtctttctgcagcgttccaagctcgagcgactcgagcaggaataaaagcacaaacatccccaggggtctccaggttggactcgatcaccgcttattctccagtaggacccacacaaaccaaaggagtagatcctcaagacgacaagatatgggaacaagcacttgcagagaagaaacgagcggtgagtcactcattcttgctggctcttctatctatctgtttttaggatgtcgcctcccccgtttttggcggatggaaaccacttgtttgagttcgctctgctgaattatagtctttcttctcgacaatatcatatctaccaatcttttttaatttcctgatggcttactcaggaaactatggaatccaactctccgtctacattctcaaacagcgttcttcgacatcaaagatctctacaattgattccttccgggagtcgatcccagcatacaccactctcaccgacatctaccgtccctggatctgctagcctcgtcggcggtcacgccagatctgccagcggaacgggtgagcatgtaaacgaaaattctcaggccgaggtcgaggccagtctccgaaggcatcagagcttaactcaacagggcatgaacacccggatttcagaccgactcaaggcgagtccactccctctatcgaacactcaacgaccatacccagcatcttcctctgcctcacattccgtgttgagcgcgcctgaagatcaagacttgccgcctccgacgtcgcccattcaggcttctccctgggggaaccaaggggcgggttcgaacagtatctcgagtaatctcagttgggaagatcactccagagtactgaatgctggttcgctcctcagtccggtccctgggtcggctcgattcggagcagttatcagacgaatggaagaagaggcggatggaggactaggtggcgtgccggcgatgaacgctgagcagctacaaaccgcgttcgaagctgcttcgctcggtcgatcgtccggagcgcacaacgcgttagggccaccggtcgtggatctcggtcggctctcacctgatttgccaggtggtaaccttcgccggagccaatcgctccgaactcactctcgaacgtcctcccgaagtcatgaccaagcggccttaggtggtaacccacctccgcctaggttccttaacgctagtcctcaacctccttcgacttctcctcgaccggatgagccatcattctctgcttcacccgaaccacagtctttatcgaccggttcgacagcaggaagcgcatacaactctttccgacctacttctgggtctggatcttccactccttccctcccgggtgggaagaagctgtcactccttaccgatcccgtcacgttaggtcaaatatccggccagaagaagccgtctgggccggctacggccgctccctatgttcctccgattggacatactactcgaccgccccaatcggctttgccagggaagacatacgtcccaggtagccaatacgccaagccttacaccgccgttggcatgggctgggatcagaaacatgcgatcatcggcagtagatctggtggggcgttgaatggagatgcttccggcgaagaagacgaaggggggatctataccaccggacaaggcgactacttgggacgttcactgggtccgatgatacaacctacgtcgataggaggaatgggtggaccaattcctcatcagcttcttcaagctcaaatgaatgcgttcacaggaggaaacccatcgggagggatttacccgatacctctcctgcctccaatcacacagagcttggcaggcccgaccggcggttatctgcagccgatcatgggagtgaatcatggagtaaatttttctgggcctggcgggaatccagtgtttttgagagcacaaaccggtttgcccgaggcttcggggcacctggatgtacagggactgatccaggccaaagggtataatcccccggtatttgacataaaccccacaaaggtttgtcgtgattccttgatctagctctctatctgtaaaaagtgcattttcgctttcctcaagctgacatgtgtattgctcggtcgaaatgcaggcaaagttctttgtgatcaaatcttataccgaagatgatgtagccaagtctctaaagtgtgagtgagccgcgtcatcctgtgagtgcgttaacgatgtcgctaattagaacctactgtattcaagtcgaaatttgggcaagcacgcgatacgggaacgccagattggacaaggcgttcaaggaacatgcttctaccatggtgcggtaatctccagagaatcttgctcattgaaggaactttgtctcatccagtttcttcctctctctctctctctcagccgatatacttgatgttcagtgtcaactcaagtggtcatttcgccggtatagctcagatgataaccgacgtagattatagcagtaagtagtttgtgcgtattttagagattaattgtttaatgagccgacctcttgcctgttggatgtttttttttggtatcagccaccagtacggtttgggcccaggataagtgttagtagaaatcctcgctatctgccctcgagtctgtttgctgaaagttgacgtgtatctaatcgttaactccgccgttcgtcaaatagggaaggggatctttcgggttaaatggatctatgtcaaggacgttccggtttgtatcttctttctttcgaattaccctcacctctgcttcagttattcgtcaccgagtgatggctgaacgtctcactttcggattcgtttatcacagaaccaagcgcttcgtcatattcgactaaccaatacatctgagaataaacctgtgacaaactctcgggatacacaagagcgtaagtgtctcatcacatcatacttctatcatctaatcaatatatcctcacgatttttccatctctttattcagttccatttgaagctgggttggagatgctccagatatttcatacatatcaagctcgaacttctctccttcaggattatgggtattacgagcttgcttcgaaccaacgagatatctctcctcataaccagcaacatcatcgggaaccgcctgtcgaaaaagtttggcatcctgcggcagttcatcttccctctttcccggctcagcccacagtttatactgctagatcgggactcgggcccggacctggacccggacccggactggggcaggggcagggacagtcgtttgggatgggtcagccacagggcccagcacttgggtacggacctcctcggtactagaaaggagcttttctttctcgattcctgtttctccgctcctttaagttgttcgtttagttctttcctgggcttttgcacctttttcctcttcaagcctctccggtttcttctttcttgcctttcagtactcaatatatgaacattctacgtgctatgaccccctttctctccatatatagaaccttcaacatgcttgcctttcttctctctatcttcctgcgatttgttgtggtaatttttaaccttctttttcatgtccacttgctaaacaaagagattcctcctatgcgcatgcgtgcgtatattttcacgtatgagccgtgcattcgagcttactctttaaaaatggggccccttcaccccctttcctgtccctttgcttctttctctctgctctttgttttctactttctggctcttcgcgcctactggtccttggtgatgaagaacaaatgccattaagagtggttatcagagtcaagaaggagaggatacaagttgattatgtcagaagcatatggtaagaaaacagagttgccctcactaggcctttattcggccgcccaaagaagaagaatgaatggatttgaactactccaagcttgaagagattgaggaatcaacgtaaaagctaagacggggtggttcgacgaggaaatcctgacaagagtagatgttctgagagagaagaagatgctcaaaagataagaaaccggtcgtaggaaatgatcggaggaaatcaaacggtcctctcacccttagacttgggttctggtaatgcttgtagaaaccgtcggcattgtcgtctacaaatatcgaaagaacgattaatgaaccggacataagacagttgaatctctaccgcgcaagattatatgcgactaagggacttgcaatcgaccacgacgcagaacctgatgttggatgggcagggttcaaaatgagttggaacacgcgtttatcatgatccagtaggatacatgtgaagcaaggaagaagtgcgcatggtcagttacgatgaattgatattccgagaccaagacaacgtggcggaagttctagcccggcctcacaaagattgatcatccgtttgatctctagggactaagcttcgatgagagtacacttcgagtagtggaagtaaggtattcagacccttggctagaacgctcttcctaaaataacaataatcatgataataccggcccagaattagtcacttaccatcaagattgaactatccaatcagaaacaagatacgatgatgaccggacataaacacatatacaaaagattcagtcccggaagtagaatggggccgagtgacatgtcgaaatcagacggatagaatcagcgggctagtcagcgattcatatcacctgtatgagtatagagaaggattagatcaatagacgacgagatgcagtattgcgccaaccttgtcggtttcttcgtgcacgatatttacacatctcaactataaccataagatgagccagtcaaccgatagagcaaagtgcagcaattagattatttatcctgaaaaacacctcgtagactaagagaagaatcatggctgataatcattggcttaccagatcatccacgcgttcggacttgatcctcaactgatcattcgtatatccagacaaacggcgaaaaagtcaatagatatcgaggacgtaaacgaataacgattatcagcatctctgttccgtctgtgtaccgagagagggagagaaaagagagcgaagacaaccatcacgaagcatgtataaggcacatccgggtttcgttcaattatttttggtaaccgaaagtagtccacatagttctcacgaatcttttccaagacaatcgtgttctcttctggagatagattccacgaagtaattgtatttatcggcttgtatgtactcataagtggaggataagacagagtgaaatcttggaagagtgagagagatgaagttaaaccatagaaaagagggcaagaaaattgctaaaccatgctggccatatatcagtacagtttacgcaataagcccgggatgcatgacaaaatgaaatgctgccaagaaactgaacgtagttgggagatcggtccatcttgatccttaatacacaactcaaactaagatgttattgggctctttcttagatacaaaaatcatctggcttatcgcaaaagaaacaatcaggacatagatacattacattgaatttgcttcatttttgtattgatcacaaacagatataaaaaataggaagaaagatagatcaagaagagagaagcagttgcacattgcttctattgcttcttccaatacttgtatgtatgttcttttattcaagatcttcccgtttcatctagagaaatcaatctgttcaagctgccgtctttgccttcttctcttcggcctagacaacatatggacgacgaaaaaaggtttgattaagtgatatttattcagaatgtgcctctcttgctgagcacatatagaggacagatggaatcaatatcaggttttaggaagaaactcaccaccggtcggacaggtccaaacttctccaaacgcttgcgcttcttttcctcctcgaccggatccaacacctttgcgggctcagatttgagtaccttttctgatgtgggcttggccgttgcggctgctgctttaggaggttggatggtgtttgtcttgggtctgacggttgtatctttagtatcgacgtaaggctgcgtgtaacatggaacgaagatagataggcaaggtgcattcagcgtgtcaaccgagacggatggcgaagttggggtacttgaaagagaaggaaattcaacgaacaactccgaaccgggcagctcgactcttcctcttctcaatctcctcatctatctctttgttggaagcggtcttctcctcggatggggcagcgacagatcctgtcgaggtagtctagatggttcaacccgatgatcagcaatcactcgcgtattattgtctgataggagggggcaatctcaccttctcagctatctcaactgacgatgcggcatcagcagcaggtatggatgtagagatagtctggtttgacaaacgagattgaaaagaattacgagtagagtgtgaacatgacgcgttttgttcgatgaacaatatatccagatcaaatctatgaacctcacctcttcagaagtcttcgtctcgttggaagcagaagcagtagttgagtcttgtctctctatagccttcataggctccgagttcgagttctcagttgattcagagttcaataagcgagcgataagctcctctttccgaccgctcgtcggtaggtttgcctcagaaaggagatgtttgagatcgactactttgagtgctttcctgatggataggtgaaagcaatcggagttacagacataaagaaagatttaaccttcgtcagaaacaatacagatccacaccctaagtatttgtagagctactttacaattcgtcttcggtatgggcggccatgattgtaatgtcggcgatgataatgaggggaaggtatgagttaactctcaacgtcaacaatgctgaagaggaagcgaaagatcgcttacgtaatcatgcttacaacgttctcagctcacaacattcatttcaaccatcatcatcatcatcaccaacatacgatggctttcgcgttagcaacctcagatgaggtgtttctattcaagacacctgatgttcaatctctttcgaatcttccagatcttcaggcgcttccttccaaggttgctttttcgaaagcaggcgagtttgtgtgcacgaccgagggaggtgctatctgggtctggacagatttgtcgaaactagaagagagagcgttgatagccagcaaatccgaggttcgatacttttctatactttgtgttacgctcgcaccgctcccttcatttgtattgacgattggatttctaacggcaccgtcggttcaagggacctatatcttgtttgcttctcgacgtcttggacggattgtcgatcatctactcccaaggctcgaaggtacctatcggactatctcactatatgttcgacagctcgagatgattgccaactgattcgtggatgacgtctctcgaataggtacatgtatctaacgcccgcacaggccagcatgtcaggacatttgaagtaggcgactttctctcgcgcgcgtctgaatcataggagaatattcgaacctaattgatgacccttcatgttccctctcttatatcggtcagcactttacctcatcggtaaccgacatatctctgggagtcgatgaagccttacttgctgtaggatatgcgaacgatccagttgttgtattcaacagacgacatggatctcaaacgatcatccctgttcagccaaaaggggtacgctttgtactttctctaatcgttcaagctctcgtctgatattggactttctttattgttcttcgaaattctaacaaggaagctatctacaagcatgtaggcgctctttctttgctctcatcacctttctagaaacgacgtctgcttaccaaattgcgtgtatatttatcagttgtcgatttcatccaactcggcggaatacgctccttgttcttctatcaggaagagatgaattattagtgttcgtatctgaccttgattctgcttccttctctctcatttgatggactgataaaccattgagtacttcttaacttctttgacgaacttgtcgtctctctctagatatgatattctcaaaccgacgtctcctcaaaagattatccgtctagacttaccttcaccgtcgtcacttcagtttatcgggaatgcaaccgacctggcattcaactcactaacccctcactgtgctatcgtgacagatgctgggctcttggtcaccgtcaacgctgagacggggagtgtgagagcgagagagatcagggttcctttaaccagtgtcgtttggagtgggcggtcagaggtcctcataggaaccggtgagtctaaactctctactcttagaaaactatcaacgataagatttacttgatgaataattctttacctcttcattcgtaaatgcgaaccacgtcggaagaaacgggaaagcttctcagacgagacgttcaagacgagtctgtctctgaagatttcacgattagcgccgagggagcaaccattctttctcttgctgctcaggcaagttgaacgcgacctggttttccgtagagtgatttcgctcttggttttctgatcctcatcttctctctttgggccaactgtgcgcgtatgctttcttcaacggaaaaaaggctaagacagttacccggacaagtcgatcaaagcccaccacgaagactggggttgaacctcgtccaagaccttcatccgttgtagttccacctatttcatcaactcacaacccctctagtcgttctagttcacggcctaccagtgcacctctgactctcaactcggcggacgacgaacctttggctcttcggtcttcttcgccttccctacctgccctaccacccgctcgatttcgtccgatacaaatctctcgcccgtccatcgggactgaatttggaacagaactaacatcagttggagcaaggacagaggcaggtacaaggcccgaaatcagaccaatcccatcgacttcctccatttcggtctcttcatctgtgtctgacccaagacgaggatttccttcaccttcttcgcctgttgggtcgactagaagagaacgatcacactcgcccccttcgcctcgttccgaccgatcaatcggagaatatcgtcgagggggtgagagagagggcgaaggaagaaaggatgagttgatatggatgctttcgaaccaaatcaaagatcttcatctagatagtacgttgttcctctccccctccttttgtgcgcgcgagcggggtttttgtgtccgtgtgtttttgttttattttatcataattcaagctgatcaatttgaatggacccatattctgttttctcttgtctccatcgaacacaaacataaaaatagtgcttcgctcaagaagacaaacgaagctcgagacaaaggcattgttcgatcaaacattccgtagactagacgtcctccagagagagaacgaggctctaagatcagagatcaacaggttgaatatgagacctgggtattcagatgatggcgagaatggaggaaacgatgaggattcaagttgatctggcttgattacgatcggatttcgaccgaggatcaaggggatttaagctcggcttatatatccacatatacatatacacatacatacggccatactttatgaagataataaagaaagatgataaatggaacataaaagggaagtataggcatgttttcaccaaacctgaactcgaccgtctcgccagaactctccggtcacgttattgatatcatccagggcaagcatgacgggcgttttggcaccttgttcgagggtcttcacaccgccgggcgccatctggattcgtatcagatccgcatcaaaagaaatatgaaaatgatgacaagggtgatatggattgagagggaaaaggatggtcagttggagtcagaacataggggaatgaagaagatgatcagaagcggacgaacgtcagtcttgacgtagccaggacagcagttgttgattagcattcctgggttttctcgcgcggcgattcgagtgtacgcttggagagcaagtctattaccagagtaagcgcagagtgaaagagaagcagagaagaaggaagcaaaagggagaatacgatgagttcgagtcggagcacatgtgtgtacagacagaaaaaggcgcttacttgctcatcccatacccggtagcaggccatcccttcttagcatagtcgcctgcgctcacatcgttctgatgtgctccaatcggcataaggtgagtctacaagttttgtaatatgatagacagcgaaaaggaaggaaaagctcactttgaaatcggcaacggccttttcgagttcttcctccgtcaggtcgtcttttgtaaatcgggcgagtacgctcgggtctgtgatgatacctgatcgaccggcagtggaccccacattgacgatccgggcttcggtcgatttcttcaaaaggggaatgaacgattgaatgacctgtacataatgtcgtattcgtcgtgtatgcatatagaaagaaacagaacatgtttaagtccgataagatcgtgctatgaatatgagaaggcagtggtaaaacatagaaatcggacggacattcttggttccgtgataattggtattgaatgcataatcgacgacctcacgatcgaacttgtttccagagatcgccactcctgcgttgttgattagtatatcggtctgaagcatcattcgtttgtcatcgtttataacagaaatcaggtgaacatcagtgggagaaagatgtagatgctgatgcgagaagcgcaaacggactaaccttgccagactcgctttcgactctgtcgacaaattttctgatgctctcttgattggatatatcgagatctccgactttgacaacatgatcgcctacagatttcccttgaagaacatcttctaacgccttttttcctcgagatgaatctcttgagcacaggtaaactgtgagcggctggctctgcggcgcctggagaaggatagactttacgatctgaaggccgatccctttatttgctccagttacgacgacgactttgttgttcatgtttcctacgaagcgtgtgtatgtgttgaagatgagaaagaatgtccgaacaactctcgactcacgtcatcaaaaacccagatcgatccggatgaaggatactaacggcagtcaccaactgttaaccctaacttgacccccgtccacgcccttgcccgtcccgccgctgagccgatccgctcgatcagtcaaccagttgatcacgcacggacctcctcaggtacacaaacttgtccctttatatcagctaccgtcgagacgatctgttctgccaccaatctaatcaagtcaaccacccactcaaattattaaacacctcattcacctctgattcaatcgatggctacttcaattcgcctgccgagtgtgacgacgataaggaatcttatctcagcatactacatctggacaaacatcatcctcgcctcctacaggcacatcagagccagaggagtggttggtcacgaatcttctcatcatgtttactcctctgtatgtagtactgatcggcatcaactctttggcttcctgaatcagaaaggcacaggcacagagatctacctgacattccagcaggcaagttctagactcttccttccactcacccctgccccttttcgtccggctgtcaggcaggcaagttgacagcaaactttgaaattttccatctttccagttcatcgtctctcttctcctccgtcttccgtcctcgcaggccaaagtaaaggcagagttgtcggcgcttcgatcaacgctgaccgacaaactcgctccgccgaggcctcatctgaaccgaaatctaagacttcccgcttccggtttgacgaaggatgttctcatggcggaactcgagaaatatgctgcccttggctcgtcagagtctgtcaaaaatggaaagagtggagaggactggaaggaaggtagagtgtctggcgctgtgtattccggccagaaggatgatgaagaaatcagcgtgctcgcgttcgagaagtttgttgtctctaatccggtgagtgtttgttcaaagcgtacgcatgtatggtacatgtccgagcgaactgacaatgaaacaccattcacagctgcacccggacatctttccttccatcaggattatggaggcagagattgtggccatggtgttggacatgttccgaaatccggacggggcgggaacgactacgagcggaggaacggagagtattcttttggcttgcaagacggtatgttccagacaatccttgtcattgtttgttactggacacagtccacaacatgtactaaaagaaaaatatattgaaacgaattcttgggtaaaaccggaaaaaacaaagtaccgagattgggctctgaatgtgaaaggaatcaccaagccagaaatgtttgtaacccgtttcttcaactcttgtgctatggccgtctggaactcgtgctaacatgatacgccccacctcctgtattacccggctacaggatcgtccccgcttcggcacacgcggcgttttggaaggcttcatcatactttcatatcaagcttcattcgattcctgttgatgaaaagacgcgtaaagtcagactggatcttgttaaacgggcaatcaacccgaacacgatcatgctcgtcggtagcgcgccaaactttccagatggcatgatcgatgatattcctggacttggcaagctcgcgacaaagtacaagcttggccttcacgtggattgttgtctcggttctttcatcgtacccttcttggaacgagcaggtttcaaaacggagccgttcgattttaccgtacccggagtcacctcaatttcatgcgacacccacaaatacggctttgctcctaaaggaacgtcggttatcatgtggaggaacaacgagtggcgaagccaccaggtgcgtcttgtataatattctctttctgtgcagttgtatgggaaacgtgaggttgattgaacgtactcatactaccccgttcatgtagttttatgtactacctgggtggaaaggggggctatacgcttcacccacacttgcaggtatgtttgatatcgtgcctgtctggtcaagattctcgttttgattaccttttaaaacttgatctcgcgcaattctatctatatatatcctctaaactttcttcaactcgacaggatcgaggtaagcagcctgctacacttgtataatcatatcacgagaggctttcagctgactgatttcgccttcctccaaagacctggtgcattgatcgctggttgctgggcgattatgatgtcccgaggaatcaagtacgtctccctttcaacctttgatcgacttatcaccttttagtccacttaccgtattttctgttcttctagtggatacactgaatcctgcaaaaagattcttaccacagccactatcatcaaacaggcctttgtgtcctcctcaatcttgagcagagatctctatgtcttaggagatccgataagttcagttgtagcgttcaccagcaagtcggacgaagtgaacatcatgttggttggcgatcggatgggtaaaaagggttggcatctgaacgcgttggagggtcctgcagcgctacacatcgcttgtaccgtacgtcctttcttctcgttggcctcatctgaagagacgtctgacccttgttgtgctctgttgtttgttaaataaataaataaataaataaaaacattctgggatatagctcttgacgaatgcagatggtttgatcaaagatcttgagagcgttgtccaggaggtccgaaccgctcccaaagatgaaaaggatggcacgatggttcgttctcctcttctctcgtcgttgtagtttttgcctgtcaagaatgaggctaaatctatggtgtttctaaataggtcgccctgtatggtctcggtcaaagttcggttggctcgacgatcgttccagaagtagccaagtatgttccttgcatccgagtttcaagtgtcaggccgatcgctcacctattgatcttcctctcgtttctgcttctgtccttgaaaagaatctttttggagaccctctatctagcttagaagatcattcctcttcttggtagattaactcctgcctttacggatcccgtctcttgaaacctttgttagacatccctttccgataggaataacctattctcgttatcgatgtttccagtcccagcgcaatgctttccattttcgatctattcttttccttatatactttttttccgggtctccagcctctggttcgtcctatcgttttgctcccaagtcagggcaacgagtttcttcagctcaggtgaaagaaaaaaaaccgggaaggactacgactacattcatatttcatgaccataaaacttagacaatagatcaacgacgactgcctactcctgacgagcgaatgggtaagagaggaaggaagaaagaaaggaaaaaaaaatagaacaaagaaggaaaagagaagaaagatctgacgacaaatc

SEQ ID NO: 65 - DNA, 4984 bp, Xanthophyllomyces dendrorhous
gattaaataaaaagaaaggaagattggggaaaaaaaacggatccactcctcatcccactaccatttcctagcccctcccttccatcccagtcccgatccacgtccacaacactcttcccgagcccgagcggcccatccggtctacacgcaaacgagatctaacgttcaagctcagttcttcttccaattaggggcccagtagtccgtccctagttcgctcaaaggctgagccgatcggattggtccgccgtcgggttcaggcagttgcggttgtagttgtgattgagcgagattcgaatgcgtcaaataatgcgattgggatggcggttggggatgggattgggattgggtggaaggaatggagaagaatgagttggaggtgataggtaaggatgggggtgggttgtcttctgtcggttttctagtgaacgttgatcccaagctaaagaaccgactatgggggtttcacgatcgtttgttaaacaaaaaagaaaaaagagaaaaagacacacacacatatattgagcattcaaagtcgcaagaagatcgaataaaagggaaagaagaagaagaggatggaccgacctgaacgatttccgacgactcgttccctcatccggaccatctgtcaacctcggtctatcggacctccaacctcccgttctgcccccgttcgggttcgcgttcgaaaccgcgtccccgttcgcgttcgcgcccgcacccactttctcgccgttcccgccggggccggaaacagaagacgagctcagatcaagctgactggatcgaggggtcgtcatgaagggcgtcgcggttaatcttccggaaggaccggagaggatcctgccgttcagaccgttctgtgggtaaaacgtcggtgagttcggcaacgagttctcgcccgctcccgacccggagccagagaccgagccggagccagagccagaagtagagttcgaaccagagggaccgttctgattgttgccaacaccgccacttccacttccacttcctcctcccccgccaccacttccaccaccacctccaccgttgctaccgttcgaagggctttctaaacttcgactgctcccattgttcaacctgagcgccctcgtcagagcctccctctccgcggcagaaggcgcaaaggctctgatggacgaaaagaacctggagcctgctcctccacctggcgagactgcgtagtcccccgggttaccggtcgacgaaggatgggcgggatgaactagtgattcagacgacatcctgccaggaacagagacagaggcagaggcagaggcagcagcggcggcggtcgtgctgtttacgttggcgttgctggcagagatggtgggcacgaaaggggctgagttgacagagaggtctgacgaaggccggttcaacacgggtggctgatggacagacaccgggctcgaatgagacttgttcaacccggtcttcaggctgaacactctcgcgtccgggttgagtttgccgttgtcggccgtgctaccagggatggtggaaagggtggcggtcgagttggaagaagacctaggtgattcgacgaacgactgatcggaactcggaacaccgttgacggagccagcggtagggccggagctagcctcagcggtggaagaaggaaaccaacgtctaggagggaacctcgacaacgtgccggcctggccccttgctttactctccctcgattcggctcctgacttgtccttgttgtccgcgcgctcaccttcggttaccggcccaccaagctgagtgggctctgtgggcgagaacgtcccggaaatacggggcgagatcgaaggccgcctgaacggctgcatgctcgagggtgggtatcggtctgaatcttgcggatggccgccgccgccgtcgtcgtcggaggagcctcggcggagggcgaacgtttccgcggacgggactaccggtgtttccgccgacgagggatccgacaggaacgacctgcgctcgtccgggaacgctagttggggcgacagaggcagggccgagtcttccgtcgatttctttcgctcgctctggcttcctctccggtcgtccggaacaccgggcggggtctgcctgtcgtcgttcccaaccgagcctcgggccgacgtagggctaggcacgacggacgacacaccggaacgggtgggttgatcggagaagaaccggccgagcgagccggttcggttgtgagttcccccgtaggagtatccttcccggctttcgatttctgcttcgctctcgctctccggtgtcagaaggccttcggtactgatcgattggaacaagcctctggggagtaggtctgagaacgaagcagagagagacagaggggaggatgattcgtcctcgctcgactcttctgtcgggacgggtcgaccgaacggggcgtaggtcgatcgttcccggtcgtgaggaagggcaaggttttgggtgtgggtgtgggcgtgggtgtgagtgatgggtgggttggacgatccgtcctgattgtgaaggtgatgatcctgagcgtaggcaggtttgttaaatcgagatgaataagcgaccggtccaaagtcctcgaacccaaacacgtcgttcagagcggacgagtaagccgggaccgggtcgttgggggaagaaggatgggtgtgatgaaggtggggaggattgagaatggaaagcgtggtggatgaattgccagaggtagagctcaggatcgaaggagcggcatgaccggtgccagacggggcggccggaggaccggccgagagagaggtcgggtcaattgtcgtcgaggtcggttgctgctgtcgtcttcggtcaaagagggaaagagagagtggctgaacggggagctcgtagaacgcagagggcgccttgtttgaatggatgcgagagagaggaggcgacggatgaggagtatgcgtttgggatgaccgaccgtttgccgaggccgacggatatggtaccgtctgaccgacggcgatcgagggggaagacgaggatgaggaagaagcagaagaagtagtaggagcaatagcggcagcggcggcggcggaggaagtagtggaaacagattgtgcggatgaaggggaatacgaagaagggaaagaagacgaggtggatatcggcgggggtggctgtggtggaaaggcagactgggcgaaccgttcgttctcgatcgacctcggctgagggaacgaagtgaaggtattggcgaaccgtttggcttgttcgagcgctgtgagcgcttcggttttggaagtctcgaacgcgtcttcttcttgctttgtctggatttccaactctctgacgtctgaacccaactgggccaactcggactctacctttttcagttcctctcttttcgaactcgtcgccttttggatggccgagcctttggtgttcatcagctcgtcgctcgccttgatctcttccctttgggcggccatacggtctctcgcgttcgccagccgatcttcgagctctctgatccggttcaacactgcttccttcagaccttcgatcacccggagtttcttctctgcctcccgcttgagtccttccgcctgtcgtttcccgtcctccaacaatttcgtcctggccttgacctcgagccgttcgacgtcctcgtccctcttccggacccggagttcttccaggttggccatcaggctcgaatgggcagtctgggtctgggtggaaaactggaagagctgggcccggaggtcggtcgtggtggattgggagaggacgagggcgttgtggacctcggcgagggccgggttggtcgagagaaccgaggggtcgaccgagggaatcgagatctcgggaaaagagccgggcgcgatcgagtgaggtgggaatgtgaacgactggaacacggttgaccctgccgcgaccgggggtggggaagaggacgacatggtggttgatggcgagaaggatgaagtgatagtagtagcagcagccggacctcctaccacagttgacgaggcaagggaagggaatgacgaggacgtcaaaagggcagagggcgcgttcgggttggatgaagcagacaccatggaggattcgatcaatgaatgattatttgagctagcagagggatgttcgaacggatgactgccctcctcgttcctctctgtggacgtggccgagggagagagagaaggactggttgacggatcctctaggctgggttgacgagaccgattgttggctgaccgttttgtcgaacccgaacgagagagcgcgtgcggttggttcggtgcgggaccgttgcctccgggtgaaggggacgagaacgagtacggaggaggtagttcgagatctagagctttgttgtgcagaacttgaggtgtgaagggggattttattttttggacgattgatcaaacatggtgacgcacaaggtcaatactcagggctccagaccgatcttttcgggtttctagttgccaatgttgaaagacaagaaagaaagaaagacttaccagcagctaccgattcttcgcttccatccaacgccttcaagtcgacgacgccaaacgtcgtgccatcctttgagctaccgtcgacctttttatttgactggttcgggatcgtttgactgggtgtgacgactctaccgccgaaccaccatctaccaaaggcgccgatgaaccagacgccggcgaggacggtgtcggaatcgtcggttcctccgtccggccatctcggtttggttgatttccgggggtggtgggaaccgatccggtctgccagtgcgagtggggacgaggtggtggatggagagacggtaacgatggagaagagtagatgatcgcgcagggcgtagggaggtgtgcggagggcgatggagactctgttggtgaacctgaacggggcgaaggggccctgtctggtggccgacggattttttgactggctcgaccgggtttggcggaatgtgccgagggaggaggaggaggagggg

SEQ ID NO: 66 - DNA, 1057 bp, Xanthophyllomyces dendrorhous
agggagagagggagagagggaagtggaaagcgataggtaacaatgagtaggagagaggataaaaggaaagaaagagagacgaaaggtagaaagaacaagacaagaaggagggacggaaggaaggattagaaaacaggagggaacgcgagacttaccaagacaagccaacagacagagaaagagagtccagacgagggcctgcctgagctgatggaacgcagagtgaccgagccaggtggtgagctctggggagcttccggctgcgagtctgggaaggaagccaccgacgaggccgagtgttccgtaagcggtccagcccatgaggctcgggcgccgacgggtgccaaaggttgacgggggctgggacttttggaggagcccgactgtctgtttcgacgggcgagacagggtttctggtgaggagatctgttgtggatctgtgggagaggatcggttgttggtggaccaagcagagagcaggaatgggagtgagggtggaaacgaatgaagagcaggtaggttgtcgaggtcgacacgaacggagggtgacggccgggtaaagttagagtgaacgggaggaggtcgagagcgagcgagaggatgattgaacgggagcagtgaccggcacgggggatgtcgcacacacgcacacacaacggaatgagacagaacaaagcaagcaagagcggatggtcagctttgatgttgttgctgccgtcgtcaagagatcaacctgtttagactcgttttgatgatgggattttttttggaaaaaagaaaagaaaaagaggaaaaaaaggagaagaaaaagagcgtgtcgttcttttcctcctcttgttccttcttccccggctagaaccgggtgtgtgaatagaatgaaaggacgatgcttaacagggtacgaaccagatggcaacaagggcgagcgagcgctgagtgtgtgtttgggtgaacggacggacgaccacttgacgagccgaacggatgggcgagggtttattgatgttgtaagacgagcgagcgagcgagctaaagaacgaacggtgaatttcatgcc

SEQ ID NO: 67 - DNA, 905 bp, Xanthophyllomyces dendrorhous
ggggttgggggtgagcgctgtggttgtatgtgtgttatagagacagagaggggcaagagaggcaagagagcagagaacacacgctggggagccaagcgagggaatgtcagggagagaacatgcttaacagagagcttcctcaacaaagaacagacaacatccagaacgggcagcctgttgggttttgtgttggccgttgtgtagaattctgtagtgaatccattagggcgatttgtagtgtgctttgtaatgctctgcgtagtgtactttccaatacacttcgtagtgcattttgtagtggactccctaatacatctttcaatacatctttcaatacaccttcgaatacaactccctaatacgctttgtagtgcattccctaatacattccctgatacactctgtaacacgcccggtaacacgctcccgtaacaaccccccaccccccccggtaacacatcctctgccaacgctccctctctctcccccactcgtccaacagagcgttctgtcaagttgtctagtctaattctctaatgctctctctagtgcgttgtgtagtgcactgtgtagtatattgtctattgcgttgtctaatacattctctagtcctttctctagtgcactctccaatacattctccaatacattctctaatacacactgtagtgtgttgtctatcacgatttctattacagcctctagcacactttctaatagaatttctgttacaatctctagtacacttcctaatgcacttcctaatacaatctctaatgcactctctaatacaatctctaatgcactctctaatacaatctctaatgcactctctaatacgtcactctaatacgctctctgtcacactcttccatctcgtctcatctcatctctctcatctacac

SEQ ID NO: 68 - DNA, 1232 bp, Xanthophyllomyces dendrorhous
cactcactcactcatgaccaccaatccgtacactcccctgccactcactgaggagtcggcagaaagctccctccctttgtactccaaggactctcgtcccgaaggagcaaccccatcagaccagccagcctcagacctatcatctcatactcatctggccctaaaaccaacaccttcgggcaagcgatacatgtctttcagagtcgtctggccattttttggctgggaacgcgccgtgatatgtgaactaggtctcaccaagaaggtaggttctttacgttcttctgggcttggtatccttttccacatttcatcattaccttctcctcggctcgtcaatgcgtaaaggaaactgtcgagaggttgcgctcggcccttccagatgatctcagccgagaatccgtcgaacgaatggacttccagatcccggtgggtgagggttgggccgacgtgatggactccgactgggatgacctgataattggataaacgttcaaggagatcacagtggaacccgttttgacatcgagagagcaacggaagcgttagtcaatcttacttctttgtcatctccgaggctctcttctcctttcccttgtttcgtatcgccttctatccgtctttaagcgtcacagctgatactgagttggttgcgtggtctggatgatcagcttggctcttagctttctcggtgatacttatcgcttataatattggtcgtgggatttgttcttctcctacctgaaacaaacgaatcacaaaaatgaacgatctcctgctttccctcaacaaatatctctcgctagcactgcacactctgttctgtctgtttgttcattatcacatgtatctatatgatgtcccaagagcgcacgtgttttacaacttgttttagctcccacccgggacatacctctacatgtcgtgttgtgaagagggcctgtggaggtgaggaagtgaagaagtagagaagattgggtgttgatggactattctaagaattgcctagcgatatttcccaatacgattttcattacgatccctaatacaactcctaatacaatttcctagtgcaactcccttcggagaggaatcaccctcaagggggacgaccagaagaccaacagaagaccatcgagcaaacacatcactctctctctctcttcaatctcttggtcatcttgaggacacacactcactcacacccccgcttgctcccaagagataaacgt

SEQ ID NO: 69 - DNA, 4876 bp, Xanthophyllomyces dendrorhous
cgccaaagaaggggaaaaaaaaacaaacgcctttttttccctcgactttttctcttccctcctttttccttctccctcccgcacacattcatctctgtccatctggatcccgtcgccccgtccccatccgttctgctctctctccctctctcatcctccctggttctcttccctgttctcttcctgtctcttcatcgagacctttcccctcttcgtctcctctcctcgggcgatctcctccctctcctttatcggcccgcccgctcctttaatcaatctccaacctccccccgatgtccaagaccgatgacccgacggtcaacggtcaagacctcgccccggctctgacatcctacgactttagtaacggtcagactcacagccatctcgcacacaccacccgaacggtcgatcacccagccaaccctcctaccagcacgcttacgaacacgtcgacagtcgaccgacgcgtctcgacaaaagatctcccggacggatcgctcgacccgatgccatcgtcgtctggtccctccgttctggcggtgtcgccaacagacccatccatcttgtctcttcagccaaaaaagacggtcccattgataaactcgagcctggtcgaggaaaccccaactggttctggttctgcttctggttctgcctcagcttccacctctacgccaagccctgcaaaacaaaacgatccctcctcttccttaccagcccacgaatcgatagcccccccgtccaccacgtcgtccgcacctcggaagctcgatcaaaactacactacctcggccagcacggctacgaaaaagaagaagaagaaaccgttctcattcgcttccttccttccttgtctgtccacaaatgaccgggattacgatggagcccggcagcagccctcgtctgggtcgacccgacccatcaagtcttcctcatctgttccacccaccacgcctgctgctgctgctactaccacatcatcctctccctcgacttcggctcagtttccatcaggcaacctagccactcccatagcggcctcggccgctctagagccctcgtccgtccccgagtcggaacacaatgatctcaactcacagtcgacttcgtctcacccagccggacaaacggtaccgaccgcttcgcgaactcccgtcgctccccgatcgttcacccaacaaaaccaaacagaccctccccaggtgatcatccctccgccgaccccggtgaccgcaccgctggatgagaccgaaggcttaacctcctcgtccgtcgtcccccctggtttcgacccggcagcattcccaaacgcccactttcaccaacagcagcagcagcagcagcaacaagaacaacaatcacaccatcgccatcacccttccacctcttccaatggctcttcatcccaacatcctcatcaatcaaccgcgtacacatatcctcatcagcaatcgaccagaccgtctacaccatcacccccagccggcgtcctcgccacctcgtcctccgcctccgacagcttcgccgggacagactcggacgatggcaggcggtacgatagctcagacttagatcgcgacgcagaagccgacgccagtgagggcgagggcgaaggtgaactcgaaggcgaaggtgggattctactggacgacgaggagagcgacgacgatgtcggcctgttgggaggggttgggattcctttgggacctgtaagtttctccttgtccttcttcgactctgcattcgcgctcaccgtcatcctgaaacgtcatgctcaccttcttccttctcttttcttccttccccaacaggacggagaaccgagaccgctcctccctccgctcggtagtcaccacaacggccggaaatgtctcgtgttggatttggatgagaccttattacattcctccttcaaggttagttctcttttgtgtttctccttttcttccctccctctttcctctcgtttaatccatctcgcgtgcatcaaaagggtagaactaatgaatcattcttcttcttttatcacttcaaaaaaccccctgacctggtcgtgctgcctagatgattccccatgcggactatatcgtcccggtcgagatcgagtcccaggtgcacaacgtgtatgtcatcaagcggcccggagtggacaactttttgaaaaagatgggcgaagtctacgaggtcgtcgtgtttaccgccagtctctccaaagttcgtctttattccttgccgtccctttttacttctctgccaggacactccctgacctttcctctctgacctcttccgcgcccacacctcttctctgtccagtacgccgacccggtactcgacattcttgacattcaccatgtcgtcgcccatcggttgttccgggagagctgttacaaccataaaggaaactacgtcaaggttcgcgtcgtttctggcctgttgtacctgtgcttttcttgatctcgatgctgacgtcgtcctggtcctcgtttcttgtctcgctttcttttctcttctccgcggtctttgttcccctgtcgtttcgttctgccttttcccacctttccttacgttcaccatctgcaggacttgtctcaactaggtcgtccgatcgaagaaacgatcatcatcgataactcgcccgcgtcgtacttgttccatccgaataacgccgtgccggtctcgacttggttcaacgatccacacgattcagagctctcggatctggtcatgttcctcgaggacctttccggcgtaccggacgtcagaggtgttctcgacggagggatctgagtaacgcagacctggggatacttataaacaggaagagcgagaaagtgaatcttctttttctttcctacgggatggcaggaattaaaatggggagggaaagagaagatttctacaccacggaaggacgtgacgcagtgggtttctcctttgtggaaagctcattcgatcatgcacatgttatcatcattttcccttctttttattctgtcgtgttcatcaatccaattcgatgctcgtttctcgatagatcgcgtccctctccttgttcttttcttcttttctttgttcttatttgcctcgtcaatccggtcagccgatgacgtccggcaatatccataatacccacacacaagaccctcttcttttctctttctctctgcgttcacacttgtttcctcgtctcatgtttcttttcttccgacgtcgtcatcgtcgtcatcgagggttacttctttttaattttcatatgacctctcaagggagaaaaaaaaacacctttgcaaccctctcatctagctttactctaccttactctactctttatttacccgatttacgcacactcacatgcatacgtatacgcaaccatacgcacacacacacatatacacatacgcgcatgcatgcagtactctcctcttccagaatcttaattttaaaaaaatcctcctaataaagtaaataatcagaaccaaaaaaaaagctctttcgtctgttggtttgttagtttcgtgtttcgtcccctgctgcttcggatcgcgcctctgtctcatttgtccttgttcctctctctccccatgttgtctgagtttataccctttactctttcctttttttttcgttgcttcctactccctactcgcgactcttttcttcttcttcttcgtatctctctctgctctatcatgtggcttatagggtctccctttttacctcgttcttttcgatctaactctgacgtccggctgaagggaaagtccctcgtgccgaccgggtccaggtctggcctgctccataagactggccgatcgatcggccgactgaatcaaacacccgtttcgcgcaagactcgacgtacatcagatagacgtcacaaggagggggggagggggttccttacatgttagaaacaatgagagcgtgaatatatcgagacgttttggacgggacgggacggaacatcgtctggctctgcgcgtaggtctcgaagaggacgaagaagaagaagaagagaggaaaggtccttctgagaggacatgtcagaggtgtccttgttctttgtttaaggtgcggtatacggagtttaagaacgatatcaaaataaaacaaacagaaaatggactcggagaaaagaacggatggacaaacggaaaaacaaacgaaatgaaacaaggtattgcaaagaaagaaaacatttgggggggtttaaagagagattctcggcggaagaaaaaaaagcatcctcgagggataattgttccggaaagaaagggcggcactcagtagagatgtatatccgaacgaaccctcactcgaacttttcaaaaacacgttttaaacaaaaaccgacagttggaaaatccagagctggctttccatgagggacagcagacttccgagtgaagagtggggtaagaaaggaggggtaaaatgaaaagcacacgacacgtggcttggctggtgtttatcggtctttttccatccccgtgctttggatcaaggccgtgttggtctttgtgacaaaccaagagcctgagtacatggcacgctcttcttgactgtgtgctttccatcaccaaaaagaactgataatgtgaaatatagaagaagaggaaagaaggatccgcgtagatcggcgtatgtcaaggtgggtataatatatagagcccaggaacattccctcaagttcctactctcggtttattctctagttgtactctaaagtatatacagcgagaaaatgagcggatgcaacagaatatcagagaactgcaagtgctcgatgaggagcaagagccaggcggaggaggaggaggaggagggagggagttcaaggtagtatccatgcgggatggttccgggc

SEQ ID NO: 70 - DNA, 14653 bp, Xanthophyllomyces dendrorhous
ggatggttccgggcggttccccaaaattctgtaatcttccaatctgattagcgcggctttattttatttcaattcctcccaactctccttgcttcctcgtagcccatgctcctcccatcgcctccctgtattgaatggaatgaaaccgaacgaacgacgcctcctttcgatgtcttctggattcacgtggaagaaccgtcgcagcgagagggatacgcaatgtgttgtatctgttgactttcttcttttttagccttcattattcttccttcgttcgtcggggtttcttgtcctttaaaaaggccagcctcgttcagtcttcttcgttgaacagttccacaaaccacgacccactcagcatatccattcgtccattcgtccatccgaccgtctgatagattctttttaacactcatctatattcgtcgttctactcctctgcatccacttttctcttcacccgcatctttgtcccctctcgcacaccttctctcacacaagtcaaagaaagagaagaaagtttcataaacaataatataataaaacaaagattaaaagaagaagagtacagaaattaaagccatgtgttcgtctttgacttccgcccagagagcagtcgttcccgtgagcaacgctcttctcttctctttccctctttccctcttctttctcttctccttctcctcctcctcctcatgttgtcaacagtcctctgaccgaactaacccatggctcgtttcactcccaaccagtcatcttcatttgattctcctgcttccttctcttgctcatcaacaatgactccggttccgacgactcctataaaggcagaagagccaacggatgccctctcgtctgctctctccgctctttctttcattcctctcgactctcctcctctctccgacagacctgcactgcttcccagcctatcgtcgtcttcttcgatagaactcactgcgacctcgagttctacaggttcgagctcatgttcggattgttccgactgcgcacgaaagagcgagttgagagacatagaagagatccatctagatctcatcgcccaggccaacggaaaagcacacggcggcttccctggattccctctagggtctgtcggtcaaggcgcgactgccgctgcgggcgtaggagggagagctaggaagagaagagaaggaaagaagacgacggatgagtcgacgtgatcgttcggaaggttccacctctttcgacttgggcagcatcgtattgtttctattctttccatcatgcaacacaaaccatccggacccatccagcatttatttcgtttaatttcatttttctctttcaccatgaataataaacccccgtcatcctcttcttcctctccttagcgccatcttctatctcttgattcttcattctcttttctcatctcttgacctctgctcttcaaccagccatttccattattttctatcgtcatctttcgcatcttctcattcacgagttgtgttagtgtataaacttaaataccctttcttgttctatatatgttcttctcatcacatcgggtgttggtagataaagaacgaccagaaggatcaattacgtcataagctcaagagaaagaagagaggaagtcaacaacaggaacaaggaagaacgatacgaaacctaagatgaaaataagtgaaatcggagactgagagagaggaagtatgaatagagtttggtaatagaagagagcagaaatttggggtccttctcgggaacgatcgacctaggcacagcggcaacgatgatggtaaaggcaggcgtgagagatatacatttccgttcaagcagagcctccagaatagactttgccgaaaaccttgatcgcgaaaaagaaattgaaagaggaagaagagaaagtcagacttcttctattcttctctctccctgttagtagaagttctcaagaggcgaggaatcaaacagcccgacctttgcttggaacacgtcgtagagggagagcgcgccagcaccggctacacctcgtaggatatttgccccttcagaattttctccccatcagagtaacggtttttcgagcagatgatagagatcgagaggaagctgttagcatcatcgttcgatggaaaacaagggacaaaaagaaaaggcaggaaagagggacacaaaccggcccctttgaatagaacgctagatccttcgtgcttgacgacacttcggaaggcatccatcgtcgacttgtataccactccagatccagaggtcatcatcatcctccttcggactgatgcgttcgagatatttcaacaaccaagatgtaacgaaacggtcagaatcatcggtaggccaggctcaaggccgatgaagaacttgctagtatcgagagggtaagccgctagaccaccgatcgtagtcacaccccatccaaggatgaacgatgccaagaaggatccttccaaagatccggtcacgagcaccggcttgagagagtctgtccgtccatttcgtgcgcgaacagtccaagagtgtcagaagtcttcttaataagatagtccgagaagtggaaagacggcagaccataaagaccaaaagctgaacagcgtccaacagaaaagagtattttgacttgtcagtatatcaaatgaatattattaaaatggctggaaggtaagctcaccggttcctctatagacaatgatcccagcaacggagggctagtcaacccggaaagagaaagaaagaagagaagaaagcacaatcacacaacgcccagctctgccccgtcttcagcatagaagtctataccgatccccaagttgattgagcaacaaaatgagcttacaccaaaccccctgtaaagcccgatgactccatctgaagcaatggttttcctactgtagtaggtaaaccgtaatcatttagcgctcaaacccgttcaaacgaatcttttcttttatagagaagattgagcggaaatgatgagagaagacctactagacatcgatgatcccagtgaattgccgttcacccccacgagatgcgctctttgcatcggccgagagcctggtccgagcgtagtcgatactatatacaaagacgcctagcagacgacaagggaaagaaaagtcccacaagtatacatgtatgaatacatagtcaacgaatgtgaagataggatctgaagagttgcaagactgactggatgctgctcccgcactggctccagaggcgacgttgccggcgaaccaagtccaatatccctcggatcgcttgaacccaaatagggctttgaagtaatcctctataaagtagatgaccaaactcagatgaattgcccttcagttctggtatctgaaagaaagacagaaaagcagagcgtactgaaagcaaagttaagagcctgggtaggaaagtaaaggatgacgttcgcgccatttcctctccagaaagagatgatcccttcgttcctataagttttgactacgtccaacaagggaaaacatgatcgcgaaagagaaagagtaaggtatgctcttggattaaagaactccagaagaataaggaaacgaagaagcgccaaccgaatgcgtcggctattccagagaactctcctgaccggagttgaacgaggagctttactcgttcctatcaaccagcaaggagggagggaagaagtatcatcagaggtatactgtttctatgaaaaccaccgcaatggtactcacgagaggagctgcaacggtcttgctgatcgaagccgcgagacctcccattctaaaacccatggccgatatttcaatagatagacttcaacaaggtgtgacaaaccgggttgcgcttacagaaaatcaatctcaaagttggattttggttgagtagacatggacgaatgatttattgattggagatgttattcggcgttagttatgtgagatattgacaaagcttggtcagatatcagtttcatctcttctcagcacataggatacaatcttttatgtagcattttgaaacggaacggagaagaaaatcttgaaacgaggccgtgtgttcgtgaagttgaccacacacggtcaactccgattgtgcagaaggccctatcagtgaatttttggttcatactagagacacttcagcatgagcagttagtcccaattctgcagatctaatcttttccgtgttccgagagaccaggtgggtttggaatcaccatgtaggggagtgcattcaaggctcaggctgaaccaaaagtcgaagtacgtcacacagctcggacttggtcggatttgactcacgtggtgtcattcgccacctccgctccgatccagaacgtcagaggcacatggtccaaggaagatagtcacatctatcaataattctatattttaacaatcaatcgagctttgctagtggcgtttgagaaggaggagaaggcgttgatggcgcagataacgagaacgggttgttcattaacgttgaagggtgtatgatagtgggatgagggtgctcgtgtggccgtaatgaggaatgaggttcgggatgctgggcctcaatatcgacgactcgatcgccgacggcatggttggcataggagaggctacgtgaagacagtaaggaacgagcctttcttcagctttcttctagaatcactataaacccactaggggaaagagtgttgaacatactaggtattccatcctgtgacgcggaaatgatgggagaaaatcctgaatcaatatgtagctttgcagctcatgaacgaaataggaaacggaagtttctgacgtacccaatccgacgccctggaggaagagacctctatgtgccaatgggatgatggagtatgtaaggaatgctgtcggaatgctatgagcagtgatagtatttggttggatttaaagggtacaagcgtcaggtttaggagacatatgccgtctcttggctgaggcctgaaattaagacaaaaagggttccaactcacaaaagtacaccaccgctcaggtagattggccaaaatccaacttggactctctctattgcctcgtgaacggtcttgccctccatcaagctcatcacagacagaaacatgcttacactccacggaccccagatactgattgaatcagacccactaggatgagtgcatgaaacaaatggaccatcgaaagtcaaaacaaggtgacatacgtttggtcaaggaggacctttatataaaacataattcaaacgagtaagcctacaatgccgacagaaacaattcagtgaaagtctgaatgggtgaaagaagataccttgctaccaagagcactagctttgcttttgaactttattttatcaacgaacttgaaccactgtgctagtaccggtgcatggaagatgaatccatatgctgcgaaccttccggagcgggcgaactagaggtaagggatatgtgtcaatcgttaaacaatattcagcgtctctgaactcagttgatcggattttaaattgagaacaagaacctacgtcatgtttttcgtttctctcgaatatcctttgagagaggatgtccccagaagacatgatggtagctgcgactagtgacctggttgtatctagatcagaaaaggacaaccacggtcatatcttgtcagaacgattatttgcccttactgagctacaaagaggaacaacggtgtgtaaatctgaacaaaagtaacccacacggcctcttggccaattgaatattgtaccacctccagggcatgttagttcgttatatatgtttgagcaagtagtgtcgagtgagcgttgaaggtgagtaatgaacataagagaaaaaagtgaagaaaaaaaaagttggaaagattagataaagagtttttgataattactgttattcaaaaatacgcgtctaagctaagatagacgcgacgcgttttgaaccactgatttccatttgctcgtttgtgcttcttcaaaagcccagcacatcacccttcctactttctattcgctatgaatccgaatcggaagtcgctggcacccattgttcttgcgccgcacgcttcatctgttgctcactcttcttcctcgtcatcggccccacaattatccgcccaggattcttttgatggacgatctccttttgacagagaacgagatcgtctactgagcgagatttctaaggttcgttctctctatttgttttaattcttacttttcatgacatgggcctatagagttaacgtcagtgaatattatattaacaaccaccaacacaggacttcgaagaaatcttgggaaatgcaaacgggtacaacagaagattagaagaggcattgcaagtcggaggagggtttaagcatatggccgatttatggggtttgtccacttctatctaccacacttattgttcctcctcaattgtgtgttcttctctctgacatgattgtcgatcgttccatatatcgcttgcaggcagattcggggagctcatgagagaagtaaatatatcgcgttcttacggtccatcttccatagctgacatttctcgctcattcttaattctctatacttagggaaaggctgactacccagccaacccagatgatactcagatcacagacgcttcaacatcctccgtagcccaagatcaggtcccttcaaacactcgcttgaagggcaaacatacaaaataattatacaaatacactaactctagctctcggtcgtcaggaggtttatcatcagataggcacagagttgaatctaagagcttgttgagcaaacaagagatcaaatgtggcagagagtcgatggaaggaaaagcgtctggagcggacatcataccccttaaccagagagaaggcggcgatagctttctgtgttaagaattacatacatatgtttatctacccatgttatcaacagtcttgatgaatttcaagacattttgttgaacacgtaaagttacattctcgggtatcgaatcatgagcattgactggctggcgcttcgacagttccgtccttcgacagtatcttttccgtcttctcctctttcatcaacttcaataggatcccgatgatttttttctccagatcgagcaagataaactgagcattttggtttgtgtagagagaggttcgcgtacttgttagagaagatgggaggtcaagagagagaaggatctgaatagatagccgttttgctattattgatacacgagcagaagcagaagagtaagcggttgtagcatgaacgagaaggatccaatctcatttggcaagcgcatcaacgaacctattcttgaggatagtccgagagctatatcagatgacccggatctgaataagggtgtagccaccggtggtcgagtctatccatggcaagcagttcagaagagcaccaatgcaaatgtcaacattcaggaggccgagagcatatgttctacatcccagttaaacggatccttactcctacggcaggcattccacagctccactcttttcccaaattgacactgctggccctgccatccgaattggccgctccgacccaaagtaagagagagcctttaagacgagttatatgaaggaggaaagatggggaggatgggtcgagaggcggtaggagatgagtttcggttattatcgacgggcagttcatcttagcgcacaataggacgaggtcaagaaacgaaacgggatgatggcaagctaaatggctatatgtgtgtgatggtatatggctagaagagaggaaataacagaaaaggttttggcaacgcgcacgtgaatgatcagcgtcttttcccttgacttgtggcaatcccaacttgcatcatacgacaaccatcgactttcgacatcactttgctctcttcacatccttctttggtattttgatagagcacaccgcggtctcttcctgcaaaacatctctctatacattaggagatcaagatggattccgaactttctctcgaagagacaaacaagcttcgaatttctttgggtttggcacctctcggagaagggccggcaaccaatgaagaaggcgaggtcgttctcgataaagaacaagaggcagaggcgaactatcagaagcgaagagaggaagacacaaaggcagctgagaccaagtgagtcactttaggtttcttctcattaccccaagatgaagaggatgatatcggtctcacggttgaaggtggagaggattatcttcaattatacactcatcatccgttttgagataccatcagcactgaatctttactgaatgcttcctgttttcaaacagagccctccaggatcgaattaacaagtatgttccctcgtcctcactagtctccaagagacgcgtcttgtatctgatttttgggctacatatccttattctcacagagtcaagaacaaacgagagcttgcagcaaagttaacgggcactacccttggagaagagtcgaccggatccgctgccgcttgggcaaaacaggccaagaagaaggcgaaacagttagcagcggagagagccttggctgaaaaacgagcgaaagaccaggaagagttggatgagttagggaaggcagaattgtattctgaaagtaagttcaacccttttgcactatataccctgaatgctgtgagctatatcatcctttcaaacttttcactaattatttttcgttcttatttgtttttggtttcgtatagaggatttgagtggactcaaggttggacatgatgtagacgaatttgacgaaggagagcatatccttacgctcaaggattcacgtattctcgatggagagggtcagtatcttttacatattctccgtcttgccactctatttgacatggccatgttgtttcgtctcggttatggtttttcagaggacgaactcacgaatgctgatcttgctcgagccgagtttgatcgtaagaaggcagagctcaaaaaatcacagaactacaccggttacgatgatgacgaattcgatccctcaacgtcggcggtaggaatgaagaagaaagtgttaacaaagtatgatgtggatattgatggagagggcgaattggtgggtctaccttatcgcgaactgtctctgcgctcgcagcattcaggatgcttacatcagtatattttacgttgtggtgtgacttgtagggcttcagacttggtggaacagtggcacctaagaagcggcagttggcagaagacgaggacgatgagttcgactcgggtgtgaaccgaacacttcttgctggtggtttgagttatgaaagtgagatttttcctcaaatcactatcaaatctttcttgttcctttctttcttggctttgaaatctgaccgttaactgtatgctctgcgctcgaacagaaaacactgaggtgtccgattatcttcaggaaggagatatcggattcaagaagcccaaggtacgccttctccgcgttattagccctccgttttcttttcgccacgaaagctgataaatcacttttttgatattttttgaatactatggctgatcagaaaaaaaagaagcgctctgctcgagttattgaaattgatgaagaatctcgagctccgatctcatcaacaacatctccgaatggagaaggctcgatggaagtggacgggtctggttccggtccatccggcgtgtcaacgccgaacccgccggtagaaaactttgtggatgatgacgagctgcaagctgcgttggccagagaaaggagaaagaagaacaagaaagtcgttaagttgacagctgaggatatcgccagacaaggtacgttgttttcttatgaaccccactttatcgactttgttgttctatggctgggggagggaagattcttgttccgtcagctgacgtctgcaaaaccattctgaccccacagccgcagaacagaaagcagaggaggaggctgcagccgctatcgagcggaattctcgcgcggctgcgaatgacaacatccatttcgatgatacgactgaattcgtgagaactgtccaggctcaagaaccagttatcaaagtcatccggacgtccagggctgaagtcaaagaagaggaggcagacattgatctcaacgctatggctgccgatgggaataatggtgagggcgatgtcgatatggagggcgatgcagacgatgatgaggatgaggcactagccttagcggctcttcgacaaggaatgagtgtagctgagatgagggcaaatattgataaacagctcgtcaaagaagaagcgccagaacagaatttgagtgttagtacctgttgccattcaattcttggccctcttgtataacttgtcaactgtgtatatctggtgggttctaacttgtttctcggcttgtgttgtgatagatcggtactgctcaagaagcccatattggtcgaggaatcgccggagctctcagcttgttgaaggcttctggaaatctggccgcaccgacaggtgaagatgccgaccgagaacgaactcagaaggagcgagacctttggcttgctgatcgtcgtcgaaggttggctcaacgtgaattggagaggattcgggctagaggtgaaaacaaagaccaggcgacgagagagtacgagaataggatgagggaacagagggaagcggctgatgcgctcgagagcttcaagagttacaagccggacgttcaaatcgtgtatcacgatgagtttggtcgagagttgacgcctaaagaggcttggaaagcacttagtcatcggttccagtacgtcaacaattatttattcttcatctctgttatccaagagaaagaaatttcactgatgctcgtggttgttgttatcattccaattcctacagtggcaaaggttctggtaagggaaagactgataagaggctcaacaagattatagaagagcggaagcgggcggccatgtctatgggagatactagtatgagccgaaatttcaccgagaggcaggaacgaacaggagaggcctatatggtccttacctctggaaacaaagggtatgtgttgatctttccaaatataacacccctatcgtgcacgtctgacttgcatgtcctatttacaatatcctatcttcttacagcaccattggagaaacgtcggatggcaagaaacgaaagtagagtgtacagaacatacaaacgcgtgtgcgtcgggcttggatgagtctgtagtcttttgatgaacgatgaaggaggtctatgtcgtattcagatctgttgttgtccaaagcttcatgtgagaaatcttataggatctgtccgtgttcgacggggtcgctactcagacaaaccagagtgtcctattgtaaatgctacggaaataataacaaatacagagggttgatggtcaagaacatcgtccattgtgggggacacgacattcccggtgtggggggttttaaactattgtcgtcatatgtatgtagaataagagtaaccctaactttcccaatgtggaaaaacttgcagtcagatgattgatccttccggtcatgccggagttctccagccttaaaggcagcggggtgagtaagtaaatgtatcaactcacttccttcttatccatccatctaaacctaccttaccttttgtgtccgcgaaaataatcagtaatatgtcccttcgaaccaacttgctccgttctgctttgcgcgctcagcccaaagccatcccttctagggtgatggctaggcggtcgttcgcgtcggacggtaacttcaaggtgcctcccccctcccctgccgccgtcaacgcttccaagactccgtacgtttttatcgttttcgatctgacgtctcatatagtagagcagcagcacgtactagggactgatagagtcattcaactttaccttcacagttatttccttggaggattaggtcttgtcctcatcggtacgttcagaatgatcaccctgatcagtctttgacctccatctacggccaatcacagccctcggatttcttaacctctttatcgccatcttcatcaattcccttgtttccgccatatgtttgactgattcactggaactataacacacgccctgctcctttgaactcgtttaggtggtgcctactacttttttcagccgggggtatccgtcaaggatcagggcaagaaggttgataccgccgttcgatccgtcgccgcgtcggtagagggcaaggtcggacttcgacgaggaaaggaggactacgtcaaggtctacaaccgacttgctgagctgttggatgccgatgaggacaatgattatgacgatggtagctacggaccggtcttcgtccggctcgcgtggttcgttttgtcatgctttttgtctcagatagaccatctcttctgatgggtgatggagagatccttgtttgacttactttctctttctttttcttctttttatcaaaacaaaacacattcttgtttgcaggcacgcttctggaacatatgatgcagagaccaacacgggaggtagtaacttcgctaccatgcgattcgagcccgaagccaagcacggcgcaaacaacggtctgaaccttgccagggacagggtagagctcgtcaagaaggagtttgactggatctcgtacggagatctctggaccttaggaggagtggctgctattcaagagatggccggacctcacgttagtcaagggtttctgtctttgtttgtttgattccaacgcgaaggatatttccagctgacaaacatctcgggtaatcttgatcatgccctctcaggttccttggaggcctggacgaatcgatggattcgagtcagatgttactcctgatggccgactacccgacgcatctcttgcccatgatcaccttcgacagatcttctaccgaatgggattcaacgatcaggagattgtagcgctcagcggagcacatgctttaggaaggtcagtttatgctcatttcgtcgttcatatatcatgacctgggcactttcattgaatacaattctctatattgttctccaggtgccacaccaaccggtctggattcgacggaccttggaccttctctcctacaacctttacgtaagtgtttgttaagctattgacatgccaatgttgtctggtcttacggtctcctaacttgcgggttcctctatagcaacgattacttcaagcttttgtttgacgagaagtggtcttggaagaagtgggccggaccaaagcagtacgaggacaacagcaccaagactcttatgatgttacccactgatatggtgagttttcttgtgttctctcttcttgttggcatcaaatcgaaagttccaaaataaccgactgcatttatttattgtgttaggctatcgttaaggacaagtctttccgaaagacagccgaagcttatgccaaggatgagcagcttttcttcaaagagttcgtaatctctctgttttctcttacttccgatgttctttacagagagtagtctttgttgacatggcatgatcaacatattagtttctcggctgtgtttgccaagttattggagcttggtgtgcccacttcccagtgggcgggagaggcttggacgatgcccactctggatgagcaggcagaagctaagaaatcggcgtaaatgttaccatctctagttccgatctctgtcctgccctgttcttctcttctggtttatccacaggttccttgttttctgagctctttttatattttcgggtatttgtatcatgaacaaagatatatgaatctggtttgtttgtggaagacgaattcgtgtgaagtttggctatatcatgcacattgaagatggatgtcagacttgaatttcttttctcgtcaaccaagtttaaaaaataagaacgattttcgttcaaaaaagatgttccgagtagccgtgcaggtttaggtttgaagaaaaatgagaagtggatacctcaaaacagaacaataggatagaacataacaaaacaagagtatcactcttttagtctctatagagacaattcagatctagatactgattgagtatgcctgtgaaggtttgttataggttcatcttgttttcaccagttcgctccatcaattcggctcttggcatggcttttttttctttgggggcgatcgccaaagtttaatgagccgtacaggcatactctctacgaactccactgagttaaataaaacttttgaaaacacacgctttgagtgcgccccagaggtttcatccggtatcaaaaaaacaagagtgacagattcagaagagaaaaggagatcaatggaagaaacgaggatgtttgatttgaatttagcttcagcttggttcttctttccgtaatcatccattcaatatcatccggaattgaatgatcgccttttatccagctttatgggccttggcaaagagagtcagctctcttcatgcctaatctttctggctcaccggatcctcttttggtcaaagcttctttgatggtatcgtgtggatgatcgcggctcaggaggaatgtcacatatgttgcttgggtacgtgtgggatagcccgggagtttctctcattgtagatctttccaaaatacgcgaagagaacaacagagattgtcaaaattcgaggcctttttaatcctattctgtttaataaaaaatattctttctgtttt

SEQ ID NO: 71 - DNA, 12549 bp, Xanthophyllomyces dendrorhous
  misc_feature (11990)..(11999): n is a, c, g, or t
gttatcgagtgatctgcaacacgtttccctcctcgaatgggtccttattcattcttagtcgacgctcacggtgggaagactaccgacgaaagacaaactggctaaaaacaaacaaaagcgggagagaacgggctgaaaagaaaacttaaatggaggcaaatgaaacagaagaatttagaaggagagacgagcgtcatttgcctctgcatttcacgcgaaccatcgtcatccccgttcactaaatacccacggatcaccactcacggccttagatcatagagatcaaaccccggctaaaaagcgttatatctcccgatcatattcaaaatcatataaactccgatggcgtgtttcaaacctttaacagacaataagccgttcaaaaatagtatacttctaggtgcaaactccagaggcgctatagttagattaaattcactcggtccagccgatatggacggaatccgagcaagaacctattggctgaatgtctctcttgtccttccttaatctcttcgaccaaaattcaggaaagaaagagggagtaaagataaactccgtgccttaccggttgttcggttggtcttggatgaacacataccttctgcacagcggcgaagcacgagaaaaagagaacttgcccttcatttcagagatccggtcggctggtcggtctttctttggattgtctctccatcaatcgatcgatcccatccgaccctccacctcttacttctgaagctgagcgcgcgcgtggtccccgtcccgaacgcccggacagcgttcaagaaaatccccgaagagaaggtgacagccggtatgaatccattctgtttccttttctctttctttccctctgtacatctcgctctttcggttcatttgacttttctcacttctgtttctttcttcccttttttttcgttcttgtgcttttctacccctctactttctgtaggttcaccaggttaaacgaccagagagcgcctgatactgtccgatggtcataacctagtatcgacttacgttttgagcttttctttggtgcgagcatctccttttcttgctaaacctcttcactcaattcaaacctttcgactccttgtcttcttccgctagactgttttctttattctccgaatcgatctctcaagttccggcatttaaccccagcccccttttgggactaatccgtcacctcataacccttctgtttttcctcatccgatccacacgccctttccattccatcaacccttggcttttgtatgggtgactccaaaacctcacgcctcatccagactgaccggcctccactgccttcagggacaacccgtcacattcagttggagacggctaaagaagtcaaacccagatcaggcagggtgcgtttcgttttccttggtccattttgatccttctcccaagttcctgtttgaaagggcgacacgtgcatgtacgagttcattcgtttctttgtcaacaaaggataaaagattttttgacgatcaagccttgacattgaatttatctggttgaacgactgcaataacacattgagaaacctcattagactacgactgacatacgttctttctacttttcttttccctcccccttttctgtctcttcttctttctctttgttccgtccaaaggcctcagcctgtgcttgtaggccatgtaaaaagtgagcatttttcgcttctgaatagtccgcgctcttatcccgctcggaatcaaaatgttcgcgcaggagagaattaaacgaatcgcttgtccgtccttctcgggacttttcattctttttatcttttgctatccattttttcccgtcttcatagagcccatctcgcctgtgatgatagtaggccgtgcaaaagatgcgtcactctgagcaaagtagacctatgtgtagacgttgttgtaagtttcggtcttgtcggtctgttttgcaccgagactagctttctgattttcctttgtctctggcgtgggtcattcatccttcactcctctcctttcagcaaaagaagcggggacgaccgaaacttcatgccaatcagaactccacatcagccaattcctctagatttcgaacgcctccaacccaaagaggttcggttacgaaccgaacctccagaatagcttcctcccagtcagtccggcaatcgacgtcaacatctcctcagaatatagggccatcctcagctccaatgtcaagagagtctagaccgctggctcaccaagatattggctcgtctgttctctcatccagttcgacttcatacggatactcctgttctgccgatagttcactgtcaccacgaccatcactagcatcaacaccagcgacaactatcacgttgatagccaccaccgatctgtacattctacgctgttcggcctcgtcgcttcaactcctaggtcgagaggcttcgtcgatgagccaccggtggctctcctcactgcttgtagaggatgatctttgggcaaccgaacagatcagggaccctctcacatatcctaccggacatagagttcgaacgagtcggtcgatcgaagaactgatcgagagattagatgacgccatgttggagagcccagtagagggaacgtcgtacccggatagagatgttcgactaaagagagctgatggttcatgggaagggtacaacatgaggatgcatcttggtcgagcaggaggtttagatcttgggttcgtttccaaatcatcttttgactatcgattaggccccacttatggcgtacaaagatgttaacttttttggtgtcttttcttttttgggggtggtacatctatactcttccagagatctaaacacgtattcgaacgcatatatagtaatctccctgcttcccctcctatcagcctctccgttcctgatcgcccaaacatttccccagccaaatcaacataaaaaagacgacgctcgttcgtccagtcactatatatccactcatccgagtccatcagccttctctgagcgaccaacacataaccagcttggtccttcgacttctaaccatcatcaccaccagagcaataaaaacggcgttctcattcctccatctgacatcgagttggccttcacaccggcatactcgctcagccagccgattaagcaggaccgaccgacattgccgccgatagcgcttctcacctcaaccttgccatcagaatcccagttgaatatcaaccatccggggcaactccgaccaatgtcttcgccttcttactcaagctcgctattccgtcgacctttcgacaccgatctaccggaccgagggggaagatcagacggaagaagagaacaagaacacggagtgcaggcaacctttttttcatcttcggcctcctctttcccttcgcgttcttcgtcgtcctcgttttcgtcttgtccatcctacgctgtctttcatgcacccatgaatcagaccatacaaccggttcatcctaaccgatcttcctctctggtatctttggtatctgaccagaggtcccccccgttcctctcaaggcgttcacacccgaattttcttccatcgacctatccttcctcagcctcagcttcttgcccattaaaacggccatcggtagacttagcactgagcgcgacccaagctcaaagccagagagactcttcgttttcaacagcctcatcactctcggaaccttggactagaccctcaacctcgagcgattcagaacgaagaagttcctcaatggttgaacttccaggtctcgagacgttattttctaatgaatctggacctaggcctggttttggaaccggctcaagatcatttcgaactagaaacgtcggccttggtgatggcggtgatgacgacggcgcggcaggaatgaagacaaggccaagtgagttgaggatatggagaagtgatgaggatgtcaccgggccgttgaatggtcggtcttgaggaatgtctctattctctaattggtttctcagacacacatagacatatacatacacaaacgctctccctcccgttcatctttttcctttccgccgcatcacatcgcatcgatcgccgcaatataaaaaaatccaaaggagtgctactagtttcctagggttcacagataatcccttcattccttatagttctggacttgtttctttctttgcatgtactataaacatatcttttattcgctttcttcgctttatctatctgtctatctatctatctacctgtctatctatctatctatcttttgtccaacgtattcatcccaatcctttccttttgtctttcgtgtatcatcgttctcttccaattctttctaacctctcaaaagatccattttcagtcttaccccattttgaatctcctccgagcaactctgcgacgaatctgtacaagcctctgtcagtacgagccacagctggttttctctcactttcaatagacaagtcatgattcttatggtctattctttctccacgtgagatacattgatatcaaaaatccttaatccctaggtgctacacggataaatacagatggtttcgttttttgtttgtttattcgtttgtatgcatgatctagtgcttggcatccaatttctgtagagattaaaacgagaatgtcaaaacaatggactaacgatggcaaggaaaaccaggtatactggagatgatgaagaacaggaaggagcgggaaaagaacgaaccttgatggcgagctcgtcctcaatctggagctgctcgtcaataacggctcctcgggaaggctcatttccgtgggatcgagcggcctcggtagcgaggggctcgggctgggcatcctttcgggcctgctccttctcggccttctcagcggcggcaagggtgttctgtaagagcagcgaaaaagaaaatatctggtcagactatatcgccgtggaagaaagacgaaagggaaaggaaatggggaatatcagactcaccttgatggacctctcatcggtcttgtccaagagggagtgagcgttctccttaccctcctcgaacttctgagcgtgagcgtctcggatctcctgctcctgagtagcctggtgctgatcctgctgggcagatccgtttccgtggtcggtgacagtggcggcgggactacacgaagaaaaggaatagaaacgagatggagccggatgcaatatcacaacgtgttcagaatattgcaagggaaagagtgggaggacgagaacagaacgtacgacataatgattagtttgttgttttgtaagggtaaaaaggggtaattctttgaaagtagttttgagtggtaaaagttgatgaagaatagaaagttgacccaagggaagacttttctggcctttatactaatcgagactttgttcgagaaggcgaagaaaagaaaaaaaagcgccccagtgacgatgtgatgacgtaactgatttcaacccagcgagtcaaaactcgatcactgggcaaccccagtcatccaaacgggggctccctcacggcctgaagtgcatcaagcgatggttgttgtctatagacgaacgatacattaatatcacctttcatctcaaccatcgttgcttgccatcttgtctcttgaccatgacgttccttctttgccttcctgggcgtgcgttttgtgttggtttgcctgtgttaattcacctcagcttaccttgcattcatactctttgcttacctcgcctcgcctcgccttacctggctttgccttgcttgccttgcttgccttgcctgccttacctgccttacctgccttacctgccttacctgccttacctgccttacctgccttacctgccttacctgccttacctgccttacctgccttacctgccttgctttgcttttcttaccccttgtttgctcacatatcctccctcacctcttttggttacttaccgccctgaaacgctgatctttcaggcatttgtgcctcttttgattcctcgccctgactgactcggcaagttttttccgacatctcatccttttcctccttgtttttgttttggtcatatttctcccctcttctacctatctcttgctctgatgatgcgtgcctctggaggcttccccttcccatacctcgatggtttataacaggatcgatattttttccgccagactcatctacttttggctttcttcgtccttctgaacaaaacatctaatgtcgcaagtaaactttcccctaggcaagacttggcctctagatatccagctgtgcattctctcccatctgtccaaaccgtccagacaagaagcgtgcgaatcagatatagactgggaggaaattcgtctgataaatgcccgtctgttcaatttgatgttcgtcagttgggactggatggtgagcaaacccatatttgtctgcttcatccgattaggatgctcaacctgttcagatatctctttgaccctcagatttatgctcgacgcctgctatatcagacgatcgtggttcagggggaggaccaactgcaacgattcttatccacacctatccctcttcgactgctttcctacaccataacattccatgctatcggacgtcatcacctccctggttcgccgacgtgcattcttgaacacataaccgacccatttagtgcgatgagcaagatcgatccgtggacccgagtccacgggctccccaaccttaaacacctagccctcgattggccacctccagaagagattcaacgtttaaacatagaccacggtcactggctatcccagttggtcagcttggagatcacccaaagagaagggtcaaggacgtgtcggttgggtcttccgccggtcatgccttgcttgaaatcacttatacttcgagggatcaatcctgtgttgggtacatcccttctagaaagaacgtcttttccttgcctttcttctctttctctatatgttcaggcttcatctcatatgtcgtgtaacaaagaggaatctccaccggccgccaagcgcgtgctccaaatcgggttgtgaggggttttatttattgtactttatattgggtctctatcaaatgtattctatattttgtaccttgcgcctatatgcggatatatatggtcgtcacttaatcctcatagaatcaattcagagaaccttgtcggattatatgttatttgaagcgagttctagtggctgaatggttttggatgcagtgctagctttcgtgtcggctcggcctacgccgtggtttccagttcgctcccaagcatcgctctcgtagaactcttgggtcctcttcttctctaatcattctcccatacataattccttctcatccttgctttcttcttattctgtttctgcttaactggattcgccctcttagcccatcatgctggcccatttgtctttccttacagttgtccttgtggttgcatacgtgagtgacctgtccttctgtgttggcttctgtcactttctatccggaaccgttcaggctaactcatcccgtctcctttgtctttgtgctatctggaatgaatccttcatctgcctcggttcaaattaactcgcttctgctgaggacatgttcgttagctctttcacaggtatcagctcgtttcggatcatctccttccgtttatcaggagtcactacccacggttcaatcagtattcaccactaaatacattcgaggaccaacgaaacgccggagtacgtctttctttatgtgatcagaatctttgctagtataaacccctagcaatttttcaagagttcctttccttgtctctgactcaagcgtcttctttgcttcattactccttgccgaaaccacgtgtgttcgactgggaaacaacagctttcatcttcaaactttgatctagagtcaaacaatatggccgctggagactctagacaagggcttgatgcagctggaagcgctgaaattcagcggatcatgagagaagaaggtgtctcgttcgatgaggttcgtgttccagacggcattttcttgcttgaggctacttgttgtcctaaactaagggggctcgaaggtgtgtatcgatggagagcgggtaactgacataaaggaggccttcttcttgtcctgattctgtcgaaccacaaccccaggctcgactcaggagacatcaacatctattggctcgaaataatgtcgatccgagcgggatgcctttggactcgaaagcaatcactcggctgtagtcgaattcacatccaaattctattattccgacacacccgccttcttgaccctcttcctgccagatccctcttctttctattattctatccttctattctgttctgttttgagaagagatagagactttagaaatggtatgtcgcgcctctatctatgggtttccatctagcatgtgagttggcacaagtacaacgaatggccgacgtccgtccctttctatcatgtcgggtctggtttatgtctcccttctctcggcttggttatcttcttctctctctatgtattcgaccattcgcatgcttttcggatatccttcctacaggtagatgtatatatatatatatatgtgcgtgtcgatgagtttagccatctggtaagagtgctagatcgggcatactagatgagacgcggctgataagatctgtacatgagagaaagactttggccatcctgcatcccgtttcatttcatcctcaaccaaccaccacacattcctccatacaatcagacatggttatggatctcagctgagagcctcatcgaacgctgactgatcaaacaagccatttaacgactgttcgtcaagattcttctctcctaaacgagacgttcagtggtgctttttatctgatttagatcagctctatcacaggttctgctcaaagggaccgttcatcttcagcatctttcaccttgtagaacgctatcttaagatcatatagcatcggctttctttagaatattccagcagacaagaaggtgagtgctctctgttcctatcggcttcctgctcctcttttgttcttttgattgactgacgatagtcgacatgttatttaggtctgatccttaaatcgaccagactgccttggttaattccctcctctcatcttatcttcttcttcactatcctcctccatcttctgctttcaaatgccacgagcgacccttccttcaaaccaatacaattgtcaaacagacgatacaaattcttctccgctccaaccgtcatattctccttcgatccagaacggcctattgtccgccgagaacttacccacctcgagttcctcttcctcttcacccgacctgtacctcctcagagattccggcacgtcctcttcgtcttcttttagctctctggccagtggatatcatggtttccgttcggaaggtctactccatatcatagacgactcgaatggtcactctgggtcggccagaggcgatcacggaatcggtctcgaaacagagctcgaggatgggttcgcgaggctgctagtgatcgatcagggcccgaaggagaccctagggatcggtttaaggttgagcctcgagacacaggccgatgaggatggtcagacggctgatgaatcgcgttcgtgatcatttctacttctcccttccttccgtcggctaatccggtcttttctgatctcctgcatacgggtgaatcttactgtttccctctctttttcttggatctgactggcgggctggaaattcacccggatgcaccgatactgcaggctcgttgaatatcactcagaaaacaagtcttcttgctccgaaccatcttcgtctctcggattacacatctgctacgacactaaaacccaacctctccttccctccctctccggtgtcttcatcttcgatagagaacacaatatcatcagccgcctgttcatcctccccttctgttccacagactccattcctcagacaggtttcttcaagatcgttcgtgtccaccacgactacgaccacgatttcatgctctcctgttcaagcgtatagttcattaccaacgacttctcgaacgagtgtacatccgtggcagatagagctggccaatcatcagacaggcacgccccataagcgcgctcgagcggccagcgtccgcagtttccattctagtgaggaggagcaagaccaggaagatgacgacgacgactactaccaccaccaccaacataggttgagaatggacaagccggtcgtcgacattgccgactcgtttggggagacctttccttccatccctcggagacgaggtcataccactcccttacctcagtcggctcaacgacctgaagctagttctattcatagatctccagacctttctactcgggtccgtcccggcttccaaccgcttacttcgacttcaggtcgacctctaaaagggaataaagacagggcgagcggtcctactaaatccgctcctaattcgagcttcaatctggctggtctgaatccgcccaggccttatacacatcgggcacggtcccgatgtaggacgagttcccaaccgagcccagtcgctgagcctgttcgttcaggaggggggttccgccaggaagtagcttctctgttcaagagttttgatacggctgctaccactgctgcctctgcctccgggtttcgaaccggcgtaagacatcaagatgacccttcggaccagacgtcatcttcttcgacgttggcgtctgatcaagcatcgaagatgattcctcggacggtaactgatctgatcaccgcaccggtcataccgattgctcaaggatttaccctactcttcatttctctcgctaccgtactggccctttcgacaatcatgatgggctcgtatggtctaaccgcctgggacgaagctcgaatccgattgagagacttacagggccgagtacaagaaggaactagacggattggcgaaggcgtaagagagggaagaaagctcgtcgattatgcgatcgaaggtgctagagttattggaagtgaagccggtgtcggcgctgatcgatttgaaagagctaatatgaatccggataaactcactggacggccgagaagatcgagcttcattagttcaagtcataccagggatcatccgttcgagcaagttcatacttcgctctggaatatcatcgggcagatcatccctataaagatgctgaggttccagtgcacagattcggcgatggcttctcctcccgaaggtgagcatcttcgaagaagaccatcgaagagacctgcaatgagtcagaagggagcaaagtcggcggcttcgaaggattccccatcgttatctgccttttctccttcagcatctttcttctcgccttcttttctcccaacagaccgcgcggacgtcaataccttcacctcttcggggacttctacctggacgacaacgtctaatagatcttccaagtattctttccaatcagaaatcagaaacccattaacggaccgatcgaccactcggactttttcgtcacctcttttgggaagtcctgtaggttcttcaaatccatcaggccgagctccgtctgaaagtcaacttaggtcaaaaacctatccacaataccaaccgaaatcccaatctcaaccgaaatctcaatctcaatctcaggcgaaagccaagaaacgagcgcttccacctcgaccgccattgaaatggttgatccctagcatctttctaactctgctagtcgcattgggcgcgatggcctatcgattttttggaggcaaggctgaggcgcacgtaggtaaagcaagggagagggagaaggcaagggagaaggcaagggagaaggcaagggagagggcctgagaaagggtcagagtttgagtcggctgccgatgccgcgtttgaagagaaatgtgagctagcaaaggactcaaagtgagcaggcactttatcgaagactcccttcccggtcgtttcgtcatttcttcttcttcttcttcttcttcttnnnnnnnnnntttcttttctttgtttatttgaagtaaaataaaactatcgaattcttcgaatgcgcgacgtctctctacagagacgaatgcatgtatatccctcatctcttctattcggaaaaaaaaacttttccgtgcttttgttccaccatcgtaacgacctcaacgatcttattcattcagctatacgtatatgcatttactgtaccatttgtagaacactatccagtctataaactccgtcaatttatgatcaccctctatccatactcttatccatagccttggttgacgcatcaaattcctctcttttctttttcgcctccccttgtttatacatccagaaagagataccgttgcttctgtactagtatgtaagattacactctgttcagtttgtttgtatattgcaacctctcgtatctcgtacgctctcttctcaagattcttctatctctcctttctctgtaaggcgtccgtttactctactagtctcttcctcttgtgctttctcgaaacgagtcatggactgatcatgtatgctcctcaggtccgacgg

SEQ ID NO: 72 - DNA, 6783 bp, Xanthophyllomyces dendrorhous
atatatatgaatcctaggaaagatagagagtgataatctttcaatttctaaatctatcgatatatatccgtatttgacgcatcagaggagagaaacaaatagaccaagaagcgagaggcgagggaatacgaggagggcaattggaagaaaaggggatctatcggctgattgtcgtttgaaggggcctttcttctttccttttagctattactacagatgatacaacgaatgagcctctaagacgattaacaatagagctgagctcaaacgagcggcaagcaagaccgatgaacgatgtgagggatgggacgaaagcgagaaagaacgaaggaaaacgcagacgcaatgagaaaagagaggaaacgtttggagaaggccctcacttttccttcaaagctttggtttttcacccaaggcaatcttttcaacaggtacatctccgcctagaccctctttccaacctgggtcttcggttgagtcataaacgatgaccggaggttgaaccggtaggtctgtcgagttgtcaaccagacgaagtctatctatgaacgcttttccgtccgatgaaggtttagagagtgtttgaacagaaacaggtgatttaagtcgggaattgtgaatcttgatagacgaaggttttatttaaacaaaatcaacatgaaaaatcagatgtcagcattcgagctaagcacttctcttcttttcaaagcataagggaagggagaagaacaaccaacctgtgctcgagaaacccgtcttccagtcttgatcctcctcttctccgctcgatgccacatcacgtcctcgtctctacaaaacacaaacaccacttctaccagataaccagactgtctgaactctgtcatcacccctcggaaccaatccgaacaggaaagagagccgtcaatgacgactgatcgatgctgttgcctagcaaccgtggtgagaagttcttggagaagagaggcttcagcatgaagcaaggttgatgcgtcgtcggggtttgagagcaagtagagaggtcgttcaggaagtaactgggagagtttatccgggtctatcctgtagagtatcatggtatcatgaacaccagtgaacgagatacagtcgtgtgagcaagaaattgaacgatccttctatacgcggtctgaccagtttatgatctatatgtttgtttgtcttgaggtaaggaatcaaaaaggaaacatcaagacataccacacgaaatcatcttccagccgaatccttccatcttctaagaaagttctcagcacatgccccttcccagcgcccatgcctccacttgtgaacaacgcgaccggctttgtcgaccgacctagttttgtggatgttccattacaacatcccggctccaaaggatcggcctgtttgtttggcgacttacaaatcagtgttgaatcctcctcgcagtccgagctattcgtacagctcgatgtatctttgccacttgactcgcgtcccgtcgaagaattcgaacttggtgtcggtgatcgagaggaaggatgacagaaacgacattcttctttatgtgattctgctaacacaagcgagacgatctcgtcttgaagcctatatagttgagtcgaacgcacaaacaagcccaattgaaatcggttgttgaccaaagaaggcgaggaagaaagaaagagacagggagagaggaagatgaatatgcagagacgcacgctcgccgttccggacttggattccgatgataagtataatccaaccgacttctcgcaaacccccatggtccatcatgcatctccggtcttgccagctcttctagactaagattcttgaaatcagcgtacagatcagaagttgaccgacggaggtcttcttgtgttagaaacggaggcgggctgccgagagtcgtcggagaaattaaccggttcggggatgtgaaaagcatgggtgaaggaaagagctggttggttggcgagagagtagtcggtttggatggaaacgagatacttcgagtaagccggattggcaagttgaatttcgtgctatcgttgtcgtttcagcaaaaaagaacgggagatgaagaacgtcgaaaacaagagaaggtgaaggaaacgggcatggagcattaagattaaaaccaaagaaatgttagttagcaagaataactggccgaaagatatagatctgggcttatccattctgacaactctctaatcttgagttgacaggtcatgaaagaaattgaagttatcgagagcacatacctaagtagccgcaggctgaacatcaaacaagagcaccaaatcgagctcggaattaaggaatgaagaagataaagagaacggaaggaaggttagtcgtaagaaagtcattggttcgctcggcttcgtctgacgttgtcgtatgtcacgtgatcggcaggcccacgcgcacgcaataagcagctcttagaatattcagatattcagacattccggcattccgttttcaagtcgaagagtaaagatcatgaaatttgtgagatgtatgtatttatatatatgtgattggcagacaacaagagatgctccaacatagaagaataaggaggaaaatgatggtaacaacacagatgcccgaatgcggatcgaaagcgaaagaaagggaattgagtatgagtttacaacaaagcaaagaccagcatgaagtgaatggaagagataaagagatagtccccgagtaagataagaggaagagaagaaggcgtctagattaaatctggggaccagccaaaagaacctcccgcgacacaccatcctcgtacttcttgaaagcctggttgaacatgccagcaagcttggtgacctcgctggtgaaggcatcttgcgacggccaggccttgagagggttcaggatctctgaaggcacgccttctacggccttgggaatggacaagttgaaggtagggaagttttcgtactcggcattggcgagggatccgttgtgaatggcgtcgacgatggcccgggtgtatttaagcgggcatcgtcggccggttccgaactttcctccggtccatccggtgttgatcaggtaacagtgagcgttggtggccgacatcctctcagcgagcattttagcgtaccgagcagggtggaggacgatgaagggctgtccgtaacaggtagagaaggtcgggctgggctcaacaataccgtcctcagttccaggggtcttggaggtgtatccagcgataaagtggtaggaggcttgctccggagtaagcttggagattggtgggagaacaccgtaagcgtcacacgtcaagaataccaagttcttgggttgcgagtgggagagcgaaccaggcttgtggccatcaatgtagtcaattgggtaagcacatcgagtgttctcggtgatgctgacatcatcgtagtccggcgctctgttggccgggtcgtaaaccacgttctctaggatcgatccaaaccgaatggccttgaaaatctcgggctccttctcagcagacaggttgatacacttggcgtagcaacccccttcgatgttgaaaactccggtatcggaccagacgtgtctgagaaacaacaaaaggtaagcgaggcggtcggtagaggcgagatatacagaaaaggatacttactcgtcgtctccgatcaaaagtcgcttaggatcagtcgagagcgtactagaggaggaaatcaaaagatagattagtgaatgaaagaagaggcatatacaatcaaaaagcgacgtacgtctttccagttccactcaatccaaagaacaatgtcacatcgttctcgtcaattccctcgttggccgaagagtgtaaactgagctgtccaaacttgacgggctggatgtagtgcatgacggagaacactcctttcttcatctctccggcgtactcagtaccgaggatgaccatctccattcgcttgaagttaatctcgactgaggtagtcgaggtcataccggtggtgaatctgttggctgggaattggccggcattgtagatcgtgaagtcgggctctccgtaagtctcgagctcagcctcagtaggtcgaataagcatgttgttctgcaggattaacataaacaaaaaagaatcagtcttggcagtactaagaataactgcattgcacctatgaatgcactcaccatgaagagggcgtggtacgctcgggaggcaataactcggaccttgattcggtacttggggtcggcaccggcgtatccatcgaaaacgtctgtcgaaaaaagaattgaaaatgttttctttagcgacagcgcaaaggatcaagcaaagcaggaaagaatgatagtacttacagacgttctctcttgtatttaagtaatcaatggctcgctctcggttgatctcaaaagtgtgctcgctaaagcaatggagaggcaggagcgaaggtcagtagatggttcaacagtagctgaacctcagaaaagtagaatgtaggacgtaggacgaactccatcttgatgtttacagatccccaccaaacatcgtctttgctggtctcctcgtaaacgattcgcttgtccttgggcgatcgaccagtcttctttccggaaaagttgatcagcgcaccggtgttggagatgatagctccttcgtttcggatggcatcctcgtagagggtggcgactggagcattacgcttaacatctacagagcggcaggagagaatggaggacaggtatcagaagagagtagctgtatagactgggacagctagatcaggcgacttacggatcttgtccctacagtgcgaaaagatgagacaaaaaggatgcgcgcaagagtagatgcatgaattttgttagtgggttaggtgaccaaagattcaggcgcctatgtatgaccgtctattgagagcaacaactgcttacatgtcaaacccggcttgggacaacgaagtgagctcttcaccgaggaactgtttcgagcgggaagtacaagcgagagagcgatcaagcacaagagccgggtaagctcaaggtcgtgtgcttcggaagacggactgagtgataagcgggggtgaatcttaccttgtagttgttggacattgtgaaaaagggctaggactgagatgggactatgtgtatgtgtgtgcgtgtgtgtgtgtgtattctgaggttaggcagaagggcaagggcaatgatgaggagaagaagaggaagtcaaggatggatatggctaaaggggtatatataccatggacgatggtcaatcagctggtctggcatcaaggagcggatatggaacaactgagaattctttctaccagaggcttaacccgaaaacggaagacaccattgttagctacaagagaatggaaataagcacaagagaggcatcattaagcgggtagaacatcagcatctagagcaacgagcactgagagtaggagcaacatcgaggtatcgtcagcacgagcagtaaagcgcctgagtgaaaggtcattcaagctcgggtttatcggatatcggtcagagccgggtatcatcggcagcactcgagcgagatgtaaccaaaatagtctttggcggattcccgctcgctggttgtggtgtcgtggttacgcaatcaagctactcgagatcagccgactaaagccttgattacttgaaccgggtctgtgtgtcagaaggcggtttgacatcatcacctcttgcgcgcgctgtctttcctcccgtttccggatcgatgttgcgcgcacacatctctatgtactaacatcatgctgatcaagagataacactggttgcaacactccgacatgatgatatggacgactgatcggatggatgctgacgatgagaccttaagatctcataaccacaatgaaccagtctgactatactcatgcccatgctcatagacacagacacaggcacaggaacaggaacacgcgcccacatctcttcctgttccttccttcagaacgacaagtgtttccgccctggaagtaagccacgggcaaaaccggagccgaacaatgtcattcttcctacaagagacatgccctttcgtgtgggcgtgaacagatagtgtctggctcggaatggaaaaataaacgatacaaagaaaagaaggcatgttctttccatttgtttgcttcaaaatacttcatgcatctccatccaacgttatatccgacgacgttctcacccgactgttcctcagatacgtcggtcggcctggagcgaaacatcgggaaagacttccgaaggcctcttgctcgatcccacaagcaaggtctctcttggctcttccaccgaaagattccgaccagcaagtcgacggaagaacgatgggagaaccagaaagggcacaaggtgagggtatcatgaaaatttatctcttctatctctaggcggcctcctggtcgcttactttcttctgacccgatctgagctcgcctttctttcaccttggaactccgaagcgcccgatcctttccccaatacgcccatccgtatctcgtcaaattcggccttctcaaagcgcgccattaacgcttcccagccccgtctgccgatgtcgccctggaattcctcgagagatacctcttagatccagccctcattttgaacctgattccttccagaccgacacttcgctcccattctctcttgtaacagcctcaccacgcgaagcatatgtttgcgcaacccctcaatcgccatcgactctctgtcggtccccccgaacgaaagtccgacgtaaaaaccggacatcactcgttcctccatctcagaaggcaggca

SEQ ID NO: 73 - DNA, 2935 bp, Xanthophyllomyces dendrorhous
gatagttcaggagaaggaagaagacacagtctcagggcttctgtcaagggtgtccagagtgcaaacgagttcgagtactggtctgatgttgactcttctgaagttgttggccagcatatatgttgccattgactgacgatagaccaatgatggtcgatcaccccattccttaccctctcagcatacctctttctcgattgaactactcccaaataccatcatctccgacatgtataactcggaaacagctaaagagattgttctttcacaagcgcaagtctcttttcttctgctcaagtccctaagaacacttccgaagatgttatcgcttacttcttcgtcgaatttatttaccaaaccccatctcttattcaatcaccttcatttccacttcttgcgcttgctttttttttctcctctatttccaagcctgtaaaacgcagtcgaagttcgcttttcgctttgaaccctgcagcgctttgctttccatctgggtggtgacgtgtcatgctttcaaggatttcatcggcaagatcttttcttctttgaaagaatgtagtggatggtttgttgtacatatagaagaaagcgagctagaaaagtacaacgcccaaagatcgagtgacctgatcgaaacatacacgagtgaaacaaaagacagaaagacgagagaaatacatacgcgtgcacaagagaagcgtgggttatagtttcgcaacttgtggatgcagagaagtgtgtcgttcgttcacaatgacgttttctgttgagccttgtttcgtcgacaccggcgagacaatcggccaagctgtcaggtcagccattggaatcgttacagatcttgccaagtcagagactcgtttcgccgcttaaccgagacaagttatagaagaaggtaaactccgaaagacttcagtacgcgataaaatgtgactgctcgggtatttgaaaactcacctatcgcgttcgttctccttgatttgccttccctcctgaacgctcctatcttatctgcccaactattcagtttatcctcatcgacttttggatccaaccctacgagcttagctttggatactctccggcgtaaggtcagaccaagttcggcaaatcgttggagagcattttgcaaagtaaatgtggagatggattctagtgttgatagatcccccttgttccccaattcaaacattaaactcgtcacgattttatgatcttttaatcaagacccagtgctagaaaaggtgaagcaagataggactcacctgccaaaaaagtgtttttccaaacaactgaacatgactcaacagatccttctctgacacccatcgaacataccctgactgtcgtcctgaaccatctttgggctccaacagacttatcagcgctatggctgctagccagtaactctcgatgaacggccagacgagaaagcagaaaaagtcaaatgtttcccttccattgaggcgttcggtctcgctaagcgagacgagctctgtttcgttgtcgaacgaaaccacacgctcttgctaagaagtaccaaacaaagagaagccaatgctgatatgagaggttgtgcagaactgaagatctataaagtataggcctctcacaatcaaagtatccatggtgtttcgcacattagcttctatgccttgtgtggagaagacgaacttagagggaaacgatatgaacaaccgacaaacactggtgcaaactgaggaatggcagatcgactcacttctagcctgagaagatccgaaagaaatttgacctcggagatcaaatccgtaagcttcatcgcgttcgaggcctctactttcttgacttgaaggtacagtgtagccgagaacagacctgtgtttcgatggatcgcatacataaaatcagaacagttgaccttcctcagacacatgcaagaaagacgtatgtcaaaactcacattcgctgacgaacaaatgtaacgtctggtttctgtatagagatagctcgaacggtttcaaaggaaataccgtatcatctatcacttcgtttgatggtttctttccgatcacatctttcatgacctgtagagttctgaaacatgtgcgcgcgggtcaaacaggaagattagagacaacacagagcacaagcagatgaaaagcgatgacgatagcatacctgttaaccatctcgggcacagtctttcctccaaaatggactacacggccgccccgccgaataatggcagcaataagccattcaaccctccgtatgagatctttagtcgacacaccctgtcaagaaaagagaagatcgaaccgagggtaatgagaaaggaaggataagatagtggtcgaatcgattgctagccatctccaagcagatttgaccaattggcatatgaattgatgtgcctctcggtcgacttacccgagttgttctcaatgtaagtagcgcggttgcgactaaagcagatggcatagcgacactcgcagctgtatcaagccagatcattaccagatatatttagtgagcatgaccgaaagactgctaatcgttaattacagtatcagagattgtatgtgtatttcgcgctttcttaccgtttatgtccgaaagcactttgaaccccagataacgaaggaaaaccatcttgtccgcttcattgcgcttgatatcgaatgtctcagtctttccttcatgcacagccgtcaaccttcgcgctgtttgctcggccatagtttcctttaacgagtaaggtgtttgaaaccgaacgtcaattctaccaagtttgaggccgagaacagaggaggacgaaagtagaccggagagcgattcaggctgtttgggaatgcccatcatttcctcctttcaattttttatcaataagatctgtgagcactctatcgaatgagagtcggatgagcaaatctacttaccacataacttctgc

SEQ ID NO: 74 - DNA, 5207 bp, Xanthophyllomyces dendrorhous
cataacttctgctctcgattactttgtcgtactggatgctaaccggcgccaagaggacatccgtcgtacgatctatatacaggtatagcctaaatatcttcacggtataggacagaaagatcgaagaatactgcttaccagaaataacagcattcaaaatatcctttgaagtgtagagtcgcagtttcagtctatgatgttgtagaagtatcagcagctatgtacaggaaagagaacatttacctttagaattccaaattttggaggaagtaactttccacttcgagaacgggtcccttcgatgaaacattccagattatgcccacgctcaagaagaagcgagatgtattctctgttcaacacgtccatcatcgtttcatccagttaacatccatctggatctcattgcgagctatgatatcgggaagaggaatacagaagaaacactcactttgctacaacgggatagagctcgtcatctccccagcttcttcggataaacattgctccccctctgcgcagaagtggacctaccactggaagattcagattgtttcccgcctcaaaaaggaccaaaccagacagagatggaaaatcagctttgggtttatgcatcggtcgattacatataagtcactcactactatgtgcggaagtgccaaccctatacgaaagcatctatgttgtccacgacaaaatatttcagccaaacgatcatatggctcaaagaaggaaaaaaggatcctaacagccatgagatcaacagataatcgatgtgtgacttgtgacatggcaagaagatgatggcccgcttgttctttgctgcaacagcggccacctccctaagcttaatattttgaaggaacatgtgtcaggacaatgatcacttgaattaaggaacgtccgggaagaatgaacattactaacttttactagttcttcaacgtttacatgaattccagactggtataatctagccaacattttttgtagaacggcaccgtagactctaagatagacgggtcagtcaagggagcatacaagacaaataaacggagaacgatgatacgcagagtaagaaaggatttcaagttttctagattctatgaggagaaaggaggagcgcgcacctgatcaaccgaggattctctacttttgctactagctcacccgccatcttcttcgttacttcattcaatgccaatgtggccttctcctctagcttttccttgtcttgacccggtcgaagtttcatttcttgtactttccttcgagccagtactttgatcctcgatctaacatagggcgatgtcaagagatcggccatgatagatgcatagtaacctggatatagaatctgattatggagataatcctcaattagttacacaacattagaggagaggcggcttgtgaggagattaaagtaggctcaactgatgctcctagaggctagacaagatttggttcccataatccagcggttacttcacaaaggattatgacctctatcaagaaataattcaagaaggaaatagacctcacgttctcgtaggatctccatcgtcttccggcaacggcatcatcaagctgtctgagaaaagctatcggatccgacgtaacggaactctcatacttctcactagaaatgaagccccaagacatccggaagaagtgaccgtccggtcatcattctgaatatgagtttaaactcgtccaaacagcttgcgttgtagaagagcgaagggacgatcgtcaagaagatacccacaaaagatccttcactgggtgctcactgtcctgaacgtcaaaataaatcgggtccaatgtcggtttaggaagagacgtcgtcatttcctgagcggtttctttcgtatccaaactatctatgagtgtcgaccgtagaaaatcaaaagatgtgtgtatgattggcgatccaggattagagacactgggttattatccgaaatgctggaccggcaataatgaaagccgatgaaccgtacgttacctaaaatgaaacgtttaatgactaaatctgtaaaaattgactttgttctacgtctttgttcatctacttaagtagtgtcgatcaaatcaaacaatgcaggaacaaaacaaattcatgatggtatgtttataatgtatcgatacggctagacggaaattgaggaggaatggggtaaatgagaacaaaacagaatagaattgtgaggcagatgaagcaaggcaagagggggcccttagttatttacacaattggaagaatagggagagaaggcaagactgtagaaaggcaagacggcaaaggaatcgccgtgttctctagatctatgatttgtagaagaggcggctaggtcgccgcggtgtttttgggggggccggacatgtagaacaagaaatcgaaagagacagataagaagacaaggaaaaagaaaagtggtgaaagagcagatagaggataacaacaagaaagacccaaaaagaaaagtggaaggaaaaggaaagaggagaatgaagagatagggtggtaaggaatcaggatgagaggatggaggggaccgaaaaggaggtggatgattagggtcgaaggctctactcgagcggcccttgtctcctctcatcacttatggacacagcgagctctatctgaccagatcgtataccaaggtaagaggataccggagcaatcggcttttaactgctctcggtatccttcttctcccacagtttgctgagcacgccttcgaatccttcctttcctagtgctgcattggcgacgaatcgttccagcgacacagtctctagcttgtcggccacagatttccatagagaacctcgagcagagatctctgccgtctgggagaagagcgttgatgattttggagaggaatgggaaggagagtaggtgatggattcaagtacagtaaggtattctgtatgttgagcgggacataacagtggatggacaggccaatagaatcaatatcagactctatccaatttgatcggccaaggtatatgcataacacaaggagtagatgaatcagataaaagaaatgcagatggaaccacggacgtacgggacaaggatagattgacagagaacatcgtcatcttttgcgacaccgggtctacgaacgagacctctcgaacgtatgcatcctcagttccacctaacatctgcgatgggccaaacgccaaggcaaaaagcaatcggttgataggttagattgttatatctagtagacaaaattgatatttcgtaaagtatcataccttgatagcccatctctgatgattagaatgagaaagaaagttggatgtaacatcgtgagcaatccggccgaaagcgaacgttacgagaggacgggacggagacggaacagaagatcaattactcaccggtgcgctttgtttgcaccctataacgcgttccctaagtagaccaaaccatagacatatgagatgaggcattagttattacagcttgaatgcatgcaaagattgacaccattgtggcaaacgattcggtacaaagaggaaagaggggaagagcagaggggaagagagggttaactcacgtccgcacaacgccggtggcaggatccaccgtccggccaatcgtatccacactgataacatgggccgttgccgggtttggatacttttgccacacaccagatacaaccttggaccactcgtggctattattcgggtgatatgtgatgccaattcaaagacacaggtgagcatagagaacattgagaaacgttagtggtcgagtggtggcccgacaagtgtcaactatataaagagaaaggcaagaatagaaagacaaaagaaaacaagccagaggaacaacaggttcaagataagaccaaaacacttacgggaagctgaaagcctgagagaatatttgaaccatggtttcaaggaagaaggaaataagacaaagaaggagaagaaacgaaaagttatccgatcgtaagaagaaaggaaagaagagagaaggggagaaaggcgcaaagagttgaaatgaaggcgctgacgaaaagagcatggaaaaaatcggatcgtcggatcgtgtgcgcttggttacggtcatcacgtgtaaccaccgccatgctccgctgagctcctcagtctccggaaagacgccttcgatcaaaggtagtgagcgtcctatggatatcgctttgatcgtttgatcttttgatcttacttatagttctgttcataattggaaaccccgatgctctgctctgctcaatctgctacaacaagcggatcatctcataactcatcggtaacatcacttggaaagctcggtatggaacgagcaatatcttgaaatcccgaacatcacttctgttgctggagattccgatgaggaagaaggatatgatgttgtttgttattttcctaacacgtctttggcgtcatgttgatctctgttgccttctgtcctcgtcctctttcttcatatatcacactcctgaacgaacagtgataggaaacagacacatgagagaccgatcctggccgttacatctgctggttatgtattctttactgttacaacgtttgcgctcaaaaacctgttgtcttagagtggtcttcgtcaggtgcatttcatcatgtttataatcgtacatcaagcctagcataagataccggagagggacagacagaaagaaagaatcaagggatcagagaactaggtagatagtcattgataaacgaagagggacattcataccttgatctaaattcaaacggcttattcattttgaagactttccagcgtatcgacccactgagccacagactctacatctaaccgcccgctatcaacctcctggatagctcgaccgactgctatcgctccctttattgatccagctttaatccagacttgagcgttcgttccgatggcgcactcgaaggcaactcgcgaggaaagagatctgaggagaggataggatggaaccaacagcctgtacattcaataaataacaaataaataagaagacaaaagtaaaagatgtttattatgtctggttcaaactgactgcaaagaagaagaagaactatacaaaccttctggacatctgaagagaacaagtgaccgtcataccttccttcaactcgccaaacccgtcagattttctggtggtcgcatcaaaacactccaactcaggctc

SEQ ID NO: 75 - DNA, 20339 bp, Xanthophyllomyces dendrorhous
  misc_feature (15236)..(15374): n is a, c, g, or t
ctccaactcaggctccatatctctgttcgccaatgatatccgagcatacaccagggatccaacctggtgcaatcatgttcggttacgcgaacaacgtcagagtgcaagattgtcagtcgaacttgctcaatcattccagatcaattagggatatgagcacagattagtggaaggatcaccttgaggttaggcttgtttcgcttagtagcaccttcaaacgctagagcatctagagaagcgtggtgggcagagccgatatctactcgataaccttcaccatgacgggcaatgacggtcccgatgactgactcctgggacgcaggcacgtactgaaccatagtacagacaggaacctagttttttagagatgcattctccagcaccaggcaggctatcgaggctgaaagacttacgcgttttccccttccttccacataaattctctttcctgttttgtctgatccaaactgacctgcctttgtggcaatcagaagctggttcgtggacgaactcgaagaggcagttgatgagaaccgagctgatgtttgaagagttccaggaccaagtttgctgatagaggaggaagctaccggtaaggtatctcctggaagaaggatttggagagatgtcatgggtattgagtctatgaaacagtcggagggtaggcctttcaagagatttaccaccctgagtcctgataaaaaagctgtttaagccagcgtttgagctgcagtaagcttggttacttcaagctgctagggttatgatcatatacttcagtagctaatccgaggctgacgccatcatcagtggctttctggcctatgctcatatcaggctcaataaaggtttcagatcgattgtctgttcgtaacccttttgcggtcgcgtatggacaaggtaggttttagtcgaacgcgaccaccttcaacatcatccatccttttctccctctctcatcatccttgatagtcttctcctttgtctacctttctcttcctctttatcagcctacatctataacacacatcacatcaaaagaaccatggccggtccagctagcaaaaagggttcttctgtaaagaagaccgaaggaagcaaggtacgtgtcgcgttctgatctactgcctgctcgtggttcaacatgtcttccttcttctcacttttttcacttctcttccttccattatctttgttacaaacggggctcatcggtatttcaaccgatcatcgcttcacaacttcaattctcttgtatcctatacttatcattctggtggaacttttggtggatgggtgaatcactcaatcgatgacactaagttcgaagtcggagacaccgttctctgcaagatgagaggctatccagcatggccaggaaaggtttgtacatgtctcttctctttctcatacgcgaactaattgatgctcgattctggcccaagtcaaacgcgtcgaacgagacattgccgcctttttcatgatattcactcagtcatcgctcacttccgtttttcctctgccaatggattggtgtagattgtttcggacgactccatcggagatgacgtgaagcgagaaaggccgtctaagggtcagttctggtgtatccggttctttcctaagggagatcagtgcgtgcatttctacctgccttttctcatcctaattaagaatctacccgttcattcatacatctgtaccagctgttaaagcgcgttactgatgtctcattacctcttttcttctcttcaaaaaaaaaaaacaacaaccgtctttcccttgtcaatcttcttgaactgtctcccgccacgcgactttatcttccatccactttagctcctgggctcaaggccgagatctctctcacctcacctccgccgccatcaaagagtacgtcaactcagccaataagaaggcaggcgagcttctcgaaggatacaaagttgctggcgatccgaccgattgggaggccgagcaggatgaactttccaggcaggccaagatgtataatgagaatttggatgagcttgatgacgatgaggacgagccgagcagtactggaaagaggaagaaggctgcctccaacggagagaagaaggcaaagaaggccaaggtggagaagaagcccaaggtcagttctagatataataataataaaaaacttctcattttctctttgttggcgatacctttgtctcatctctccttgatcaccgttttcaatcaatcccacgcacagtctgatgctaccccaaaaagtgctaagaacaccaagaagaacggcaaagtaaagtcggctgccaatcttgagtctgaagatgaagccgagggcgacaagccaaaggaggccgcttccaagaaatctgctggagtctccaacgatcagagtaggtgtttcttcatctctggttctcttttgatgaaatccaggtttctaatgggtttactcatatccatctctttttttttctttctcctcttatcataattttctcaacgcgtctcctcatttcaggctctcttgaggccgagttcgtggttttcttcttctccagaaaggtacctgcaagtttgattaaccatttgatttgtattttgcgacacgttaacagcgcccaaaaagtgaaggattggcgacacaagcttcagcgtgggttcttgggaaagcttcctccgcaagtaagtcaaaaacagctattcccgggttttacggcgcgagaaaccctttttgacacgtgtttgggggtatctatcatctcaatttccaatttatcaggagaaggacatgcctcagtgccacgaatatttcaacacgattgaggcttatgactcgatgacggttgagcagctccaggtacgttttctatatgccattttgattgacttgttcattgaatgagagatctcacagattattccttctttctgcgggtcaatcgatactgtttacatattcgaaaactaaatagacttctaagatcggcaaggttatgcgaaagattgctgctttggacaacatccccaacgaaaccaaatacaacttcaaggagcgagcgagcaagctgatgggcaaggttcgtatgctcatatatatcgttggatctattttcatgggtttaacatctcaaccaacttttatcccttcttcaacaccgcgccaaaaagtggcaaactcagcttccttctggctctgctgccgaagaggccggtacgcccaccaatggggcttccactagcaaaaaagccactgctcctgaatcgaccaaatccaagtctgacgacaagccgaagtcgaagtccaaatcagctgcgcctgaatctgaatccaagcctgtgtcgcctccaaaagaaactgcgtccgaggagaaagatgctgctcctgaggccgagaaggaggttgaagccgatgccacggagaagactgatgcggacgttgtgatgaaggatgaggagcctgtttccgccgctcccgaggcgcaagagaaggtggaggaggctgagcctgcaaaggagagcgaagacgttccggttgttacggaaaagaaggatgaggtggccgccgaggatacgacagaggccaagccagaggaagctgtaaacgagactgctcctgcagagagctcctaagcctctgtcgactgtcctctcgctctcttcgtcaatttgcttctactggaggatggcgagggtctttgtttgtcccctgctcgagccaccttcttgtttcccttacattctggtctaatcgtctgaagacgattctttcccttccttttcttttcgtcatctggtgcgctctttaccaagttttcactgattcttttactcccaaacatgtgcttgatcgacttgatatcattctgccattttcttttaccggagcctccttgttttgtttccttcttctaacatgtacatctcttaaatggatggctccctccttactatctttcatgatcttcatccttctttgaaatattcttttcctcctgtttctttcggataaaacacattcccgcttaagctggatcacactggtgacttgatgtcgaaatttgtctttcaggtctcatctcaatgatcccttttctattaattgagaatgatttgtctgaaatagagtgtcttttcgaaagagatgtttacaaaggagaacaaggctgaaatttcctccagtatagagaacaattgaataagaattacttactctgccattcaatttctctctatcacctcctgttctgacgttgagaaacacgcccagcgtgtatcatttcagattcttctcaactattgaatcctcttcaatatttaagagaaatgagttccagagtacgtcctctctagatgtctttgtttgatttgctatcctgctcggttgtttctccttcttggcccaacggcgcttgtgtcaaacgaccgatcggtagcccttcagcttctacttgttgtttccgtcgagcctggttctacattgactatatgcacacgctcatgattatctttgaacattctcatgctgaattataggcggatgcccttgctcgtctcaaggcctctagacagaaaaaagattcatcgcctagtgtatcgtccgtcgactctcaatcattcaacccggctgtttcttccaaaaacaactcgtcacggttttttccatcccaatcaaactcgtcttcctcttcccttaatggaaatcaaccaaacgttcttgtactaaatagtagtagtccggtcaagactaaaggatttctggattacgatgatgacgagcctattcccagatcgtcagcctatcgatctcaacccccttcgatcatcaaccaacatgcttcctcttcctcttctacaccagcgagttacactcaggattatattccccgtcctttcaagcgtcaaaacacatcctccagagaatcttccactaagccaaatccgttttcgtcatccgcacccagtcctgcacattcctcatcttccactcgaccaggaacaagtgctgtgagagcaaaggtgatcgcaatgaagttgggagactctggagaagtgattgatgtcgaccaatcctctgacgagctagcgactgaagactttcctgcgctcagcgatctcattcgaccttcaggatcaaattttaaggggaaacgtatcgtctcgaacggtagtgatggcggtggcgaagacaacgagacgatggccgaattcatcaatgatgatcctgtctcgatcaatagattcgcctcaatattttcgcatatcccaaagaagagggtcgaacgcgttctgagagagaacggcatggaatcatcaaaagcggcagacatcctgattgggttgagtggaaacgatgacgagattagacacgtaccaaagtcatcaacgatgaagaaacaatctgcgatctacgccaacaggaaggtatccgatggaggaggggcgagaatccaatctggatcacaatcgacaagtagatcttcaagaaatagagtttcgttggacgattcggatgccgaaagtgatgatgattttggaggaagctctaggaagggcaggggcatgcagaaatggacgagggatgaggatgcagaagagcagagcgcgttggtatgcagaatatctcttgactttaggactttgtgaggatgatggtatctcacctttgttttccgctcttatgatcatcaggactggttcaacagttgcgatcatcaagaactgttgaatgtgacgtgtgagttccatgttttagtctgatcataaggcttcacatacttctttgcattcgcataagtattccatcgactaatttgtactatggttgctatcatccgtattttaatcagcatgctccccggaccaagcaactattatcgtttcccttcgaccatttgagtctgtcgacgatcttcgaaccaagatgaccaagaagaaaggcgtctcgccccgattattcgagagctacatcgagctcatgttgggctaccataaggttgatgctgttctcaaaggatgtgagatggtcggagcagagctggagctcgcaatgagcgcattcaccaacagtcagacaaagaaggaaggttctgatccaaacgcaaatggcaatgggaagggcgccttggggattgtgcacgccgaagtggatgtcgagcaggcgcttaaagttgagacagatccggaaagaaggaaagcactgaaaggatatatccaaaaacagcctgaatcatttactgaaggaatcttactgaaggattatcaggtcagttgtgcacacttttaggtttaatctcaagacacggtgcttgaaaccaagctgaacgcactgccttcttattcttatctagctatttggtttgaattggcttaacttacttcattcgaaaggacttagttgcatcctagccgacgagatgggtcttgggttcgttgcctgcctctattttcttttctcgaagcataaagcctgactatgatcccatgcttctatagtaaaacaatccaagtcatcgcgttcttggctcacttaaaggagaggggaaaacctggtcctcatctgattattgttccgttagtgccattattttccctactaggaatatggactgaaactcacatgtgcaatctttatctcatcagagcttcaaccctggagaactgggctcgagaatttaacaaattttgtcccagtatcgaagtccagacgtactatggtccagcaggagagagacgagatttggcttatcaattcatggaggatgaaaacttggacgttgtaatcactacctatcaaattgctgctggatcgaacaaggatgataaaaaatttctgaaaaagatgggtttcaaggtgagcttcgatcgacttgggcttcatcgaggtatatgtttactgagattatccctttcattctaattcttcagtcggccgtgtttgacgaagggcatcaactgaagaactacaagtctgctagatatattggactcatgtcattacctgttcaattccgtttactgctcaccggtactccgctacaaaacaatcttcaggcatgtccattgttgatctgatgctctttcactctgtccagaatatgtgctaatagattctgtttactttgtctgccggtgattccttggaatttaacaggaactagttgtatgttcacctgctctcgctgtttcggcatgagccttcgtctaatctatccacctaactttgtttcgtgttatgccttggatcgaatagtctatcctcaactttatcctacccgattattttgaagacgctgaggattcccttcgtgcaatcttcaaagttagcactgactcacatgccagcttgttatcaaaacagcgggtatcccgagcgcagaaaatgatgaagtaagctcaaagatgtcgttgttacttgtcgttttgaagaagacaagaagacacacgcgagcgagagtactgatgtattgcacgatactttgttatgtgttttttattatcattgatatcaactcttagaccgtttgtccttcgtcgacgaaaaaaccaggtatgatctaatatatacgcccatggcgttttagcagaggaatcgctaacaactgttcgtctttctgtcatcaggttctcaaggaccttccgaaaaagatcgttcgggttgaatggtgcaagatgaccgaaagtcaatctcaattatatcgagaatccgagatttcatccagcaaacttctcaaaacgttagctgacgatgccgagacgaagaagaaagaaaagactcggaaacgagtgcgggacgatttggagattgacaatggaccggtggtggagaagaagactggcgattcaggaacaaatgttctgatgaaccttcggaaagctgcaaaccatcctcttctgttcaggagtcactattcagatgagaagttgaaggttttggcaaaggatataatgaaagagccggaacatagttagtcctatctttctcaacgctgtcacttttggatgcaatctgattatgaccttttattgggtctcttgtcctttcacttgtgtttgtagtggcgtccgattacaacttgattattgaagatatggaggtaagtcgcctcttctattgactatacattagtctgatctaataaacaattcttttctattttcctaattcgctatgcagataatgtcggatgccgaacttcatcacatgtgcgaaatgtacaaggctactcgaaagcactctctacccccggagtgtttcttagggtaagtcgtgcttcgattttgcctcttgccctggctgaggacagttttgctaaatacagatatcccttaccgattgtgtttatcctcgaacagctctggaaaagttctcatgctcaagaagattattgaagattgccaagctgaaggaaaacgtatattggtcttctctatggtcagtccttctcttctcattctattttattcaacaaacagttcaaacgcgcatgggattactataggctcaactgtatactactctcttcggtagtttactcaagttctcgatattttaaagaaagtgcttgaccaactgggtgttaagtggatcaagctgacaggcgagacgaaagtggacgagagacagagtctagtcgatgaatttacgaacgatacatcaatccaggttttcctactgtctacattggcaggaggaatgggcatcaatttgaccgctgcctcagtagtcgtcttgttcgtttctttaattcttcatttttcttggcctctatcagaaatctggtcacgtcgaagctcatattgtttgtcataacgtttcagatatgatcaagggttcaacccacataatgagaaacaagcggcagacagagcttaccgaatcggtcagactaaagatgttgaggtacgatcactctatgacttttcttgcatctgttgacaaggctgtagaacggctggaatgagaaaacaaaagctgatcttgcttctctttcgttgttacggatgatatattcaggtcatcaccctcctttcaccgggaacgattgatgaagatatcaacgatctcgctctatcgaaactcaagttagacgatgctgtggccggtagaggtgaagatgaggagagcgcggaagcggaaggaaacgacgagttagagaaagagagtagagtgaaggcctcattattgagcacgttgaggaacaagttaggaacaaagctagaggattctggaaagtaacttggatggtgtttatacctgttctctctttttttggtttcggttttttcttcaaaaactatatcaccctctctttcctctgtatatcgtgtctgtcttctgacttgcatccctcggttcagctcttttatatcaacaaacatacaatttaccaccgatagttctcccacatctcctctattctcatcttgctcgcttccatctatattatgtacatgtctatgcttcttgttgcgcgtgtataagtctgcacgattgtttaccaagctgaccaggacataggcaaggaaataaagaaaagggacggaattgataaattgcaggcccgggaaagaaatccgtcgccttgacgaccgaaaaatctacaaatccagcccatcactgaaattttcagcccagtcttgttctaaaagtataagaactcgaaaagagccttgttatcctttgactctcaattttcttccttcttttccttcgtttgttcttttcagtttcattctgtgcgactatatctgcctacaaattgaactgtactggtgagtgtctcctcttctctcttttttcttaccatttcttctctacccctgttcccaccagcctttcctattcttccttaacgaagccaccacatctaccctcctcgcgagggtacgagagcatggagatggatgaaaatgatgatgcaaatattccatgctaatacagaagctctgcccccgggtagcttgccgataactatattcgctctctaaagcacctctgattatctgtccccctcctttttgtttcttcgaaacttcggcctttccgttctgaacaaagctatcttgcaggttagaaatttgagagctgactcttgtttttgtttctgtcccatctataccttctcgttccgtctattggtcttggaaatataagacggaagaattgttcgtggtattatgataaacatatcaatgataacacattcttcgaattagaattggcccagtacttgagaatttccttgagcatttgcacatcagaccataagaacaaaaaatgatactttggttatctctttcggatcatgaagtgagaaagtcccttctgacaacgacgtgacctgtcacaaagaagatgacggtcacaacaatcggcaagaagaatcgtaggacgaaacttggtgccactcaggaagctctacagagagggaggacgaaatcatactatctatagcattaaagcctttttgaggtgtttagttcaatttccctcctaaccttccaaatctttccgatgacagcaacgtatgagagagaactcaaagtcgatacctcaacaagaaggcgtcacggggttctatcctagccgagtagtagttggcaatcctaagagcaaaggttcagcgagagagaaatcttatatttagtctctatccatcttgtggtacaaaacatgaaacagagagaacaacgaacgtatcaacgacttcaaattcattcttgacgtaaaaattccgagcgatctcgtttccaacctgacagtagacaaacactgaaccgatcttctgaccatcgggcgaggtgagcgcttgagcgcgatcgagcacatgcttcaacagcagggcgcctagaccttgagatcggtatgccggaaggacagccaatgtgagaatatgaagatctgatgttgatgatgaagaagaggtagcggaggtagcggaggaagaggtggtagtggtagaaggtgggaaggactcgaaccgagacgagattgaaccgacagggacatctgcatagtagactgagggatatatcgtacataaataatataatcagatccatgtccggacgatatgtacattcagatcgaaatacagattccacatacccagcttgttgaactcttccaaagaggcgtctaggatctcggtataatatttgttactgtacgctacagggaggatctacaaagaagggtagataaagaacatgtacgtttgagaggtgagtgagcatcgacacgtaagtcataagcatcgatgcacttttatctatactaacagcactgtttaattttctcagggttccactaatagcagatcgatcgaggagcgaattaagattaaatcgtgtccgagggaggttccaaaagataaagaagaagacaaagatgagaactgagaaggagaaagcgaaattgaagacgacggacggacacattgttaggagtaaacgaagacagtgtaaccctcgggtgaggtttgatagtcttcttagagtcaagagaaatcggggcggatacagtagactttgtgtccatcgaggaaggatcagcagttgtggtggatgaagtagcagcgctcatggttgatgggaggatggctaggtttgatgggatacagacgaagtgggaatagaagatactgtatgtatgtctggttacaaaccaaactgtaaccatcgcgttcttccttccagcgttcctattcctgttcctgatttccttccctgtccctttctctttctctctgcccaacattcatctggtgagcatcttcggacgaccatctcttcttttcgttctgaatctatcggttggttgatctgctggagaagaaggcctcgtcagctagatacagacagtttacaatcgctcttcttttggttttttcttcatcctgtagcaccaatgtcgtccgctttagaatacatcaacccacgagcagaaaccgttcggcgagctcaggctcttcaggtctgtagtctccctttgtttctctcctctatgtatcctcaagacggacaatatggtgtgctgccgtatgctcaagcccactctgtttttcggctctgttcaatctcttctactggctcaaacgaacgtatcttttaggtaaatactactggagctgtcggtctggccaacgtcgtcaaaagcaacttgggtacgtttttctccccttttcgcctgtctagcagtgtataggctgtctaaacagagtctaagctgatatctgcgttgtacggccctccatatataggtcctcgaggaaccatcaagatgcttgttgacggatcaggaaacatcaaaatgactaaagtatgatcccgtcttgacttgctttttttttctttgcttagttttgttccaatctgaccgtgtcttcccttctcaattctgtatcatctcacaggacggaaaggtcttgctctcagaaatgcagatccaggtagattatctcttcttctctcggagagttgttcttaatactcttccgcaccttacccttgctcatgtgcatatagctaacgcaacacatttctaatcgtcaaaacagaacccgacagcagccatggtggcacgaaccgctgttgctcaggacgaacagactggagatggaaccacctcggtcgtgcttcttgttggagagctcttgaagcaggctgagaggtatacatcggagggcgtccaccctcgagtgatcggagatgggtacgatctggctatgaaggaggccctgaaggttagtcttttcatctgctttcgttagctgagaaggaaccttcccagcattgttgtcctcctgtggctctctgagtgttgggttcatgatatgggacggttgctagcttcagtgaaagcattatctcgagaaagaaaaaagagatgtgctgcatacgtcagaattctaacttcgcttggtctccaaaacatatacacactctttctcattatctacgtctacgctcgctttcatctcgaatcatggtcgacacaccagttccttgacaccttcaaaattccttcaaaatccgatcgaccaacccttctctctgttgcccacacctcgctcgctactaaactccaccccaagctggctaccaagctcgcttccgttgttgtcgatgccgttctcgccgtccagcccccggcacccgccgagggcgcgaccggtgttgatgcgttccagatgccgatcgatttgcacatggttgagattatgaagatgcagcacaagatggataccgagactcagttgatcagaggattggtgatggatcatggagcaagacacccggatatgcccaagagaatggagaactgctttgttttgacattgaacgtgtcgctggagtacgagaagacgtacgtacctcatgatttcttctctgacatcttccacaatatacatcagataggcgaagtgtcgtactcatacttgcatgctcttttctgtccacagggaggtcaactcgtcgttcttctactcttctgccactcaacgagagaagcttgttgagtccgaacgacggttcgttgacgccaaactcaagaagattgttgagctcaagaacgcggtgtgcgatcaggatgtgaactcgaaagagaagccaaagacgttcgttttgatcaaccagaaggggattgacccgatgtcgcttgatgtgctcgtcaaaaacggaatctttgcgctcaggagagccaagaggaggaacatggagaggtttgtctgttgtttagcggttgtgctcgtttagactcaggctctccttactaatttttattgttattgatcgtaggcttcagctctgctgcggagggactgcccagaactctgtggatgaccttaaacctgaagtgcttggttacgccggtttggtctacgagcacacccttggagaagagaaattcacatttgtggaggagtgcaaggagcccaagagtgttacgatcttgatcaagggtcagtgctctttttcaattcgctatagcgtacatgactgtatatcgattctgattacggtatcttgggaaacgtgaaccattcttccatgatccttaggacccaactcgcacacgatcactcagacacaggacgccgtccgagacggcctccgagccgttaagaatgcaatcgaggacaagtgccttgttcccggagcgggcgctttcgaggtgtcttgctgcgctcacttgcagaacgagacaaagaagctcgcaaagggacgagccaagttgggtgtcgaggctttcgcagagtcgatgctgatcttgccaaaggtccttgctcagaatggtggatgggacgtccaggactcaatcgtcgctttacaggttagtctctcctgttctcctcagcttcttgctccctgtaaactgacatttgaacacgttttcgtttggggcgcttacaggatgaggaggctgagggacacgtcgttgggttaaacttgaagacgggtgagcccttcgacccgatttcggagggaatctgggacaacttccgggtcaagagacagatgatccattcagcgtacgtgctttcgttcatacctctctttctacagttcttgttcgactgttttctacatcgtattggcgcttcgaattggatatctaatactactgttttgtcgtaacgggttatgaacgaacagagccaacatcgcttcatcattgctatcgtgcgacgagatcatgcgagccggtcgatcgtcgtaagtcatcatttctgtcacccgttcatagcatcattattcgttctgtcctcactctgtttcattctccttttcacatcccataccgtagtctcaagggggacggccagtaaggtagtttagtcaaagaaaaaggaaatcagtaaagcgagtcagagaagaagagctataggagacgagggaagattcttagaggggcccttgtatccttatggaactgaaaattacaacacgaatcagaagtcgagcctcttgtgctctttccttttcaggaatgtcatctacaatgaaggccataaaaaccaaaggaacaacacgagtttacatgaagaacatagtagacagaaggcagaggaactgacaggaaaatcgataaggaagaatcgaaaatcaaagcaaggaagaatataaaagagcgtgatggaagcgtacggatagacagctgatatctcattgtgtctgcgagagaagaagcgaaaacgaagaaggcgtcaagagagaaggagaaggagaaggannnnnnnnnnnnnnnnnnnnnnnnnnnnnnnnnnnnnnnnnnnnnnnnnnnnnnnnnnnnnnnnnnnnnnnnnnnnnnnnnnnnnnnnnnnnnnnnnnnnnnnnnnnnnnnnnnnnnnnnnnnnnnnnnnnnnnnnnnngaaggagaaggagaaggagaaggagaaggagaaggagaaggagaaggagaaggagaaggagaaggagaaggagaaagaaaaaacaaagagtaagagaaggcatgatgaggtaagagcgagtccattttgagaagaaaacagaagtaagagagcacaagaactacacgaggagagagagagcgaggagagaatgtatttaaacacacaaaaaaacctgtttatcttttcggtttagctgagatgaacagatcatcgagtgaatccgacccgtcagattccatgtctttgtcaactccgtcttcatcctcagattcagaaagactatcgacgagtcccttcctctcgtccgcactatcaataccaaaaatgggaaacccccaggaacgtaatcaactactgagtccggaaggatgaagggaagagaaggagacgcatgtgaggaagaaaaagaggaatacgtactaataagtctgggcttccacctttttagataaatgcgggtaatcctttccccgatgagaaactcgttctgattcgacatgttgtgcagagctgcttttgctgtctctcgtgctgtgctcagtcacacgtacacatatgcgcgagacggaatgacaggtagatggaggaagaggtaagaaaatacaagaggacgagggatgtgtaagagaaaaacatacgagaacgaggatgttgacatggcactcggtgatagtggtagtttgttgtcattgaatgtctctgactcgaagtgaccgaatttaccctatatccaccaaaaatagacaaacacattttcggtcaaatctcttcgtatatactgctaagagctccctttgtagaataagcgcagatctcacaatttgaggaggagttgaagagacttgtggtccgaacaatgaaggatacccgctcctttgatctcttgtcgaaaactctacagcatccaacgggtagtcttctggtatcgacatgatcgacatgtctcctccagaatttgatcgtatcccttggtgatatgtcgggctccgtactgacggcgagtgaagttgagtagaatgtatcgcttcctctgggtggcctgcccgtccgacacgatggacagtatcctctggatcaaatctcagcgtcccttgtctaggaggttgtgaatggtgtatctggacttgttcgcccggctgtgcgtagtcatgttccttgatcaccgacgtgtcagcagagcttgttcgagagggcggtcgatcggtaagttggtagcggggtatattggataacgcatatggatccctaggatcgtatccagcattaccgttgggtcctctagatgtttgacggctgcttacactacctgctcgacgagatcgagctcggatgatagatccaattgcaccgaagcctcctctgagggcgtccacaccaggttcctccgttccggtgatcgccttctcttgatcctctgttggacgctgggcagcgagcaaaatcgttgatttccgatcaagagacgtgagagtctttggatcaactttgctcatctggaggatagtgataccagcacagatgactaagaagcccagcatgatggtgattatctgtacagcggaggctttcagtcctttgtataggatgatggaggtaaccagagtacatgtcgtgaacgtcacataataggttggagtgaccatagacgtattaaacagctctaaggctttgttcaggaaattgatctctgtgagtagtgtcccaatgacgaatacctagattgagttcaaaagcgagagtcaacataggtcttgttttgctaagacgaaagtagaggataaagctcacgaagagaaaccagaagaaccagaatgtcacttggttgttgcctcgaatactggtcagaattgaggccccaagtccctgggtacagctgaccgacagtccaccaatcacactgcaaataccaatatgaaccaacatgtttgactttccgtactgtttagaaaataacaatgacaaaatacactgttaccggccaagaaccagtagaataacagtatggctatagtttcaggacatacccgcggaacgaggaagaggattgccagcacagcggataggatcatgagagccgaccaaactaagaaaccaggggagataaatagtttcatgaacggtcggatctctgtcacactctgctgttcgggagaattgagagcaatgaccacagagccaatgatacacaacgcgcatccaatccaacctaaatgaagttagaagaactaagtattgagtacgtgttgttgtcaaagaatctgtaaagattgtacgagtactgtcgctcaccaaagaaagttagactctcattcagaaagaacgacgagagaatcgcgcacacgaccacagataaagctcctaaaggctgagatttagttgcaagaacatccacaaaaaaaaagagcctgcacgttagctcatagacagatgtttcctccgaccgatctcttctttttttggggggaggggttttgagaaaataaaaaaggaaaggaaagggaaagaacgaacagtcactagaagcgcttctgtgaatgcatctgacagtagccgaataattctgaaagtggatcaatttgataccctctttgggtattttccaaagaacgatatatactgacaagctacaaagttgaatcttcgtagtagttcgagacgattgtccacattttcagctttattcgtggacaaatcggtatcaaaacggtgggcttacatttctcctagaaccatcagcgtcatctgttagacatgcatgataaatcggcagcatattgagtttacatatactctcgtcttctctggataaacaatcaagtgaagatagcactcactcctatccaccatacccagtctttgagatacgcatgtccttctccagctatcgatcccgactttgcctgtgctctaagtagccccttcttcttgattacgaagcttgctgtttgcgtatcagaccagaaacaagagcaaacgaccagatacgcgtacacttggcatatttagctttgtccttcacgagcgaccgacatgttctaagtttcttcatgcatgcaacgctctggagaacggagcgatagacagataaagcataaggcgaacgtacacccaatgaaaatacctgataagatggccaaagtgagcccgatgattctggagccaggacaagcgatcgttgtcggcgcgagttagtcatgaacattcagatgccagcttctcaatcgaacgacaagaaaaaacgaagggtcatatacgcacttgaaggaagcaggttgtccagatgctacaaaaatccatgaacagggaaggagattgcaaagaaaatttcgaaggtgaatgggtatgtgtgttttgatatacgcttctgcggctgagatgatcaaggggcaggacataccagaacttgtggccgcactggacgcagacgcggttgcagacgtcaaggttgccgacacagatgatgacattaccctgcttggttgtctatcaagggagaagaaagccaaggagagaatcgatgagtgatgcatggccgcaggaggagaaccggctgagctttggcaagctcgcggaccagagtatatgatgaccgacacctagagggtagctcgcaacgcgatgtttcaaggtctgacgaatgagctcacctggctgaaagctggggagctctcacttgagaccgaatatgaaaacagatagcaagaactaggggtccagagagatactatgggatcagaagcctacttgtgaggatgcaagtaaaaataggcgagggtgagggtcgaagggtgatgaagatcaatagcaaagaagaaaaaaaagaaaaaaaggaggttttgtttcataacatcatccttcacatcctcagaccatcctcagaccatcctcagtcgttcccatcaccatcaccatcaccatctctgtctttaggctgtcctcagaacatgatctattcactctatatatacgataggttggagccgttctcttttttcgccttgtggtgatgtaaatctactaatcgtttctagtcctgatctcctcgttcacttagacactgcgatatcgtgtattatcaatcttggcatcgtcagactcccttccaacgagcttcaccaggatctctccttcccgaagtctctcctcacgtatcactcagcccatccgacggtcagatcaattcagcttctgcaccaaagaaagctgttcatacaccatcaagtaatttcgctgcagctggttctcccgctcaggacgcgggtaagagcggggctgtcggatctggcaagggaggtctaccattcgatgaagaggccaagctagtttatggtgtggtgctgagcttacggaatatggtcaagaagctcaccggaaggtttgtctcttgatatctgggaccatgttcgcttcccctttggttggtgtagtatgcttataatcgctctatatatgatacccatcatgctctctgatctcaatcaccttcgcttcgatcaagtccgcaatcaaactttcaacactacgccactacgtcatacgctttacatctgtttgaacctccaaccggcttgaaattcatcttgttgacatcacccagcgtggactcaacatcagcccgaactgctttgcgaacaatgtggggcccatcaggagcctacggtcaatgggtcagtccaaacccagagaagggggaaaccgatggtggagaaggtggaagagaaaagagaaagggactggacagcgagtgagtgattcgtaatttatacatctctcagcatgcattgcgcttacgctgacctctgtattttcgtctatctctctgccatgatcctacttctttcgtcagacaattccgactagctatagatacccaaatgcgctctatgccatactttgcaacaccttgataatatagataaatat

SEQ ID NO: 76 - DNA, 2385 bp, Xanthophyllomyces dendrorhous
atatatgaattgtccttgaaagcaagccgaataccggtttgacctacgatgtgatatctatgcgtaaaatcattccatacaccttatctctatctacaatatgttcgtcaatcctatgtgacgtctctgaaactgccatgattctcaagagaccgtgtatgttgttggatagaacagctgaggagagagctggaggtcagagaagccggtatccatggcaacgtctctgatgctcaccggagatagccttcattcgctcgttcaacacccatcgtccacaaccgctctgtttgctctcctcgctctcgctacaagatggaatatgacttagatcctcgggtggagatcgtcagtgctatcatttattccttcttcatatgtaggaatggtttgtctcgcacaaacgaggccacctaggtattccttctctcccaacccaagcacaactcattctgctttcttctccatctttcgattgatctcgcacagacaaatatgatctttacctggatgatgagcgatgctatactggatattgctttagaatcgcacgctttcattcgaaggggaagagaagtgtgtagtatatgtggtttgatgtgagtagttgggctattcactacatacaactcttgagtatgaggtgaaagggattgaattatagtccatgtcgatatatcaacatatctgatcctttttacttcttctcttcggaccacagttgcaaacaaactggctgtatgtgattgaatttcctcccttccttcatgagtttgagagaagccgactacgggctcactcgggatgtcttctggctcactttcatgacctgggctcatcaaatatatatcaatcacacttcacctagcccacgctcctccgatctctacgtcggtgaacagatcatctacaaactctcccgctccaaactctcgagcgtcgacgcctgctccttcggctgcttttccgtcgtctgtatcgaaggacttcaacaatccaacgacagatcctagtagtggaaatgtattttataactgtattaactgcaaccgacccgttcgtcaattcctttccccttgtaaccctttgcctagcccagaacacactgactcacttctttcaagaatgataaatcttgcaacgaaaccgggatgattgatatgatggcgctcatctcttgagtagacggttagcaatcgttacgcaccccacctgtctaaatgcttaggactgggtcaaaacagacgagccactaccggacgagcggcaaccgctcaaagagctatgtacgtctctgattcattaccgccctgcgtcatcctccatacagtactcttgattcgtttttaatcgaaggaaactcttcgggttcgatagaaacggaggcgatcaggtcggaggatcagacgctgagcagaaaagtaaggttttattataccaaaggcaacgtagctttatctgctgaatcgcatgttgccccatcttcaatgaaaatgataaacagacagattcctatctgattctagatacaagaaggtgctctcttcgtctccctgtttctcttagttcacctttagggtgcatacaccaacctccatcatttcgatataccttacctctgtgttgaaactgaatctaacatcttgttgatttatataaaacaatttttgtaaaaaggtgtcgacaatatccaaaccgcccaaacccaaaaagacaaaggcggctgcaaaaacacctgtaccagcgtctgctatgccagcttcatattctacaaagacccgtacgttttatgatctcttacttggtcttcatctcgcgctaccccgtgtctatgccatcttgtatgaccaacatattatttcccatcgtacctctcaaatagtcccgggtcaacaaccgtatacggctccttcaaatttaagttatgggaatacaggctatccaaatacccttagtgatgccgggtttgaagaagacgatgatgatgatagtgatccaggtggttctgtcgtaagcagaatagggaacgaagtcaatggggacggggaagaggatgatatacccttgaatttcgatggtgactatatgggtacgtcactttttctcctcatttctctttcactccgatatgtttatctgattctgtgccgatgagatgagggctgactctgaaattgtggttttatgcagatgtggacggagacatggtgtatgtttcttcttcctcttaccataacatcgcgttgtttaactgaagcgctaattcaccatatgctctttcctcgcgcgcgcatctgtatacaaattggattctacagagacacagacagctcggacgattgaatgacgatgtttttccacggattatatatatatatatatata

SEQ ID NO: 77 - DNA, 62702 bp, Xanthophyllomyces dendrorhous
tatatatatatatatatatatatatatggggggaatccttctgccctcacaaagatgaaacaagagggagagaacacagtgcagaaactattgtagaagaaaagcttacatattcttctctgtgaaaagtagaggtcttcttcttcagggtttcaccgagatgcttctttaatcccatgtttacagtgcttcaaaggcaatatgagctggtttccatctctttgcatcacgatccaattgagtaaacaaagtccccataacataagacccactactacgactactacaaaacaattttctgctacttagtttttgacgcagaagaacgctaagccttctctagctaacgcagtctcaacctccagctgcctctcgtcttcttccatccatctatcctcctttgataacttaagagttgctcgtttatcaggacctgcttcgtgtactttgagtaggttctcgaactttgtcctttttgcaatgagctcaagcatcttccggggatcagaatgaccagtaaagatgatgagacctcctcgagaggaaagagaactgtggaccttctcgatttgagcgttgagagacgtcagaatcgatgtcacgtcaggagagctgttgatatgagaagtggtggcgatgtcggcttcggcgttgatggcatcagtatcagtggtgattagggagggggtagatgcgactgatgcttgagattttcgagcccctgatggtttattgaaacggatagggaatctcgtcagccaaaagctccgaatgagccacttttgcccgaaaactatgtcttcttgacttacatcccaatccttcgctcaaagatgtcaacctgccaaaagaaaaccaatgggatccgacgactttactcaactcctcaaccacctcgtcatctgacgcgcagtccttcaaggttgttacttttgtttcttgagtgaggtatctagctgggtttcctcggtcacataacgccgtcagtttcggctcaccagaagccttggtggtgcgttgaattttttggaagattggctccatttcggcggctggatctccgaaggcgggacctgaaacaagataaatgatagagggtgtttgttcagtgaaataaaggagggaagaaaggaagaaggcacgtaccgaacttgagcttcaaatgcaaaagctccaaacacgtcctagcgtcttcttcagagtcgtgacctccagtgctcctctggatatcctttcctaggaacgtctttgccagccatcgaagagacgtctttagaggaggtcctctaggatgtttaaagatcacagcggtatcgatacaccacggatgtcttaatttgattgcctttaaatcggattcgagcgagtgtccaagtaagatcgtcgggcgctcgaggagatggaggagatgcgcttgaatatcaggcaaggtcagtgtcgcggtgtcgagagcttctttggtaattccggaaaatctggagaatagcgatgtttagatcaatttttgaggcaacggtttcttgtaagatcagataccgaagagaaacgaatatgatacgaactgagtcaagtaatccgttacaggtttcgaaggcttaacaagctcatcataaatcttgtttctactttcgaactcaactatggagattcgagccaattgaggaccctctagagtcatacactaaaaatcccagcacaccaatcaaagagaaaagcgttagaacaggctctcggaacaatcattgaaagaaatagaacaagtgaacacgaaccatctcgcagtccaaagccaacaccgggattttgtcttgcttcttcaagtcctctagttcagacggcgttcccccaaacccagtctcaacccaaccatcctcatccgcattcctgccttccttatctggatagtactctttgtatataactctttggccatcagacccaacggcgagtccagagtccacaggcaaaggcctcgatcgattcaagatttcgcctgcgtcgtctggattcatattgggcagcgcgatcggaccgcttaaaggagaggaaattaaatgagggattggataggagtggtctttcatttcttgccgggtgagcaaatagtgggagggtagtgttggaggaagagatgttgcagcccctaaaaaaagttattccaagaaagtgcccgttagaaagagtagaccacacggccgggttgtttcagaagcaacatgtggagcccaatgctaccaagaagagagacctactaagcagcgcttctttgtccttctccttcttctccttatctttcaagcttagtggactttgtagaaacgctgccagcgcgctatgcaactttgtcctatctcccggacttctaaccggacacgcatgactgaacaacctctgaaccactggtaaatttgtcaaaactccactcttgtgagttccatgagctggtgggatggcgaaaggcatgttctgagtaacagcctgaacaggagcgcctagtagttgagggctgattcccggaatgaagagtacggttaatgaagcaatcgatggtttgttctcaacttgaatccatgtcggcttaggggcatctgagacgatatgaagggctagatctctaagatgctggttgaagatgaagaatatgaatctgacattgtgagaatgcacgatgattgatgtgcaaatattgtgtcaagatataaggcactaacagcaattccaatctttcttccatgactaaacccattaacgacgaattgaaatgagggaacgagcatctgttgtgccaaatagataaccaaacgtattcagtttagcatatattatcattatttgtcgactcggtcttgaagaggaaagaaacccttcaaagccgaggggagactaaaacaaaaccaacctgcagtttggcctcctgcttctttctcttcttgtcttttctacgttcttctcgatcaataggagacggggatgtagctgctcgtttggctgaattcggtggtgaaggcatttttcttaataggccatgaccagattgaaggtgggtaggacgatctgtctgaaggcggagggaagtgttgggccttttgctcgaactctgagggttttctttgcttgtctctggcgatcacgtgcatagtcacgtggttcaagagcacttctaggattttatcggagaacaagaccactgtcctccgaacgtccattcaggagacgagaacacgtcgaccatcatgcttttctttctaacatttgattgattgaggactcttaagtctgatatggcatccttaagctatagctcatcagaccgtacctagattacttctccctggaagacgttggtaatcttgagagagacccttgcctcgaatcctttacagaccttggacttgacctagtaagcggaacagttcattttatggagaggaaaagaaacttaaagtctaaagacaaagatgggagggtgactactttgcagagagtgaagaaaaacgaaagaaacaagaaataaagagacaaaacaaagaggacaatgaaccgcaagaaagtgcgaagattaagaaagcaacgtcaacccaaccgagcaaacctcttcccctaaccgcgttcataccaccctctgcgcgacagtcaccaataccttctcgttcgcgatctcaatttcctcttcgaatagcacttttgcactctcgctcttctgagcgtagtccaaagcagtgcttctcgtctccctaccgatcgcctcctgattagcttgaatgacaccggccatctgctcgctcgcatttcggtagaagacatcaacgtcatctgtagcctgaagcccggccttcttcctcaattgttgaacagaagcaataaatcctcgggaaagtcccttgagaacgagctcaggagaagatcggatatccaacacaacgatcagctctccatcctctttagcctcggctttgtcgcccatacctccgtggaagtcggtgttaccggtaaagtcaacagaggcagtgacggtgatgtctccagtggtaagagtttggccagcgacctcgatcgtacccgtcgacttgaactccttgacctggtccgagctcaaagcgctaagggcagccttaaccttgggcatagctcctcggagtcgtcgaccaagaacgggccaatcggccaaagccttgtacacaacgttcacgtcctcctctcttgaagtgtatcgaacgctctcaatgttgagctcagaaagaaggtagccctcgagacccttgacatcggccaaataggcagggtctgggtggaagatgacaagctcggtcagcggggtcgtcttaagatctagcgacttgtcgtctctcagctttcggccgatagtgatgacagagagcaaccgtcggacagcgacctgaacggcttcatcagcataggcctccttgggttccgggaaaggaaggaagtggatggatcgaagatcctgagtggtatcctcggtaggagggatgaacaccttgagtcgctggtataagctctcagtaatgaaaggagtgaaagacgacatagttcggcagagagtgaagagagcctcgaacaaagtgttcaacgcagtctgagtatcctcaataccatcggagcctttcattcgctttcggttgaatcggatgtaactgttggtaagttcctcaataaggttgatcaaccgagggataacagtgtatagtctgtaggcatccatttcctggtgaacaattttgatcaacgactggcaccgggcaagaacccatcggtccatcacgttatccgaaagcttcgcgttcggatcgtacttgaagtcaattccgtgtgtcttcttaaggatagcaacatgcgaggcaaagaagttgtacgagttgacccaagggagaaggactcgggagataacaagcttaacgccctcttccttgaagttcaaattatctcctcggacaataggcgagtttaccaaaaacattcgaagggcatcagctccgtatttgttgatcacctccacagggtccgcaaagtttcgtaaactcttggacattttgcgcccatcagcagcgaggaccaaaccagagcagataacgttcttccaaggcgccttatcgaataggtgagtggccaagacaagcaaggtatagaaccatcctctggtctggtcaattccctctgagataaagtctgcggggaatccaccctcaccttcgagcttctccttattctcgaaggggtaatggttctgagcgtaaggcatacttccggactcgaaccaacagtcaaagacttcctcaactcgtcgaaggacagtcccaggggtcttctttgaaggaatggtaagagcgtcgatgtcatgtctatgaatctcagtgatgccggtcttcccagtgagctcttcgagttgagcaatggaagagacgcaaacgacctcggacatgtcatcgctgacccagagtggaattggggtaccccagtatctgtttcgcgagatgttccagtccctagcgttcttgagccagtttccaaatcggttctctccaacatattcgggaaccctaaagacatagtaacgattgatgaaatgttagggcgtaatacaatgatgcagaaataaatatagtggtgatatgatagatggacgaaccatcgggtcttgttgttgttggcaaccaatcggtctcggtaatcctctaccttgaccatccagacaggaatcgccttgtaaagcagaggagttcccgatctatttgatattcacacaaccaagagtaagtatctcgtcaaattattgagatgtgccctgacagaacataaagagaacataacaaaacacgaaccgagggcagaagggataggaatgcttgaggacaccctgcacgatgagccggcctcgcgttttaagaagcttcataatctccttatcggcatcctaagaaatacccaattttaatgacacaagattagctaatgcatttcgcatctggcccagagtgtttcttctgatgcgatgtagatagaagatatacgaatacagttaagtagtacgaacctttacgtagacaccctcaaagtcaggcacctggtttgtgtatttgcccgtttcgtcaatagggcaaggaggggtctcatccttggtgataataccgttctcaattgcgattcggttatcgtcctctccgaatgctggagcttgatgaacaagaccagtaccggcatcatttccaacgtagttatcacaaacaactcggaaagctcggtcttcaaactgatcgttgttcgagtaacgtcaaaaaaccattggacaagcaattagcaatatcacttcttgaatacctggatgatacaatcctggcgcaagaaccaagaaactcagacgaacctgctcgacgaagtaatcaaatagaggctcgtatctccaacctttcatgtcctttcctaggaacgatccgaccttcttccatttggccttgtcttttccagttgggtctttgtaaagcgtcttaagtaagtcctccaaaataatgaagtttcggtccttctcgacatcatgaatcttgagataggtaaattcagggtgaacacagattgccaagttggaaggcaaagtccaaggtgtggtcgtccaggcgagaagagatgtcgaaggatcgtcaatcaaggggaaagcgacggtgactgtatataaatttgacaagaaagattgtaatcaggggacctgcttagggtgcacgaaaactgaggcgacgaaaagttgcgagacagtattctcaccagcagggtcgttaacatccttgtaggaggatccagcctcgaagttcgagagaggcgttcggagtccggtggagtacggcataactctcaatcctcgatagacaaggtccttgttgaaaagctggccaaagacccaccaactgaacaagtttcaagacaaagaagcaacaagattggtatgcattatcacaacacaaaaagagaaagcttaaaaagatcacttacacagactccatgaaagtaggatcaagtgtcttgtaacccttctcgaagtcaatccatcggcccatcctctccacagtcgatttccactctccagagtatctcatcacctaatgcacatggtagcccaattatccatatgcaagtcagatccaccgcccacccaaagtgtcaaatccggaacccagttatagaattcgttagccttttgaatcggtaatgaactcattctacgaacgaggtacatcaaacattatgatatgagagacgaacgatagatcgacactcgttgttgtaagcctcgattcccatcttcatcacatcctccttcccggtgataccgagtttcttgtcaatctcatgttcgacaggaagaccgtgggtgtcccatccgaaccgtctctcgacgtggtgtccagtgctatgggcatgtcgggtgataatgtcctgttggattgtgaaagaggtgaaggcaaacagcgtcaatctcagcatctcggtgggcttttcactgagacagctcttggtttcagcaggtaactacaggatctgcgagaggcggcttgaacgcccattaccccactctctttccatttcctctcactagctcatttttcagccgacgtgcatctcaaatgccgcccaccctcgccatctacggatacttctctctgaggtgtgagatactgatcagttaaagtttgagtaacgaaccttgacggtaccggcaagcaagtgaccgtggtggggtttaccggtagcgaacggcggtccatcaaaaaaggtgaaccttggcttgccctcggactgcttgagcgaagtttggaaagcatcaatgtctctccagaattgaaggacagtttcttcttccttagggaagttgaaaggtcccgctacatgttttacccaggttgatgaaggggtacaatcaacggaaggaaggaacgaatgattcgagatgtagtccggtcggacagacaaatgaatgatcattttcgcatagggcacaagaaaaaaccaaagaaaaagagaagagtaaagaagatgagtttcgaaaggcacaacaacagctaccaaactggagcctctctaagatgctcccaccagtctaaccaagtgctcgatacgtaccgtttgggggcgggaacgacatggttgttgtattacgtcttctagaaaggaggagagaagaaaaaaaagacccctaatccactcatcgttccgtccgtttaggagagacgactttaggcaagggcgatttgaacgttgtcacgtgatatgattgtaacccacacctgtgattgttcgcacacgttgtctgtaacacgctccgacgcgtcgcgtgtgtgcgctcatttatctcgtttcgtccaaaagttcattgatcttccaaaagcatcagcatcgatcgtcatgtccttgtcaaagtctttggccgttcttcctcagggtaaggagacgtgttcatcttctgctcacaggtttaatcgatgagctcatgactgacgcgcgtcctgagttaatcaaggggtcattcaatccggtgccgcaaaggatacatctgcctccaatcagttctggcgacttccgaacccaaggactggccttccttctctttatatgccttaccggcgggagtgcgatggaaaacaaggaattcttgaactgcaaaagattagcccagacaaggaacgaagttggttcgtggaggatgaggttattcaaggttgatactatcttcctcctcctctcgtcagacgcaaccctctaatagaattaacttacattcgttgccggtatgattcgctctcacatgtgtatgcttatttgtcataaagacggaaagctcttgttgttcactccgatcgaccctgtgttcctcttactgccggctttagaagccgtaagctcactttgatctgctcccggtataatccttgagctgcctacctctgatggtcgtccgatctttctcctatttgttgttcttgtaaactctggcaagtaaaatagactaccacatcacctcctcgatttcttcttcccgatcaactttttagtactgcctcaacccatccttcgttccttcttgcgcctccgtttactccttcctcaactgatcttaaagggaaacggaagcaagcagatagaggggaagagagtgatgaggctggaaagattgagtgtgaggatgtgatccggcttggggaactagaaggaattgaggatcatctacttaagatttgtgatgttttgggtatatcttatcttcctctcatctactcatctttctttccctccttgtagagcgctaatttttatatgtgtttcgcctttctacttagaattggagccatccaagatgaaagcctatagattatcgactctcaagcttcaagcgtacctatccaagaaagttaacaggctttcagtaaaagagacattcaataggtttccagctcttaaacgaggtctggctagagatggtttaggagacttaacagaacaaggacaggatgattcacagaaagaggagagagatcaactggagctcgtcagacaaggttcgtcatactcagcaaattcttcttttttgtttccttcatcttcttttttttctcatgtggcgcatcgctgacctagtgtctgttcacttgatcttgtctcctttgctccttattaaacagaagctcgccttcttcagacacttcaactcctccgaccgtatctttctccgcaaacctacacctccattctcaaactcttccccacccctcatctcacaatccacttgtccaatctatcttctcacccttccgtcaattctcaatcaacaactgaagaccttgaatctctctttcttgataaagccaacgaaaccgagaaagctctggcggagaagaaaagagctgcaggaccgatcagtcaaggagtaagcaagttgaagaaagtagatacgagaggaatgagtaaaatcagtagctttttcggtaaaaagacgagtgttgctgaaggtgtcgggagggacaagaaagacctggagacttaaacagtcaacggaaggataagtgcatatacatgtgtgacttgaatagtctatgatagctactaggcatgtgaacgatgaacccgaatctctacgtcgtcgagaccattgttaggaagaaaacatgaatcatctcaagaaggaatagcccagaactactttgttccttctacacccgtctgtaaagaggtcccttcctccattgatcaactctagccgccaaacccatcttccagccagcaagtcctcctccgccaagcacgacaagtgcgcaagctacccatccaagcgtgcctagaccttgagacatcgaaggagccggagttgattccaggtcgatagtttcgtcagaggaagaagaggagtcctgtgagtttaatttcgatttattacgatttccgttatcgtcgccgacgagtgatttgggttgtcgaatggaaacgataaagagacaagtggtggaaaagatagaaaccaaagaacaggagaagatttagtacgaaccgacctttttttttctcgttttcgaaaggtggggactttaaagctcctctcgaagaggtacctctttgccagtctcctcgtcaatgatcttctcgatctcgatctataggttattttcaaaaggagtcaggctgatatttaagcagaactaggcatcaacaacgaggactaacttctccagagtcagcgatggtgacagcctcgacaggcttatctcctcggcccttaggcacggcttcgatagctttgacaacgtccataccctcaatgacctttccaaagacaacatgtcttccatccaaccagctctgtaaaaagacgatttttattcgttagaaacctccaagtgcataaaaaggaagcagcgtccaaggacaaggaacgtgtgaacgaacagtgacgacggtgcagatgaagaactgagatccattctgtagaaagcagatcgatatcgaaattagagaccagagaaatagcacgagacattagcgaagacattggatatatacagaaacggacgacttacggtgtctcgtccagcgttagccatagagagcgttccaggtccggtgtgcttgagctctgtaaatcgaagtaatccaggcgttaaaatgaagagctttagggtaattttgataaggaaggggatgagaacacctactgaagttctcgtcgtcgaatttgttaccatagatggactttccaccagttccatcacccttagtgaaatcacctccctggatctactcatttgagatcggaataccaagtccaggctattatcagctcgtgtcgggcccagatcaaacttctactggaaatagtttaccatgaagttattgatcactcggtggaagctagagcccttgtatccgaaacctttctctccagtggccaaggcccggaagttttcctacgcaagtgcaattcgagcgatatcatctgacacgtcaatgactacgcaacgggcataatcataggatcgatttgatgaatgcagatacgtacaacagtcttagggacagtagctccgtagagtcccatagtgatccttcccataggcttccctccatgctcgatgtcaaagaaaacctatgaaccaatgtgttagccgtaagaaaagaaataaactaagcactccaccttgtatgtttacgatgaaaagcgagatgggataaagaaaaggaaatataatatgaacgcaccttgtgagtaatcttgggtcccttgacagcctcagcagtagaagagaagagccagatggaggacaggatgagtccaaaaaggagaacagagatttgcttgaaagaaagcattgtttgtgatggttagagatggaaagagaaaaaacagaaataagaagagtgtaaaatgagagagcggatgaataaaaaggggattaaccctaacaccaatgaatcctatagattgtatcttctttccaattgatcatctacatagctatccacaagtctttctggcagaaaatagtgatgatacctgagcaggcgacaggagttttcaagaagtgaaaaaatcgaaggttaaacaagatgagcgtagaagatgaaaagaagagaggcgcacatcaatactatggatattgtgctatgaagttgtgttcaggatgagcagtaagggaactttgagaggagagagaatgttacatgtcccgttgaatagactttgatccatccattcttctccatctctcttcactctcttcacccctcctcatccccgtcgatcatggcagacttttcaacagctctttcgacctggcgaggtacatgtccttttcgttcatatttacatctcatgtgtgcttagctctttccgatcagaaccatcttgctcattgttttgttttgttttgttcgcttacttcggctcatgtgtacatcatgcatacaaagatatcaaccttaccgacttgcaaaagtccctggacacaaccgccctggaactggttgagaaccagaaggagaatgtagtaggcaggaagaagctcgctgaacagaccagaggtgagtgctcgatcacataacctatttcccatcttcttctaatcttggtgatcgttttgatccgtctgatcactattctcctattcatgctactggatgtctgctctacccttgtctgattttgtaaactaatacactagagttcaaaaagatcccgacggatgccgaaaagctcgagtccatcaagtctttgttaaaagcctaccagtccgagattgaccagctcactagacgatcaaaagtagcggagaacgcctttctaaatgcttacaagttgttggccgaggcaccggatccatatcctctgctcgatgcagccgtcgtgagagccgatcttaatcttctgctatctcgtaacctatgactgacagtgcgccttgtctctcgggatctgggtgagcgggtttcatctcacaggaccaaaccgtaaaagtcgccgaagctcaagtcttggagagcgaactgggaaggttaagggaggagaaccaagaactgaaaaagcaggtcggagagattgctggagctgaagagaagaggaaaaaggctgagaacaaagtagacgccttggaggcgaaggtccgtcatctccttttcttctgagtatttggttgtgtaaagtttggactcacttctatcttgtcttcacaattgatgcttcatgcatcgccattcttgcttataatattgaacggtatagatggaagaactgattcaagaacgggtaactcagaaggagaacgaactaaacgccacgtatgatgaacgtatgagaaactacgaagagcggttcgttttgtgtcctttcttgttgtttcctgcctcttgtctacttttacaacggaaaggtggcatccaaacatattgttgtgctcaaaatgtctctccgactttggtttgagttcatagagaacaagatctgaacaaccaacttcgaacgactaaatcccagctgaccgaccttcgcacaacctcggattcaacccaagcccggctaatcaaggcgtctcaacagcaggataacgaagtagtcggtcggatgagtgagctggacatgcttatgggtgatctggaacgagccaacggacgtgtcggtagcgtggaaagacgaaacgtatgtcaaggttttttcaaaagatcaaccggatggcgcatttaataactttcttctcgcaaattggtctgtcatgtgatcatataggagatcctaagggcagagatcgaaagtgtcaaatctggttctcaatatgccgaacggtctgtcgttttgttatcatcaatctctgactaaccgtacgtactaagcagtcatccatccttgctcgatgaatgtatgccttaaatagggtcaaacagttggagtcccaggtgtctgagcttgaatcagaatccactcgactacttcgagcgctggatctggagaaagactctcgaagctcgtctgaaaagacgttgcgcaagaaaatcgaggaccttaacaaggagatcggtctaaaggtgcgttactctccttcttaagctctccatcttatcaactcggatcagctatcgctgatgccgactcttttcttctcacttccgtctttgatcttgtgataggctgcggagattgaacatcttaggcaacgtgctaaagaatacacagattacgatgagatcaagcgagaattagaaatcatgaaagtgagtcttgtactttgttatctccggcttgttcggagaaccacgtatattgatttcttcctttcttgcaactctataaccagtacgtcgaattcggtgacgtcgacttgagcgaggaccttgagaatcgcaatgaaattcagctgccaaacccaaatgctgctaagaacaacaagatcaaaaaggaaggagagtctttggaagagatgctaatcaggaagaacagaaaagtgttggacgagctgacaaagcttagggcaagtccgctaatttttactctcgatggtggtattcagttttcgattttgtctgaattcacctaagatttctgtctctatatctgtttcaatccaggtgtcccaagaagaatcttcaggagcaaccactgagcttgagcagatgcttcaaaccgttcaggccgagctagagagacaaaagaaactgaacgagcggttggagaatgacctactgcagatcaacaaacccaatggaggagctgtcaagacatcagtgtcggatgcacacagtggatcgaatgaagctggatcggcagttgggggagcaaagagtggagggttagaaggattagagattggtacgggttcggttagtcgcatcttctttcaagatgcgttagcggcttctgcagacacatcaaactgaactgtcctgtggacattttttggacttgtgctgatgcgcaggacaagacgagagcttctcccgttccgttccaatctggaagctctgataattctatcctccctatcgttacgtctcagagagacagatttagggcaaggaacgccgaactggaagaggtttgtcattcatcaacctaactaacgtgttatcaggaaagaaaggggtctgactgtatctcaactctgtctcttcaaatatgattcttctaggagcttcggaaacaattcgagtctatttctgagctcagaaccgagatcaagtctcttcaagcagataacctcaaattgtatgaaaaagttcgatatatgggttcctatcgagaagactcctctgctgtcgccggtccatcaagctactactcaggaaactcgtccagtaatcttaggactggtagtggtggaggattaggaaacttgggcatctcgggtttggcaggagggaggggagatgaaattgggaagtacaaggacaagtacgaggattcgatcaatccgtttgaaagcttcaaaagcagagtatgtaattcttcttggttcatcagtacttaaccctcgtaggcgtccatttccgtcctcatgatgacttacatcatggatcttgaaattcgaaactttgattcggggtcttggcaggaagcgcaaagagcgattcaggcattgaacccaatagaacgtgcagtctttgcactctgtaggggaattatcggaaatcgacgcgcgcggtcaatctttgtcgtaagttttctctatgactctgtttctcttggccttgtctgagctatacagtctgtcgactgactatctactcttcatgctttgatgcgttgaaaacggattgatgtagttatatgcggctttgttgcacctgctggtgattcttagcttatggggttcattggcgagtggcggtggagtagatatcagtgaccctgttcagatgccgcctttgaggaggtgaaaggcgaggatcatactggacttctttcataacccatctctatactttctcgcagtattccctcttgtggcttttggttgacttcgtagacgagttaatccttcttttactcaccgtctcacaaacaaagagaagaacgatgactcgttggtcagctttctttgtcatgtcttctccctccatacctttctccttttatctacatttaccttctattgtacaaagattgaacgaggaacatatgaaataatgtacaatttctacaaacgtcatatcagtgctgggatttatatattgatacagctttcttcccaatcagaggaccgttcgtctgacccagaactcatttttggcgaagcttccttcgactggtctccaagggggaccttgcactatctcaaatgtgttcgggtcaaactctgatttctgggtgttggttccttcaactccagcatcggatccgaaaacaacgagcctccgacccgcctgcctaaccatttccctttgcctcgccctctcttcacctgccttctgagcatctccctctgacacatcagacttcgagggcgaagaaatttgtcgaataggatcaaaaacttcggattcgattaattctgtagagataggcgtagccgatcggtcgaggtgggtcaaccacgcttgatggatcgttcggtcgatcggttttgtgggtttgttagatcgacagcgagccgaacagtacttctggggcgtatcggtagatgactgtgattttgatcggggtgctaccgagcgcacatgaggattcaggacaaagacatgagctgttccatgcttgagaatgaagaatagaagaaggataggaagaaggtgatgcatactgatgactctggcgcaagatcgacagaatacgttcgtcaaaggtgacaagggagggggagcgggtgccgatttattcggtcgcgaatgggtcatcctgatagacagatacgatgtatgcttatactgaaaggttagaggaaggaaaataacttggagtcgattcatcgatcattcgaagagggaattcgagaggaggagaaggcaaataggaagagagtatgacgaggaggatgaaccgatgacccgctcgaaatcttctcacgactaatcttacccttcttctatctatcgtcgaccttctcatccaatcggttcacctctcctcttgtccttaattcttccttcgctagcacctcttcaaggcagcctgaagaacacataggcaagcgagcggacggaacgaaatcaaccgattaaagggatatcagttcactccgatcttgacggactcctttcaaacctcccgttctccagtttctgcttctattctacaggcttctcctccattgatgaacggtggaccatcttttcaaggatctccgtcgacagcgacgacaaagacaatgacctcgcaaacccctgccgcatccaggatgggcgctatccaacaaccctataccaggcggacgcctaaaaggaaggcaaaactagagtcttcggttgtcgaacctgtcgttgtctccgcgctagatttccgggtaccaagctttgatcaacctatgaccggcagcctggggaccggaccggcagtctctcctcttccctcctcccctcatgccactcaatcatccaaggataaaattgcgaacacgaagaacatccaagcgacggctgcttcgtccttcccatcccctccggccgattcgtcgttcgctcatttctcaaagaacccagccgtgattcaggccgaaaccccgaaagcgcctgcgttggacatgaatactgtcaaaacgaaagctcctcgaaatcctcagcctaggacggagcctagagcatttggtcttcaagaagctccaacgttctacccgacgtgggatgaatttaaggaccccatggcgtacgtggcaaagatcgtcagtgaatatggggcggaaaagtatggtattgcgaagatcgtaccgccaaatggttggcagcccccgttcgtattggatacggaggtcagaatttccttttttttcttgcccaggttgtgctgattgatctatagctgtcatcggagctgtttctgatcggttgactctcttttctttgtattttggacttttgtagaggtttcggtaagttgataattctgcatgttacattcaacatattcattcgctaatctatacattgtactttatttctaaatgtggcccttcaacggatgtactcaaagcttcaagacccgtctaatgaggctcaactcaatcgaggccaagagcagagctaaaatcaatttcttcgagcaattgtgggtagcaggagttctctctgtctcaacgttccttgtgtaatagaagagttcaagctgatattggatactgttcctggatggttgtctggaacacttcttctccagagtgatgtttcaccagcaacagggaaaccctcgacttacggttcccgttgtagatcacaaagatgttgacctgtggcttcttcggaaggaggttaatcgattggggggttatgaacaggtatgggcttattgtgttttgctctagatgaattatcactcattggcctcttctctctgttttactgtgaatttatgtcattcaaaaaggtcaccaaaagcagaaattgggcagagattgctcgtgctatgggtacctctcagccttttgcttactcgatccgaaatgtctatgccagaataatccttccgtttgagcagtacgttgctcgagccaaaaatgcccgatcgcctcccaaaccatctgcctccacatccgttccgtcaaacaatctaccaaccttcacctcaacatcaaatgtggttactgaaacgcctttcagtaaagctgggaacggtgacaagctgccacctacaccagttagcaccggagggagacctgtgagaggtgcggcccagaaaaagatgttctcatacgatgaggatggggatagcagtctatcggaaccggattcggatacggatgctgatttgagcagaccggtcacagctcccccattatgtttgtcctctcccagtcatcaagtttggtcttaacgagcttgctgggaagtgagtctttttaagctaacagaaacggtttgtttccgctattatgatttatagccaagctgtcttcgctatctaaaaaagagattcccatcgtgaaaggagaggtaagtcttgtgaagtaccttatcatacaagacccacgaagatgatactgatggacactgtcaacacaactgattcctcgaccagcaatgtgaaatctgccgtagcggagctcatggtacaaaaattcttttatgcgacggatgcgacagaggtccgtggttcactttgaacagttgcacctcgttcttgtgccgaaggactttagctgacgatatgtgtccacggtgtgaactcaggttatcacatctactgcttggatccaccattatccgctgtgcctaagaatgagtcatggttctgttcagtttgcctgatgaacgctggagcagagtttggatttgatgaggtccgttggttcttataccgcctatcgttctcccgaagctgaaaaagcttatttctctgaactcgacatcctacgttcttacgttcgtagggagaagaacattctctttctagcttccaagctagggataccgctttccgaaatcactggtgggcaactcacccccccaagcaaaaaactcaaccgccagtccctctcacctttgctggggccaagccgattctcgacaatggaactgagaaccagcccaatggcgagacacagaagctagggggagtagatgtatcagagcatgacgttgaaatggaattctggcgactagtggagagtcagacagagacagtcgaggtcgaatatggagcggatgtacatgtgatgttgcatggcaggtacgcatcttccccctctttttgtgcagacttgccctctcaactcagaatattgatctaattctcggtaatgttcatttctacgtattcacctccaaatattactagtggcgctccaactaccgaaacacatcctttagagccgtactccgtggatcagtggaatctcaatgtgatgccaattgtaccagactccgttcttcgatgtaaggctcatcaatgtttcataatcggaggtcgttcaaacttacttaccttcgatccacatatatagatatcaaaaccaacatctccggtatgacagtgccctggatctatgtcggatttgtctttagtgctttctgctggcataatgaagatcaccatacctccagtattaattatagtgagcgtttcatatcagcttgtattgtgtcaattactcttctgaatgttatccggtatgaccgggtctagtgcattggggtgagaccaagacgtggtatggtgttccaggagaatacagctccgcattcgaagaggcaatgaagtccgaagcgccagatctatttgaacagcagccttcgctactcttccaactggtgacactgatgaatcctggtcgaatcaacaaagcaggcgtgcctgtgtatgcatgtgatcaaagaccgaatgaatttgtggtcacattcccaagagcataccatgctggcttcaaccacggggtgagctatgcagtttcttctcgtcgtcatgggaagcggtctgacttgttttcttcctttcctttcagctcaattacaatgaggtaggaaattaaagatcacacagattatggttcatcaagttgacactgattttcaagggttttcgatctgtaggcggttaatttcgctcatcccgaatggctagagcatggcttaggctgcgtccaaaactgttagtttctggacaatgtcagtgtttccctcatacttttatttacccgcgattttttcgaatatgtagacaagaagtacaacaaaccacccgttttttcgcacgatgaactcttggtgtcgattgcgactcactcgaaatctatcaagacagcaatatggttcgtcaacctttccagacatcaactttgatcgataggctaattcactccaatgtctcatccattaggctcaaaccacatattgaagagatggttgctcgagaactcaaggctcgaggtctggcccgtattcaactatcgactcttgcatcttgtaaagaagaaatccaatcggaagacttgcctgaggaggaatatcagtgttcttcctgcaaggcttactgctacttggctcaaatcagatgcccctgtacgaaggagattgcctgtcttgaccatgccacggaactttgtcaatgcgatctgaacaaaaagtcattgcgattgaggttcacggacgatgcattagtggatatggaaaagcagatttcagatcgagcagctattcccgaaggtacgacttatcttttttagtgtgtttttttccaccgaggttcatcatatatccatctggtttgcgtatcacacgctaattgggatttatgatttggtctgctgtcaaactgttttcttaagtgtggaaggccaagctagtcagcgcagtctttgagtccaagcgaccgtctcttcgtcagcttcggacattggtagctgagggcaagcagatcagccatactctccctgatctggctcctctggaagtgtttgtagagcgagcaaacgagatggttgttgaagcttcttcctttacggttcgtaaactacaaagccgaaagccttcaagaaagagccggtccgttggtattgccgccgaagaagatctaacagctggagaggaattcacgtcgaaacctggtatcgacgctgtagttgaccttctgtctcaagtggagactcttggatttgaagcgcctgagatcaccgctttggagaatttcttagctactgcagtcggattccagtaccgtgcgacgaattccctgtcaattccggacgaacagcaatcaataacggactgcgaggctctattcaattctggacttgctcttggtctcaatttaccagaacttcaggcctattcctgcttggttcatcgacttcgttgggttagagatctggaagaagtcgatgaaactacgttagagatgaaggacatcgacacattcatagagagagcgcaagcctatcaggttcggtcggatcatccattcgtgctcgacttacaggcgaaaaaggtgtcttctcattcttgggcaggagacgcggatcaaattcttggatcaacatcagccgatatggctgatctagaggcattgttggcgagaagccgatcggtcgcggtggatgcagatcgattacaccgtcttcagctattacgatccagggtaatggaggctgagcgtaatgtgcgctcgatgttagactctctggcttcttccagagatcgaatttctgttactcgggatgctcaacggctcataaaccgatttgaagctaaagggagaagtcctattccagtttccgggatggaggaactcaggaatgaagtctcggcctacagtcaattcttcgacgaggtcaacactgtcataaaacccgaattgaacgacaagtctctgatggagcagcttcacgcacttctagtcaacgtcaatactcgaacagacccggcagacgatcttcctctcagtctgcccacttctgtttccttggtcaccaacaccacggaagatgcaagcatgttcgctccctttgcatgcgtgtgtcggctgccacagggaccagacatgatcagttgcacgcgctgtgccgttgcatatcatagtgcttgtgtcgaatcaatccaagctgatgcagccaaagaaccttatttgtgtctcgtctgtgagccatacaaagttgatctgagtaaatccgccagactgatcttggcggatctatccaaacttgttcaaccagagttttttactttccgacatccgcccccagagttcgaaatgctctctaccatcgttaataagacaacacgtttcgccgattttcttacggctaagctccgatcaataagccctcggacgaccagcaacgtcgaagaagttcttcttttgcgtcattttctcaggaaagttgaagggttatgggtggacattcagacttcatatactggtgacaagccggtcagcctacgcccagccatcattgcgacccttaccgctctagagaaaaatgagccggctgcggttgtcaatccggcttcaacttcgggtctggtctcagctgtctttcaagaaaagaagcgagtacggaacagaaagccaaagtgggagatcttgcatgaaacccctccccatgatcaaggttgtatatgcaggctatcaaaagaagagacgatcgttacttgctcgaacgctaggtgtaagtcgagtggtccgcctgttgattgttcgtacttcactgatattggctttatccttctaggcgcccgaggatatcacccgtcttgtgctttcattaagccggctgatttccctctgccaaagttcaagtgtccattatgctgcattcaaactgggacccggtacaaatacgctatttgtcttctacagatgaaaggtatggtcttcatttacgtaaatattttctaacatacattagtgctgatttgctttgatgatatgatttgcgtttgctgcagagcatgagggcactcgtcagttcgtgaatgtcaaagcgacactcaacgcactcgacaccctcatttttcttgatttggaaatacttgaaggccgaccgtacatcgtttatatcgcgaagacattccatcctggatttagatctgaaattgaagaagggacggaacctccgccagtcaaacgaaagaaaccaatggtagagagtttgggttctgttaccaattcgccagttggggaggcccctcctacacgatctgttcctccaccaacgctacctcagatagtgcctccgcccttgtcactctcctcatcttcgtttgcaacaaccactcctacatatataccaccgccattctcaccttcctgctttcagcctccacctccgcctccgccaccatcataccctcctagctactatccgtctcatccattctctagtcagtcttacctaacgtaccaagcgctaccacccccttcgtcggtaccaccaaggttctattcgagtcattcacagtattacccaccgccaccaccagctctttcgtcttcttcattgtcctcttcttctgaattgagtcatttgcttaatccgattcaagagcctctgccctcaccttcgatcttgcttccgcccacacccgtacctacgtctttagtgacgcctgcacttgattcgatacctataccaacaaatctaccagctccttcagagcttttttcaaataggtatcagccaacggggcattccatcaagaacagttcgtctgattaccaggagccggactctctgccgcttatgaagaaagcggagacggagacgatggtagctggaccaacggtaacggccacgacgacggcagtggcgacgttgccgactgcaatgatgtcaacgccagctgtggaagtgacggcggcagcagaagaggttgcatttccaccagtgtcgccagcaacggagatgaaaacatcagaatcattcaatgatacggcaaagtcctcgagtgaaaccattctgaacggatctaatccttctcgagcttaagagtatgtatagccttgggctttacagggatgttcacgtttcatataccttcagtggatatgtgtctacttcatcatttccctttaggagtctacagctttgattgttccctttcttttgtctttctatcgtgtctagcctttgcctccgatacaggtttcttttgcctgatcgtccttcgatttacctttcgtctctccttcctccttcttttctttctttgtattctatctttagcttgtttctcgtcttggcttgctttctcgatggattcgtttcttttttctggatgcgctttttataagacattgcggggtgttcgagtgaggatttccacgatgattatgtcgtcgtccttctcccttccggtccgttgacgatctatctaatgagtacagagaaattgagataagaggagagctatgggtgtacaactgttcttttcttctacgaaagaaagaggagataaagaggtatgctggtgtttatcagatctacaaaattgactctatatgggtgacacggtggaagggaaagggagaaggaacgaggcgctggggaaaacggaagaaggaaaggccaagggttgtcagatttactcgacgtaaggctcgatggagatccttttttctccagagattttccaaatcacatgtctctctctgcatcaccaaagaggagttaacgacgcaatcaattagtttcccgatttttttaataggggtagaaggaaggacacacagtgtgtacatctcgtacgattgtgccgctagacgcatagctttgatatgctcgggtctcgaattagcggctctggcatgtgctcgactcttctcacagtaaacaatgtgtacacagagatcagcctggactgttaatttcttttctaagcacaaaacgggggcaatttagatcggtctcacctcccagatacaagttgccaaattgacgccggtgattatatccggcactccgtaccagtacatcaatagcttcaaatacccacacagcgtccaaggcaagttttctgatcaacctcttgagtgcgcgggacaagacaagggtaaagaagggccgacttacacctccccctttcttggcttcttcatgtgcgagtgaatctgctgtgtatagtgcttcgtcgttgatgaccaacctgtttcgttttgatctgaacgccacgcagtacctatcttgcccggtgacggaggtaagtgtctttgatttgattttgttatggagcaaaactcaaacggacaaaccattctccttcgatatcttcgtcgagctgaatgtcttcccagttgaacgcatctttataagacacctctgcgtatttcccactcaacggtctgaatgctctcagggcctcttgaagcttgaaggattgttcagagagcgggacttctggtaccggagggatatatctttctggctgacgattcactccgttgggtttagtacttggaatgggagatatatgaagagattgagcatagcggtgtgatatggacgaagtagagtggtgtggttgagcgacgagcatggtcaattgtccaacaccgtatatttgtggggaagtcaatcgttaaagcagttggctgtttgtgttttctctgtagatatataaaggttagcaaacggatatttcgtgatttagagtcattctttgccaacctgtccccgttcccgttcctccttatgctatcagaggaacacataagcatcagccaggagcgcaagagacaagcgattcccaccctgttttctcggtggtggctgaaagaaaacagtaccaaaagatgatgattctggcgtcatctcgcgtgtgtaccaaggggcacgtgtttcactaacgtcacgtgtttgcatttcaatcctatctatgtatggtgtaaatcaaaaataaatcatctggacttgaaattcgcccggctccagagatttcgtccaaaatctttccaaaatctcaccgtcatcagcaacgtgagcagcccaagaggacgatggtcgacatcacccaggacgatgaacatgatttgctatccattcaacctcctccaccgtcgaatcaagacgtagatgatgacgatgatgcaggcaacaatgaccatcataccgatgaaagtcgtcaccacgacctctctcaccaccacgatgtcactctagatgatgctcactctcgacaaaaccaggctccagaccaagacctagaccaaaaccaaaaccaccttatccatgcgtctctagatattccagcaggaccatattcactctctgagctaccccaagagcaggaatcacatctgccgcttccttctcctccagaccatgaccgaatcgaaaacgggaccggctcggatcgcattcaatacgttcatctgaccccttcgtcttcctcgtcctcttctcccgcgctgaatcatccatccggtcaactcgaacagcatcaccgtcaactgtcggaattttcatcatatcagagtccggagcccagctctcgatcccgacagccttctcaacggatagctcaccatcagtctcaacagacacatcagtccagacagagcgcaggtcccgatgctctggtgccgaagagaaaatacaaagcccgttgcaagtggtccgcgcaagataaggggacgctggttcgagaactagtcagacaaaaggacatgggtaatcaactaggtagtggatttctctcggaatcctgggtgtctgtggcgaatctgttggctgggagtgaggacaagagcggaggggacccgaagggacctgacgaatgtaagagcgcgttttctagggtacgttgtctatccgaacaatttcaacaagactttctgcttcggtcctgatcatattgcacgatcgctgacgcttgaagaacgcttcgcttcggtcctgtctttgttattgatcgtatagctgaagagggaatttataaaggtcagacagcttaaacgttcgttcgcacaatggaacgacgaggaccagcgtccagaggccgaaccagccactatcaaaacatttttggcggttcgtgctttgcggtttttcatttgtctcgatctcgcaaagacacatcaacaagtgtttactctctctattttgttctgttgtccctttgagtcaatttaggctcatccagttgtacgtgatatgtttctctcgcctggactgaagccctttgatgtgtcatctaacacatttttcttaaacagtacgcgccctatatcacaggttggccttttttcaactcgatggaacacatcaacatgggtgtcactacgctagatgcttctatcgccaagccattagcaacaaattctatcaactattctggagcagagatggacaaagcagaagagtcggatggagagagtgttactagcgatgtttgccctctttattttatctgctttgcttcgtgctctgcgcttgttctgctcgcgtgtgatattggctgaaagggtcgaccttttcattatgtaggtgtcctcatctcggctgacggaacgaagaaaacgaacagcctccaacgccgaacttgacctcattgactcaacctccaccgttggcggcatatctaatcacaccgctattaatcctgagggcaactcaaatgctaacggtaaacagctgacgggagggccaggatcatccaaacggagaaacacggtggctgtggaggatggagaggttgggaaggagagtccatcgattgtccgacatcgggctagagaactcttggtacgtctcttccgttttgttctgtttacatattcgttcttgaaattaacttcttgagcggaaataacattaaattctcagtggaaagatgtgaaagaagaaggatggtcattgaccgaacaggatatcatcaacgttctcggtcgattcgatgttcgcccttccctctttcctttttagacatgtttccagtcgcctagttgaaccgtgaatctctaacgatgtctttcctttggttaaaaatcaggaaaacgtgacgtacgcagaaacgtatgctgatatcccttactttacactgcgactcctctaccttcagtctatcatattccccaaattgatttgatttcaggagtcgggtcctccttgagggaggtttctttccccttgttattccttcttcgtacccttatggctatcgtttcttgagatgtatcttctagcttaatcctctcggatctttgttgtttcttcctttcgatttcttctttccatatgtccgttcgtcaagttctcttgactatccagttttcggtctgtctttctctgtatgtctacgtaatctacaaataccctcagttctctttgcccattgtacgcacacaaaataagggggaaaggaaatgtagacatattcgagcaactttcttcatttataaaacgctgatgcgcgcgtgtgtgtgttcttgtacgctataagatttctttccctttcgtttaactttcgaaccatacggtgagatagagtatgaacctcagagctctgtccgtctgttcttgatatccaaaagctcgacctgtcattcgaacgagaaaccaagacgagtcaactgacaagattccttgtttccctcttttttaagaaataacgaaagggaaatggaagtgaacgaacctcaaagacaagagctgcgttcccagggatgacacctccggcaccccgggcaccatatcccatatcagcagggatgatgagtttcctcttctcaccgatgcacatgtcgagtagaccttgatcccaacctaggttgcgagatttccaaagtattcccccgtcgggtttcgatgtgaacgacaaacaagacacgggtcagacctgaattctcttctctagtcccgatacagaatgtcaaagaatgtgagaaagaaagaaggatgagaaagaaaggaaacgaacccttgatgacttgaccggcgccgagtgtgaaatcaaaaggttggttcctatcaagtgatgaatcaaacttctttccaccgtcgtgtagcgttccggtctgattgtcagatatggattcgagacgcaagattcgagatgccagtcgtttccaagcgttccgaaaaggagatttaagaaaaaaataaaattcaaaaaatcagcggagttcgtccttgaatgatcttaatcaagaaagatgggagaacgaacgtagtgcattgatagcttatcgccttttcgagatttcaaagagcacgactcgggtttgaacttgactcctactcaacacaaaccagacccggcccaacgatgcacacgcacacgcacaaaaaacggatcaagagaatcaatcaagtatgatatcagtagtccgtctgtgatcatcaagtgctcgaaaaacaaagacgggactctaagctgaaaggtgatatatttcaaaagattgttcataccgatctgcaactttttgatcggaccctcaggagcggcagcggcggcggcatggtcatgatcaccatgtccggcgtgggctacgacaaatatggccgagagaaggccgacgatggctgttgaaaagaatctcatgatgaacgatgtatcggttgtgtcgagacgggtgtgagatggagcgaagtgttttaagatgagtcgagttttgagcgaaaagagttggcctgttttggcgtttcatactatcttacgtaaacattccagcacggccccttttcgtgcgcgagcgaggaccagagtgagcaagacgtcctctttgcgcactacgattctagcacaggatcaaaagaaaactgtaacagagggtcatcccatttctagatctcactgaccagagcgaggtgaacgaggaaaagtaagaagaaaaggtttaagtaaaggtagagagatatgtgaaagatggtttataacaaaagatggtcgaataaataagcaaagaaaagagagaagaaaaaaacgagaaagccaagtttgcatcaagcaaggctcactcagagagattcaaaccaagatgagatcctgctcatcctgtttctgactaaagcagaagattaagaggtaggagactagcgagcaatccacactcgtcagcacgcgaaaagagaaaagaaaaagaaaaagatggtgggaaaattaacaaggaaagattgagaggcaaaaaaactgcagatattctttccaagggtggagctcaagaccgccgaggcccacggccaccagggttcatggacgacttattcaggcatggtttaagagtgatacttcttgacggcggtcagataagcctgtccactttcggtgagcgcaccgtttgaccaggcgggccagacggtgccaagaccgtcaccgttgctcatggcgtaaccgatgactcggctgtcggcttcaaagatgtcaacgatgtcggcgatgaaggtgttgatagcagtctgatcggtgcagggaacaaagctagaagagtcatcgacacaggcaaactcgttgaccatcatcggtttcccgtacttgttgtaaaagtaatcgagatcggccttgacgccggccatggagttcttgttgatgtgaacgctggtaaagtcccagtcgacctcgatcaagttcttgaacggcgtaagccaagtctcgtcgagttgcttgcacatcgaaggcgaaccaagaacagaaccctttgctttgagtggcccgacgagctggttccaaaggagcgctccagtgatctccgatagcccagacgagccacttcctgcggcacaatcgggctcctcaaatccaaagacgaatttcggagtgtaggtgagcgctttgaaagcggccagccgagaggcatcggtcgcgtcgactgttcctcctccccaaagcatgttgaccgcgatcggagttccggtatgtccggacgggttggcggacctatgggtagatgggcgtgtgtaagagaagacatatcgaatatcaataagaaatgagcgagaagagaggactaaacagcgtgacgaaaaaggaagagaggagacgtaccagtcgtaccaccatccgatgtatggagacatgatatcataggtgtctccagcagagattccggctttgttaccgttgggaatccaggcagagtacgtgctggtcgaggtggccgaagcgacggcgctagaagcggtggaagaagccttgaccgaggaggataaggtggaagagaccttgaccgaggaggaagaggaggcggcggcattggaggtagtggtggctgcggcggcctgaacgatctgggcagtcgaggtggaaacaacagaagaagacggggaagatgagtaagatgatgcctttgaggtggcgacggtggcagcagtagtggttgtagcgaccggcttggaagagctagcagtgtagacagccgtggaggaggaagaagaagaagaagaagaagaagaagaagaaagaacgctggaggaagaagactttgctttgcaagctccggtcgttcgcttcctcatctggacggatccagggagctgtctgccatgaatatcgaacagagggctggctgccgctcgcttattgttcagagctctgttgtggtttctgttaccggctgttccatggttggctgccaggccaaaggaagaaagcacgagaatagctgctgcggccgtgtttgtgaagagcatggttgagtgaacagagatggggatacgaagagtacgaagcaagaacggatgggtggtatgacgatcaggtataagaaaccaagagggtgggagagtctttaaagaacgtgtggacgttgacttgcaactgaggctcaacggagaaaaaggggacgaaaacgaagacgaaggagaacgagggatgtggatgtatggaagtgaatgagtgtcgacgatagaaacgaggcgaacgagatttcaagaaagcaaatcgaagacgaaaacggaaaatgagggttgacgatgagaaggaagaaaagaaaaacaaaaggaaattagccggcaggtaaaaaaaatcctgttcgcctcggtggccccggccggatcaactttggttcctgcgttcggctgccatcgatctctgtccatccggttcttgcttctcacacagcgtctcacatgtgttctcattcctgttctcatctgtgttctcgcacacccactcacatacacattcacatacacatacacatacccatctctcccccagcacttcctccttcaacatcgacagacaacggcaacaacaacaacaacaacgacgacaacggcagtcatccccactgggctgcagtctgcgcgcacgcgcgcggggtcgaccctggctccggatccgggcgaccctcggtgtgacagaggacgaggggcgagagcacgggcgtgggcttgggcgtgggcgtgggtgcgagcctgggcctgggcctaggccttgaagggcgatcgggggtgttacgtaagatttcattaaggggaaggaagtgtctcagggttcgcgtcgtgtcgtgtcgtgtcgcgtcacgtaacgcgtgacgcgcaaagacgcgtcattactttccacgcgccacgcgtcggtcaacagatcggttgatctctccctcgcgttctcattaacgatcctaacgtttgcgctctcgttcactcgtcctcgacacatcacacccaatcactggcccttagtatgagtgaagaaaagacaaagcagacgctcgcaaagctctttgggcagcatatcctcactgacaatgctctccaagcagaatgcatgtatctttttctttttctcaattcttgactggtgttccgtctggtaccattccgctcactcactcctactgactctctttctcactctctttctcacaggtctgtccattctccgcctatatgcccttccacccgatgaactgtttttcaaatgggaagccttcgtactcaatcacctaaagccctcaaagtctggtgccaacccggtgttcacgttggagaacgcaaaggaacttcataaagaaatccagagagaagcccttgccaagagatccatccccggggctggaaggacacccataggtacccatcaggctggatcaatggctcataaacctgccaatggctctgtcaagagacagtctggtatttcatctggtctggagttgtgagtctcatgtgcatggtcgggatgatcgatgcggtttgcgggacttgactgacgtttgatctcaactctatcttcacctttccctttttgtcgttccttcttcctcaaacccatactctagcctcgacttcaaccctgccactccttctgccaagaaacctcggccatcatcgtctttgtcagcttctaaccctgctcgccaacctaaacaggagccggcatcctccccgttctcacttcctcctaccaacgcaacacccagactggaagccctcgccaggctcaacccatcaatcaagacagaacaaattggaacgccagagaaagaaggatcaaactctgtgttttctagcccatcggctttgtaagtgacaccatcaagcctcgtgtcatccggagaattctggcatagccgctctttctataactatctccttgttgtatccgttccatccttacagaactccggccggatcgaaccagtttcactccaggacgaacgctctctctactaccgacactctgaacgcacatcttgaaccagcccccattccggccatcccgctctcagcaacgtctgtcaaaggcagaatcacgttcagtgccggggccgacccaaaggactatgcttgtaggctctctttctttcttcatttccaattttttgctatttggtctgtttctttcctattttcttttttcttgactgttcactaacaaaaaaaaaccatactctttagatcgatacatgtttgaaaaagtttctgagcgaagcgaaggtatgactttcatctttactttctacccccttgtttcctcctcgctcaccccaatccttacgacccttccttttgaaagtcctcgactcgagaatcaacgaccttgctactcacctcctcagcgcatttccttctcttcccgaaccagccgacccatcagtcccgacatccacccaaattttcaccgtcggtcaaatcacaatcgatccggaacaaaccacttcgaaactcaatgaccattccctcgtccttcaaacttcaagaatcgtaggcgctggtggaaggatacccatcagattcactgagggatgtaaagttagaggaggaccagaaggtgtcggttctgtcgggctgttcagtggtggcgtctggggtttcatgggaagaaacggaagtggacgggagttttgggtagacgaagtgttgatcgttagtctcccttggctttttttttcttcgtttgcgcgcatatcgttgaaaccaaacatggcctcaccctgttttaatcttccttttctgttctcgctcgtcaaaaagcccccgcctccgccgttctcgtcaacgcccgcctcagaaatcctcgagatgcaacacggtccaaagatgggttctcagccggtctctgtctttgctgcctctggaccgttcacattagacgctgatttagagtatgagcctcttgaagcgctggtcgaagaggtcaagcgttgcaggccggattgcatcattctcgttcgtgctttacttttccctttcgggcctgcttcgcgcatacactccctttgactcatttaacccctctttcaattatagatgggcccatttctctcctcagcccatccttttgtcaaatcaggaaacctgactctatcacctaccgagatatttcaatcaaagatctcttcgagactgaaggatattttggataccgttgttggcagtcagatcgtcttggtacctggagtgagagacttgatcactgatcaggtctgtttcccacaaggaatgttggacagagatgtcgtcttgccgtccaaggtgtgtcttctccagcagagtaaacttgatatattgaccttcttcgtctgtctcttttttttttcttctttttttttttcttacccaaactttttctttctttctgttttctttcatcatccggcacctatcctgccttagagggtcagactacttccgaatccatgcctgatcaacatcaacgaggtcttcatagggatctcctctgttgatacactcttccatctaagaaaagaaacgttcttcaagcaagcaaaggaagccatctcgaccgagacgagtggtggtggagggataggagatttgatggcgggtgtctgcaggagtctcttacatcagcgatcgttcgtcctattttgcatccttccccctttttcccttcccttccttcagccctcttcttgagaatcatcgggcttgctaaccaagatgaaggttcctctctcccctatatgtgtctgtccttcacattcgcccaaaacagattttatccgttatatccagtcccgatcgaagcgagcgcagatgtgaacctcgatctgacacactatgatctcctaaagatggagacctgtcctgatgttttgctacttccttccaacctcggcaaattcgctaaagtctgtccctcttttccctcgtctttctttaccttcttcttgttcttgatggcttgtctctccgctgtcgatcgaacgtgatcctgatctaccctcgttatggctctatctattcgtcactgaacagatcgtggattctgtgatcgtcgtcaacccaggaagactctcccaacgatcgtccggagggacgttctctaaattcgtcatccatccgatcgacaaagagtctctcattagttctgctcgttcagcagccggcgcacaagccggaggtggtggtcttggcgaggaaggggatgtggagcatgaggcctttggaagaattagagttgacatcgtcaggatctagacatttcttcatgaaggggtttcttttcatttctttctttcctttcagaggagggtcatacttcgaattcgctttgacttggtttgatgcaactgagagaactagagagggaaaccatttgattttgacctcatcgtcacacattgtcaagaaaaggcgctgttctaaaggaacagaaagaaagcaaggggaaataagatcaggtcgtcttccgttcctctggatgaacccttttcacagctccgctcggccaaccggactttagagtcaacacagaacccaggagtgagagatccctaacaggttcttataaagcagctttggtacttccaccctcatcaccaggagaggcagcagcggcccaatcgatgacccattctttccctagtccttgttgaggtccaacttcgatcccactacctagttgcattccttcttcttccggtgcggcaaaactattcacgttcgtacatgtagtagttcgtagggggaaagacaaaagacaaagacaaagagagagaggtgttattggcaaatgaatatgcgcgcatcaggagagttgaaataagaatggactgagtagcagggacgttaccaggctcttagagggcaaacggaaatatagcctagtttgcagatgaacacacaccacatcaaaaattaaaacaaaattgagaaaatagacaggggaatctagacaatctcttaagaaaactaattccaaagacaaaccttgatcgatcgcccaggtatcagttcctacgggtacggtggacgccaatgggttaatcaaaggatgcatatcaggtttgaagtgaaacacaagttgttcatccgctggaggattcgtcgggtccactggttccttagttcccgcgctaggcaacggtttgaatagactagcatctggtgagtccgaacgaagtcgatagatagatattaaacgttgtgtcagtttggtgtggtccgcgtagaattcaggcttctgacacgaacagttgtttctccagactcttgtgaagaacactcttggatccttcaacttctcctccactaatggcaggtttacactgtagaggtcgatctcttcttttctgctagcccagccgttagtatctaccccccaatcttcccagaggcgacggatgatctccacactagcgatattggccagtcggagagactcaggagtgaacgttcgattcatgatcccgtacgacagcgcgatcgaccgtgtccgagacagggacccagaaagagcagctccgatcgtcccggaagaaagagaaaaggcagaggaagagttccgaccctgcatgtcgcatcaagctcagatgagcttacactgacgcagctcttgtatagttgcgaggtcacgtggaacatagaacactcacaaagttgggccctgacggatcgattgagttatacatgtataaattcagcaccgagtcctgagctgtttgtaaacgggacagctcgaagagcgagatccaagcagttcgaacttaccagagatgaccagatcgatctcgccggggtataggttgaaaagcgagatgttggtgcatgtagccggtgtctagcggcacgaacaaacagagtcgggtcgatcaagcgagtgatcaaatgactattggttagatctgtcttacggaatgctagccataggctccaatcgtatcaaacaggtactgactccatccaacagaatccactcgcctacttcgccttccttcagaggtcgccgaaaaggggttttctcgccctatatacttcaagaagaccggttagcagctgtctttgtttgtctttagaaacaaacctcgaagctatgaagagacccaagcagacaactaaccgctccttcaggttcagtagggtagtagtagttggctgcgatgttatcttggatctaaagttatcagagatgcatgtttcagccatggcgcaccggcgacaagggttattcgcttggcacaagatgcctagagtcagagaagggcaagagacgatccacaaacctggtaggcctttccgatccacgacttctgactagaaggcacgactaccttgacatcccatcccaaggtcttctcaagcgccctggcaaatgaaaagatgtttggtgactccttggtagacggagggccatcatcactgagatcaagagtatccgtcggtagccgaagtgatggttagagaagaggagatattctagaggcgcagaaccgaatgaaggaacgcttacttcgtgagtagtactctcagtcttttagtactcatgacttctctttgttcttctcgtgcgttggagagaaggaagaaagagagaaagagagaaagagagaaagagagaaagaaagaaagaaagaaaggaagtggaccgggggtgagaaggaagctgaaccggaggcaatgaagatgatgtcgttttgctgtgctcgtgcgtgatctccaacgccacataatcgccaaccccacttaccccatcgttatcagtccattgcatctcgaacaacatacatccacaacacatatttgctagaacacacacgcacacacctacacatacacacatatagacgtacatacactatgaacaaacatccacaagcaaatcagacaggacctaggttgatacttccattggcaaagcactcacttggaccgttcgtcctgggtaggttcctcagtcagattcagtcagaaagctagtaaccaacactgatctatgcgattcacaacaaaggatcaaccctattttcgacgctggattttctcagaacatccgccggtagacaatcgtatccttgggtccatatcaagtacgatactaaggtatatgctctcctgcgtcttcgttgaaaacggaaaaccgagttcgctgatgtacagacttcttgttgacaggctgtgtcaaccacaccaatcctggttgtcctacttccttcgatccacctcgtattcacttcccctgaacaagtactctgccaaatccatatactctctctgcctcttcctacactaagcctaacatatcatccgtcctcatccactcaatccgatccaatatcgctatgtacacctgatcgcccactcacattcggaaccacctcggcagttttcggaccaacgttcaacgggagtccatcggagaccaacggagcaaaatcgccttgttcaactagtggtagaggagagggagaggtcaaagaggtttggtatcctgggctaggatttagagggaaagagcctggcgagggagaagaagatattgaggggaaaggatggagggaagagcgagtgaggagtattcatctgtgtgagagagaggattggcggataggtttgagtacgtttgaagattcagactcggaaagagtatggaaaaggttgaaattgaagaccaagaaagaccgagtcgaactagagaaggtgacgattgatgtaagttcccatcacctttcttgtacgtctcagctctgttcaggcatgttgatcgagcttcgcgctcgcatgtctttcataggcccataatagatctgccatactctcattccttccactcacaattgggccattacagatcaaattgaacgaaacaacctcaacagatcttctggtcgagcttggtccaccgctgcggagtttttggaaggaagactctcgtctgaggattcattatttgggagactcggaacagagcgaagatgaggatggatttgatggccagggttgctgtgtgtttttccttttttttatttatcagaagatagagtggttcgtgagtgtgctcgctaaactggccgtttgtctctttccgaacttagatttctggaactatcttcagtatggaattgtaagcaacaccctgcgctccattctctttggccttctcagcgttaacattcaagtaaattcaactctcccttctcttcgtattcaatcaggacttccttctatctccctctcatatggtgatcaaaatgatcttccactcgaatcttgtaagatcctatacttcaacttcctcgttcgaatcgacttcttatgtcctctcgcgcattcgaccgtactcgttgctaaccctaattcgtttcatttatacagcctggctcggtaacttttggccgcttcgagcgttgtccctggaatttttcctcgagcgactcttcagtattggatgtgactcgtagcgtgagcaattttgtttcatctaacagtgcgcgcacgtcaggctttattcactcaaccctcctacttttttcttgtacctttggttgctaggcggccgtcctactagaaacgatgtcctcttcgctagaatctagagacccagaacaccacggtactaccgctgaagacagccatacgttcttcgggaaggaaacgttaggtttagggatggaacttgatcgggcaggtgaaggctggggacaaggtgttcttttggaagctagcagtatgtttcctcttgacaagcaatgtgacacaggcgtggcttgaaaggctgaccagtctttgagggtttacctctttgttccatgttcgataagcactggttgctgcatcatcctacatcgtgtttgaagttctggagtctggatttgtcgaaagcgtcatcatgtcctgagggcaacctattctcatatcttcctcttctttctttcttttcttctttctatctatctctgacacatctcatcgttcacttgtatcaacaaacttattgcttgttcacttgcctgctttactgattgaccaacgttgtaagaagaatgcatatttcataacctataaacacataacatacaaccccatattgtattccatcgcatttttataaagggcttctcatctctcatgctttaccgtcctatccggtcatatttatgcctctgctctttctaccgttgttctcttggagtgtctcatgcatgtattgcactaagtgaaaccaaattattcataacagaatctatgtacattgaaggaagaaaaaaacgagacgagcgtgatagataaatgagacgagacgagcgagcgggcgggcgagtaagcagataagaaaggaaagaaaagcctccagggcagatacacttgaacaagaaatagaacaaacataatagggatgtataataaaagacgaactcgagcaaacgagaggacgtatgtgtttagtgtaagtggattcgagaaagagaagacaatcgagaagataagagaaaaaaaaatacataagtcgaaatcaaaatcagaagaagaagtccggcttagaaaagagatcgagcgtccgtacttcatcacaaagaataaaggccttcagatatcacctccttttagcttccttcaaaccgcggtatgtttgacgttcaagaagaggaagaagagaagaagtagtagttccagttgtatgtctttacttgggacccttggaatgtatacgaagcaggagacacggaagctgtgacggttccgtcgcgtgtcatcgtcgcgctcattccagatctattttcgataaaggaaagaaggatggaccaaggttagatatagaaacccgttcgaatggcgagaatgaaaaaaggggaacgaacccagattggagagacgcatcgagatagttgattcctgcttggacgtcatgagttgatgagagactcccagacgtgagtgtcactgagcctgctcccgatgcaaagacgagtgcaaagaatttatcctcagtctgacaagttcatttgaataaataaaaaagaagaacgacgacagaaagaatcagtaagtttgtgatctcttttcagtaatcagcgatcagaatcgagattctcacccattggtaaccatccgcgggcccattctgacctccggtcggtcgtccacaatcatcagctgatgcgaccgcactgttcgaatgaggtcgcgccgaaagatggataacatcctgttcgatatcagggtacgagcccgatcggtacgcttcagcaaagtactgattgacctcgagcaaagtcgtgtggttcagaccgtcgacccagctttgagagtttggctgagctccctggataggtccaagataactagattcgccataatcgttccaagtcagagcttcaacaagttggacttggtctcgcttctcgacgagaatctcccatcgtttggcgaacaagaacccgtcagaaagatagatccaattcttgttccagctattgggtccgtaatgggtgaaaaagacaggagataccgaggccatgtaaaccttatcgtcgagtgcggatacgtatgcttcgtcatcgacaaaggtgatgttctcgttcccagtaggccaagctccgttccagtttaggtgaccatccaggacgtcatttccagtgagcgtggctgggtcaacaaacacactaggaaggaaaaacatatccaaccctgtgctcgtcttgaacggagtcttgacttgatcggtgaacccggcagtccagtcagagtctccaaatgtacatgtcgatccagcgaacgtagaaacaattggcttcccgtcataggtcgcttggtttgggtgagaagcgtacgtagtggcgagagagaggatagcttgggcgtctgaagcggatgcgcagggaaagacggacatgtcaaacgagatgaagatcttgaaagaagacccatacttctcggcggctgcataagctgaggcgagttgtgttacttgctataagtaggatcaaagatgaagaggtttgtcgtgagacgcatcattcacccagtagggagaggaaaccaaacgaggagaacgaacccatgagtcggtacccatgttggcggcgaagccatcgaacccgctctccttggcgagtttgatgtcgtcgtaccacatatcttcggtataaggatatgtgtttcctagcatatgatgactggggagataacgcgtaaggtgaaaatgcaagatttgatagaacgtcgcgtaagtaaacagagggcaaggccaagacgaaagagaaaaagaaaatggaaaagactgacacgtaaacagctctgtcggtagggccagccgtggcagaggatgaggacgtggtcgtagcagtggcagctgccgaggcagacacaacagcagaggaggtcgaactaggctgaacagtaggggcaacggaggtcgcagatgcgatggatgtcgcggatgccgcgacgacggaggatgtggtggacgggttgaggttgacgcccacgcttgcatggacaccccaatggttcttcctaccgacaatagatttgacgtgtccttggccaccgacccgtcgaccaggcagatgtgatctcgacctccggagtggtttgtgatgttcggcagaaacgtcggaggagagcaacagaagcgcgagaagggaggacgcgatccaggataggttgggagtcattgtaaggttggtcggttgtttggatgttctacgatacggctacctgagcgaaaagagtgagagcaaacccaagaaagaaggtgaaacagactaccagagtcctgaagagaggcaaagagaaggtcgacgaggaatgaaagagtgaaggaatggaggaatggagataaagaagacaaggaaaggaaagaaaaacaagaaaaatgaaaacatacgggccctttaagtaatcaaggggagggaacaatttggaaacaagcgggaacatccttcccgttaatcctcttacttttcctagatcggtgcatgttggtcaagcgggaagccttgttagcatgcgataaggatgtgtcggtctgtcagttggttgttcagtcatttggtcggctattcagccagccaatcagttagtcagtcagtcgatagatcaatgaagtcggaggatagatgatccagaggatgcaaggacataacgaaagaatcagagagccagtgtaaacagcattgtaaccatcctcatcaaccgaccaccttcacatatgtcggccaacctaccttaccgtatactcgttggtaaagatagatgcaccgtccggttcgaaggactcgtccagggaactgataagccctggctcggtgtcgaatgggatgatccgagtagagggaaacatgatggcgagaaggatggtgtaagatatttcacctgtcggtaggtccggtctccatcttgctctccgtgtttggacaccttgaactgatggcaggctgataggataccagctgccgggtcattcattcgacccacatctgtgaagatcattcgtcctactcctttcttgggaaccttgaaaacccgctaccgaccacccccggttgcaatgaattcggtggattcagatgtctccccggttgaaggtgtcttcctgggcgggtcaaatatcttggtggaagctcccaacctggacaagatccggcggagattaatgaacttggttgcgctcagaaccattggagtagatgaagaagccgttgctggactaggacctggtgaggaggacgagatgaggtcgatgggcacatggggtatgctttctctgatctctttcttcgtgtcactttctctatgcatcgactaatcgaccaatctacccttctatcattggctgtgttcgtagaatcaaagacacttaacctggcacacactctattctcaaactggaccgaggtagctcaaattgtcaatgtactttgtcgtctagaaactctaaacctcaagtaagatccctttcttatcaccgacttccatccgcctcggtacaaacaagcagttgctcaccacgcgcattcacttatcaatcagtgccaaccggttagctactcttcgggaacctgtttcgctcccgtgctttgggcaacttaaatgtctaatgctgaataataccttgatcacatgggaagaggtcagttgcgccaataaacactttatgggcgacgagacagaatctggagtctcttctttctttcctattcatactacatgttttggatttatctatcatgcaaaactaggtacttttcatagagccttcgcttccaaacttgacatcacttgagttgtcctcgaaccgaatcgaaaagatatgtttcccggacgggaaggagcgggagatatttcctcggttagaagaacttcgtttggagtggaacgagtttacttcttgggacaatctgaacgggcttgttacattgagatcgtaagcacagtctgtcctcttttcgttgaacataactatcgcgcatctggagccgcgcgactttcctggagaggaatgaatagtgttgacgggatggtcctcctattgtcctggtacagacttcgccttctctcgctatcagccaacaggttgcccgccttggactcgagcgtccggtcccttcctccttggttaaagttcctcaatctagcgaacaatgttgtcgccggttggaaaagtatagatgtgctgggtgaaaaggcttttgaactggaaggcattgtactacgagggaacccactgttcacatgtctgtctctgtttcttcttttgctctgccccattttcttctcgctcggctgactcaatggacactcatgaacatgaactgtctggcgcatgcagctgtccatcaaggcatgctaagagcaggggtcattgctaggttgggatccttaaggctgatcgatggaagtgacgtaagtaccaatgaggtgtttgatcatttctctggatgttatatacctggaagctagctttccctctttatttttttctatggatattgatcgactggctatcatgatctctttcttcagatccttgattcagagaggaaagatacggagatgtactatctttctcggaatccgagttttccagaaaatactcctggacgatccagatgggattcactcgttgccagtatgtttctcctcttctctttggttgaactactcctgttgtacggcttttgacgttagaagaggtcaactgattggaacatatcgttctactgtcttccagaatacggcgtatcagagaacccgactggctcgatgtcaacaaaacctccgaatgcttccacgcttggtgacaaactcatcagtgagtcagccatactgttcttcttgcaccctgaataacacactcagacaagctacatcatcttcgaaactcaacctagacatcaatctcatccactcatcactgtcttcaccgacaatccttcgagtattaccgagcatgaccctcaagatatgcaaactcaagatatcccgactcaccggcctcaaaccggccgagttccagatcgtatacctgggaacggatgacgaaatcgcagagcatgtggaggacatatggtcggatgagaagaagacgctgggcgagctcggcgccgagcgcggtggaagaattcgaattgatgtgtgttgatgatctaaaagtcacgtgcgccggataaaggctttacccgatggtctcctcgacgactgcgcattttcaagcgccgggtgaaagaaaaaaacgaaaagggaaaaaagattccaacccactcttcatcgaccatcaaccactcactcgttctatctcatagcttgcatactctttctgggtagagaacagaactctaggcttcacatcggaaggttgaccttgcgaaagatctctatctcctcctttgtccaatctaattgcatcaccatggcttccagccctcagggttagttctctctttggtctgttcaacatgcatctttttatttctattttcttttatcttcttctgctttgtttctctcttgtttcttcctgttcccttgcaatggtagatggacatgagtcttcaatcctaacgacgcgggtgtttaatgggatgggagcagctgggcgacgaatgagctgacagggatggacagcaagccagctcaagctcgcatgggtgatcgagcatacgtgtgtttgaaatttagaatactcagcctaacgcgtcaccggcctcttttttccttgttctcgttctctcccacgacttggcactcatccaatactctatgttgtcttgcctctcctcgttctcaacttgtatacaccgtagaccaaaagtcctcaggcttgttccaatcggcatccaaaagctcaaagtctgacacccggtccgccgcgtcaggacaagcagaggacgttcggctagccccggtcggtcctacggtccatggtatctcggccggagcttcgcaactagggggagctgcccattcgatgacatcggaggattcttacatgggagccttcggaagaaattcaaacggaaagccttgtgagctgtcttattctgttttggttcttcgcctccgtctctatgagtggtctgcattcgagatcaggtagcaggttcactgacacttagttcggcttaatagcttcaccccatgcaccattctctactgcacccgtgtcaaacaaatacccatcgcgtccacctcattttgcctttccccagcctggctctcctacaggcttctcctcatctgcagctccgggcgcgcacctgctaggcaaccctcctcggtcatctggataccctcatcaactcccacacaacaccggtttctcctttggaataggaactagctcaatcaaccctcctcgggacccaggattgttccaacagacgagctctcagcactcattctctatacctccttcttcaaaggaacccatgtcgagacttctaggattcaacgcaggaaatacttctgctcactccgcgacaaagtcatctggctcctctattcctagcccacgctcgtcagaacagcctatttctccaagcaaggacgataccaacaatggtgccagcaatcacgttcaacgatcttctgttggaccctcatggtctggtcagtccagacgatctcccatactaggagacgccgaccgtgagactcgggagaaggaacacaaagaaaaagagaaggtcactcgatcacacatcgaagtactgaaccgaccagcataccgatcgaccccttcgtcttctccgcccatacacgcgaacaatccgaaagatgccttgctacttcccactgggtcgtcacaacacccgcctgcgtcgtcgcgatcttcagcaacgctagcctcttctgcacggcctcagtctggagaagatagacgggaagttatccgactgaacgccggttcagaatcaaatcctattcaggcagcgggccagcccatcctggagagaagagagcctaggccgtatgggttttcgtttcacaacccatctgccgtcagcccggttggtccattgccaggtgttggcagttcatcgggccacaagcgttcggaagggatcaagtcggcttccggatcgcctgtccgggctggttatgcttctcattctgggatgacttctctaccatccccggcaatgccagctgtggttcccgttccggcttcccggaaatatggtctcgtgcacgcgacttcttctctccctcctgtgccgtcgtccggcggaacaaactctcatagtcaaccaggtcaacagcaccgccattcctctgggactggaggcatgaaagtcattgagcctatggatatctcctcagggtcgtcaaacctttctcagcagtctgctcactcgcattcccatcaacatacccatcatccgcattcacatcctctccttcttccgcctcaacatcagtaccagcatcagcatcagcatcagcatcaaccaatggtttcgtctactctgctccctccaccaccaccaccgccgccggcacctcctccatctatgatcctttcgaattctaacagttctactagcgcatcctctcgtaaatcgaaatctcatcgatacaccgttcctccgtcaattccttcatccaccacgacatcttccctcctccgtccagaatttaacccgactctgctctctagcgcacctaatccaactgttcgatctccattcctcatctcacttcccagagaagtaccgtatctcggcaagttcgtttacggaggacaagggtggatcttgccttgtgaggtcggggaaaaagctcatgagttgatgcgtgtgcctgcgggcgggggttcggctagatccgctcggggtggatcaggaggaggaggtagagtcgaagtcatcattccgagcggattcctcggaacgggttggacgttaaagtccaagatgggcggtggcggaagctctgtcgacaagccatccatctttggaactgatggttggaacgcgctggtcgattcgatcgggagagaaagaagtttgtggggaacagaagtttatacggacgattcggatctcgtcgctctgcttgtccatgccggttggattgtacctgcatctgagagtgacaatgtgaacgataaacccgatggagctcgagtcagaacagaagcagaagcagaggtggaggcagaagggcgggaaggagataggttgggtggcaacgggaacggccgtagcagtgatagtgatttatggagagagagcggagcgctaagagtgacgttgagggtggtcggtcgattgattaggtatatcggaaccgaacgaaatggcgtgaagagtagaggttgggggaacggacatgatggtggaagtttggtcgtagagggtgtaactagggttgaggtttgtctttttcttcttcctatttcccttttcctttatcgttctggaatttcttcgtgttactgatctttctatttttctatttttcatacgcgactacagcgaacgaaccggacaagctctctctcccgacgcacaaaaaaggctcgaatgacacaagcgatccaactccggaccgaatctataaaggaagacaattctgcggtcataaatattcatgtatggggtggagctgggtaggtcttttttttcccatcttttagtcatatacgcattccgctcatcgatatagtttatctcgatcgtctctcttacagattcaagtattctcaagcagggatccaatcttcattcaataatgcgttatacaacgcgttcgcttctctctctcttccgacagaaaacgggccgttaggcgaggttcccgatgggtttgatacagggttcagaactcaggatttatatctggaaaaccctgatgagcggtacgtcgtctgggcgcatcttttgtctatcatcggccatgagtcaattggatttgtctgatcagcttttcattcgtttccgttctcctcgaatgctcgaacttaggtatcgcctaactctctccacctcgatcgagagcgatctatcaaccgggacaaacagcccccgattctcgatatacgtccttccgaaacggtcttctaccacataccctttccttcgcccgctggattcatatgtatccccgatgcaggaacagacagcccaaaaggatacacacatggcaacggagggagaaggcaaacaggaggaacttttaggagaatcaaccgtcggcccttccgatcttgaatgggtcgagatgggcttggtcgttcgtgactcatcctccgtctcatcttcttcttttaccgctggcgctactcttggcgaatctgcgaacaaaatcggaattgaaggccaaatcggagatggagaaggaaaagaaggacaaggcgccggtcaagttagaacaggttggttctgcaagatcgagtcttactggtgggcccctcgattgtcggaccggacagaatgaagagagagagagaatcttctttcttccaatctgggttcagaccgaacgtcgctctagaaccctcttctcttttttccttcttgatgctccaaatagttataaagagttggatggaaagccaaaaagaagtaatataaataatgattaaagatctattcgatcttgcctttctctatttgctttgcccttgacttgttcttggtcacaatcttaacgaaacgtagaacgacatgaactggctcttttagagaaaagaaagcatacatagccatgagagttcctttgggtttcaaaccgaacccgtaaaagagggcaagaaaaagaaacagaattatggttcatcgaaactaggttgttcgaacccatcgaatcctaattcgatccgattgagatttccgacccaggcatgggaattgaaagagaacgaatcccccataagcaaggatacaagagaatcagaatacaacaagcagggtttgaagaaaggagacagaaggaagagaagaaacagacctgataatcgacgttcttgacatgcttgaacaaggtccatcctatgcatgtacgagcacgcattccgtagcctattcgagcacaattcgaacatgacacagaggtgagaagggaaagaacggttaaacttgcgctcgtactttccgaagcaaaagaagaaaaaacagtagagacaggactagagagaaaaacaagcaaaaagaacgtacgtgtcccagagaacatcacttcctattccctttcctttgactccatcgatatccgagttaggatcttccatcgattccacgtgttgaagtctcagagcggagagaacatgttcggctgcttcggagtatctctatttccgtgtcgtttggttgtttttggtggtgacaatccgaataatcagatatctatgcagagctaggggaggcgaatcgaaaagcaacaaggaagaagagacgtactttgaggttgatgcatgatattcctaggttaaacctgcaaggtgatttgaaccagccagaacgtttcgtagaaaggccttctggatcagcgtctcgagataccatacaggaaatgagaggagtctagagcagatcaaggaggagagaacgctacctggctctaataaatccaggccgtaaccctaaggcagcccaatacaattcgtaggcctcttgagctttcccatcactgagagaaaagaggaggacgagatgttcgaaccggtatcagaacggatcgagttagctcacatttttcaggtttgattcataaatgggatcaatctcagagggagggcaaggagacttactttgcgagggttgcgcctagacggttgtacaattgccagtccttgtggagcatcaaccaaacggcaagtcaatcattggcctgttgacttgtttttcagggaactaacgaaatgagagaagaaggaaaggataaacccacattaggcttcacggagagagctgtcctgaaacagtcttgggcgcgttgatactcctttggtttgggtgataggaagaagaggaagatgagcaattgcctcatggaaggaagatgaaagtgaaaggcacaaggtgcaagtatactcaccgctgtcgagctgaacaacactccgagtgcaacctgaacctctggatcgatttgactttgattccccaatctagccatggtgatcaatcgatctaccaactctgaatgtctcttcgcgatcctttccgccgcttctgctcccctttgttcagccttttctctctctcttcctagatcggcatccgtctgatgaagagagcctccgagtcgaagtggttcataggcaggcacagcgttcgcatagacgttcacccaatcttccagagtactcaacgcagcgaggcggtcattatcgttcgtcaacgagaccgccaaagagaggtatgcctccgggatagatgggtcgagtgagatagatttcttgagggcgagaattgcttgtgactctcgctgatttttagaaaacaagaagattcgttagaagaccgattatcgggctcgagaaagatctgaagagattggcaaaagagcacaagagagaaggacggacctcgttttcttgctgcttgacccctagttcgaaccatgccctcccattcttcgggtcgttcagaaccctagcctccatctctaacacgcctttccatccttcttgatggtcgctctcgagcagagcttgctgctctgctctccatccgtctctcagccaagggtttccgttttgaaatatatactgttcctgcctatcgaaatcggcatcaccgagtgtatccgatccttggaggagccggttgatttcttcttcccttgcacttgattgagcaccggggacgttgatgtgcataggtccgttaaagaacttgaaagcttcgtcttcatcctcctcctcccatagagagttagaacccaaaacctcggtagccgatttaagttccggttcggtcagtgctgtgtaggcactttcttcttcgggtcggcctgattgtgtggctaaggtcgaaggcatattggagatcagatgttcttgtcgattgaattgggcgtcccaatcgtcaaccgtccgggcggaagcggtggcggtggcggcatcgacgctaaatggttgtctattcaagagagacccgccggtcatcgtctgaggatcgaacgctcctgactgaaatccgagatggccaaagccgtttggttgagtgtaaaataactcggagctatcggcggtggtggcggccgcagggctatcaacaacatgcatccgttctttgccttttcctcgttgagcagaagcgaacgattgggcccagccttcctcgccttcccttccgagttcaaccacatgctctccttgaacatccttcgtcccagcggcaaactgttccatcagacccatgaaggcagagtttgccattctgtttgctaccggatctgccgacgtccggtcgacccgctgaagcagcaggtccgccgtctcggcaagagaggacgacatgaggttttctctctcggccggagattgaatagatggagcagagtagtctgagctgatttgagccgggtgtgaaacaaccggatgagggatatgatggtgatgcattggcacagacggtgcataagaatggaaggcgggctgtgtggggaggaatggagggtctgttggtatcagaggaatgtttcgtaacatctttaatcagttgaatcatcaactatcaactattgatctttgggcaagaagacatgaagcacacgtacgatatgtcggacctgtcaaatgatgggtctggcttgaagggcctgcaagagcgaatgcttgctgtggagcccggctattttcaaatctaaggagaccgttggttgtatctggatgagaagagaagcaaaatgagacttccacttgatctgaggtcgagagggatgggttgaagagaagcaagcgacttactggatattggtggacgagcatttgcagtgattcgagctcgctcaaatgcctcctgaagctctgcgtctccgcgacttggttgtatgaactgaaggtgagcttgttgcgggctgtactcggaagcccatctggaatctgattggacgtggttgagaggtctgacttgattttgttgatgctgatgggtcgacgggccaggagatggggcgatggttcggaacgaagctgcaggctaggaggtaggaggtaagaggcaagaccgaaggatgacagatgggttcagcttgagagtgtctgagacaggatggagtatggtctgagcaagagcatcgagacgaagacacacctgtctggaaggacctgctctggagctgccatatatgtcctgtggtgagatatgaggttcagtagtgctaacggcaaaggagatggtaagagaggaacaggatagcctaccgattgaggtcctctgtcttgatgaaatgttgacgataatttgttcaatggattgttgactcccttgtctcctccggacagcatggcagggaaggacattttgtgtgtgtggcagtagtagcggtagtgtcagaggtgatggtggtgatggtggtagtagtagtagcagtagtagtatgagcagcagcagaagtagtactggcgagagcgcgagtgcgagaagtaaaagtaaaggaacgagcgagatgatcgttcgcgtaggaaacagacaaccgccggcagaccggctattgtggattgccgtgggcaagagctgtgcttggctgtatgcagcacgtgatacttcgccctccaacggccgcgaccggggtccctctgtggcacaagcccgtccgaggccgggctggcgtttgctggtacctgaaaatagagttcacatgttcctgacgtactaaatactgacgatctgtttatgaaatctaaatttagatacgaagatgactgtccgccctacgtgggtgcgtgtcatcttccaaggacttctattaccaacacatcccaatcgctccctccggcctccgttcatacgaagaagaagacgctaaggtgatggtcataccactttcagccgttactcacttcacacagacccaacttgtgctcacactacacacccctatcgttatagagactacacacggtcggcccatgctaaccagatgaactataagcctcgtgttcaagtctttggatacgtgggttcagcctaaaaagtatttgatccatcatcctggccatctggtacaccgtccctccgactaaaaaccgtcttgtccacgttgggtctggcatattgatcttggccaaactcgctcatatcttgttccatccgatcacccccacatggtccattgggtccccactttaatggatcgagagagatgacccttataaagtacatactcttttctgcttctgcctcttttcatttccccatcttcttgctctacaactctttctcacattcagcatacttctattttctctcttatctctgtccttgtatctattcctacccatcatgatctctgacaccgtcatcgccattcttgccgtcgccctcgtcggctcgaccgtacaagcagctcctgtcgatgcgaccgcgacctcaacctcaggtattatcgcggtcccaatctcaaagagcgctgctcagcttgctcgagaggccgacccggtcgtatctctcgactggctcaagaagaccaaagctcaggctcaatagtcagtgttttcattgccactctttgagtgtaatcttggtctcgatttgcgctgtgcggacatggttctgactaggcatgtgcgtgtatgtgcgtttcgacatatagtaagcacaagcaggccaacgcccggcttcactccaagcgagccaccggagcatccgttttgaccgatcagggaagtgagtctctctggactggacctatcaccatcggtggacaatccttgtgcgtttccgtcatcaagtcttttttttcttcttggtagtatcgggatttaggcgctaacgtacgtttggtaatcgtattcgggttccttctcttcctctagtactgtcgactgggataccggttcatctgatttatggcaagtccgacatcattctattctatctatacaacacgctctcaacctgcttcatttcacgtacttctcttcaatagggttccttcttcggcctgctcaagcgctgcctgtaacgcacaccacaagtataccttgacctccactggaaagaaggtaatgatgctcgctcagtcttcgaagacctctcgcccaaaagctaacctgtcaaggattggaaatatatagcaatccggcacgttctcgatctcctacggagacggctcgagcgcttccggtccagtctacaaggacaacgtcgtggcttccggactccaggcgacatcccaggtgttcggggccgtcacctcagagtctagctctgtgagtgttttcctttattttgtcctactcgtcgagcaaaagggcccaggatgtgttctgatcatgtgtattcgttcacctcccttgtttcatagttctcgtctgatccatctgatggaatcagcggtctcggctggcctgcgctcgcccagttgtccggaacatcatatttctgtacgtagtggaaagctcttgtttctgtgtctatttgttttggtctttttctaactctggtttggatttctctctttttcttcatcatcaagggtctctgatcaaccagggtacggtaacctccccagtgttctctttcaggctcgccaccacaaactctgagctctgtacgttactttctctttcttgcatctcactcaatttgattcatgctggtgctaacctaaagtttccttttgttttcctcttccgaaaagacttgggcggaattaactcggcccactacactggtgcgatcacctacacgcctgtcactcagaaggcctactggacgatcgcccttggtggagtctccggtatgtctgctcgctcgtgtttaatttctatcagcaactctcaagttttgaactgcaattcacccgattgatctcttttctgtattttcgtcggtttcagtcaacggcgctgccattaacccctccgtttcgagcgctatcattgataccggtcagtcgttttcctagttgtatgctgactaggactttgagctgctcttctcatcctcttttcttttacacacacactgcccggtttgtaggaactaccttggtgtatggtcccactgcgggagtcgctgcgctgtacgcaaagattccgggatcggcttcgatggctgatacctatggatccgactatcaaggttactacaccttcccttgtaagttcctttccttcctcgctctccctctttttttttccttttccgttttttttgggctcctcctttctagtcgcgccaggttcactgacaccgagaccctctctcgcggcgacgacgacttttctaaattaattaactttgattgaaaaaatcgaatataggctcggccgttccaacggtagccttgacgttcggaggatcgtccttctccgtccctacttctgcgttcaacctaggaacagtctcatccgggtcgaagcagtgtgtaggtggaatcgtaggccagggtgatggatcctggttggtcggtgatgtcttcttgcagggcgtatagtgagcttcctttccttttcttccttcttctcctccagttgtccctcgtgtttgtttgtttgtttgttttttcgtcgagctgatgaatgttctttcgtccgggacacctttttcttcttcgtttcgtaaaagctcaatctacgatgttggaaacgccagagtcggattcgccaagaccgtctaaaagaaacgcaaggcttttcctctcatcttctcttctctttataattcagacggcaaggcggagggagcatctagttctatatcagcatggtaggggacgggcagtattgtactctaggcagggatataaaaagatagaacgaatggatggataaaaggaaggaatctaaagaaaaacagacatgccaagaggatgaaccgagctgagcttagataaaaggttccctcgatcttctgtttcgaatagtttgacttgatctatcaatataccccgttcatcgtctctgtttgcttgttttgaaaagaacgagagaaagagatccaaaagatgagcgatagagcatgactggtttttgtatatagaaagatgcctgctggatcaagtccttcctctctgagctgagaaggaaagaaaggaaagaaaagaaactgttcgatttagttgatctggtgcactatagagtcagcccttcgatcaatcagccagatcagtaggtcggtcagtccatcaatccttctgttctcaaaacaagcttctttcgtgtttctctcaactttccttgcgtacgaacatttgcctttctcaacatcagacgagaaaacttgtgtgcgtcggcgaggcagccaaagaagatgatgagaaaaatagcatgcaattccgtccctctttttatgcgtcccaaccagcgttggcggcggcaggagcctgagcctggggctcatcagcggaccaggaagcagcaggagcgtcggcggcccagtcggtgttctggtcagcggaccagtcgacgtctagagaaggagaagaaaaaaaacagagacagcttgtgagaaaaagaaatcccctaatggccaatacacagattaaacaatagagaaactagaaacggatgacttactctcaccagcgggggcggaagcgatggcgggaagggaagcatcccactcaggggcctcaggagcggcctcggcggatccctcggcggcagcggccttggcggcggcagcgtcggcagcctccttctcgacctcttcggggtctcggtagaagaacatgtcgggcatgatggcccagggctcggttcgggagacggatcctcggagtcggaggacctctcgggcaaggaaccaccacataagaccgatggagtgcttggacttgttgttggtggggatggcgatgtcaacaaacttgaggggagcgtcagtgtcgcaaagagcgatgacgggaatgttgacgaaagcggactctcggatggcctggtgatcgactcgggggtcggtcacaacgatgattcggggctccttgaacgatcgggtgatgtagttggtgctgaggagaaaggagaatgaatgtaaaaaattctgtcagctgttgtttttctgactgcaaccaaggacagacttcgagtacatagatactcacaagtttccgggggtgaatcgtccagcgatggcctgggcaccggtctgggaagcgaacttgaggacagctcggtgaccgtagggtcgggcggagatcacgcagatgtcgttagggttctcgatcgaggcgagaactcgggcggcaaggacgagcttctcccaagtctttccgacgttgatgaggttgatacctagatgtcgatgaggacgaacgaagaaaacaagacaaagaacgatttagggggtctgacattcttcatgcaacagtccccgtgttctcgttggtggcacaacccccttttggacgttttcttccccaccaccttttcctacgccgtcacacaccgtcgaaaaggggcaggggagaagagactgatgggtgggaagagaaaaaggacaaagaacacaggaactaaccgtcagctcgtcgcttccagacgtaaggctccatagccttctcgcagttcttggacccaatgtggcactgggcggcaagaaggagctgaatatcgtcctcggtggcgttaagcacggaggggaggggaacggcggccatattgaaggaagattggggctggagttgagtgtgttgagggaggggattcagagaaaaatgcgagggtagtggttggatgtaagaaaccgaaaaagacacagaaaatcaaaaatgtcagtttttgtctcgtggaaaatcgatggaaacactgtgtgggtggttgttggtatcggggaatcggttcaaatcaaaggtattcctgagcatatggcctcgtcctgctcctcctaatccttattcttcaggatgaatgaggagaaagtgaagggaaaggataaggcgtctattccatccgggataaagattttagcctgccaaagaccttttgacacgcgatttgtgaccaatcttctttcttttcgaagacaccctggcagaacacctcgaccatcttcactatggaacgtccgcagacctgatcgtttccatccgtttcttgttcggccggaaaggctccctttccattgtcctagcaagaaaagatcgaggtcctatatcttttttttatcccattttgtcgttcatggcctttttttttgatgtccgtacagtctcgatgtatagtaaatttggcgatcggggaaggaactgatatgtcgaagtgatagcgatatctggctgtcgtctttctctcgtgtcctcattccctacgacctagtctcttctcccagagagcaggaaaaatttctaacgatcctaagacccaaccttccaacgtttctctgcacctctcaacaaaaggcgagaaaaaccacaaaaacaagaatccatcgtaccggcaagaagcgatctgacgactacgagcgaatcgaacctcggcagggaagggatacgttcaaaagaaacggtctttcaatgaaagatttcttaccttgaacacaactaatcttgagtgcaaacgcagaaactagacctttttcgatgaagtgactagaatatgccggcagagcagacccctcgcgcgccggagccctagtctgacttttgtcaggaacatgacttttgaatcaaattacgtaatcgcgttgataaatgaatgaataattgattgttcggccaaaccatgattacgatgagatgttatattttacaatttatggctttggccactacaaagcaaacgcaaccgatggcagtcgatacatggcccttttggacttgggtatcctcagaccacgaaccacagatcaccaaggttcccatgtatcatgggtttagtttctgccagcctcaatgccagcctcagcagtcttaacatcactagcgacggcgtcaaaccctgacacccttgcctcctggttctcctcccggtgaagggctaggtgcagcgtgttgcgcgacgcgttcacatctctgttctatcaagtctgagagtaagcatcaaagagacagaaagacagaaagacaaaggaacagcgaggcaccgtcagcttcctcgctctgtctgtgaactcagagactccctctctcatggtggctgaagatgctttgagagaacgtcatcaggacaggatgtcgatcgcttgtgtgcctgctcgagttctgccctgaattcaaccggctgtgcctgcgaacctccctttgacggctaaacacctgtcgatgctaatctctcatctatgagatcgtccttgatacaatgttacctttcctttgtcttcatcttcttcatcacatctgcaagcgcacatgatcacatcgtatagaatgtcccacactcgaaacaaagcacaagtccctccgagtgacgtgtgtttctttatgaggtctagtacacttgaggtatcaatccagtcgggcagtgtcgatagacagttttcgactctaactcagagcgtcgagatcagcagccagtaatcgactttcatggttgtcgagtatgtatcatcccatgcgcattcataggatgatcgtagccacctgcgacacactgtcacccaaagacgtaccaacaacacaccgatcacagtcatcactatcagtcctgatcgaatgactcgtcgggaggacgagatcgacaagattctggctttcttttctcagcatgacatttcctggtggtccttcggcatccaagacaaggatcaacccggactcaaggcgcggctagtccctgtcagcgcgcatgtacccgttgtacggcaacagatgtcgcatgggcgcttagcagcatcgggaacgtccaaa

SEQ ID NO: 78 - DNA, 1102 bp, Xanthophyllomyces dendrorhous
aagttaatctgataaaaatctgtcccaaaccggccgatttcacccggatcagtcggccgacaagcgttcgctgcggctgaaacgctgctccccccgcacatgtttggtcagtgtattaggaaattcgaatagaggaatacgaaaaaaacgtaacagaatacgaaataagcccaagagaagcgcgaaaacgctctgattggtcaggtcctgccttccgttattttccacccaacacgcaaagccaatacttttctctcttcatctttatctgattaacttttctctcccctctcccatccatcgtctgtctttcttgttctttccattcctccgttgctgtttgaacgaaacaaaagagagaacaaagatctatagagaatttatcgtgtttgacttgagcatttactttcgtgtccactcatccgatctatacaactcatctgctcttcatcttgacaagccttttccttgtcagctccgcttatccgatatccgtgagttttaataatttttttcccttcatccttcctctcctatcctccccgcccccgccatttccccctggattttttccaccctcttctcaggcttcttcctttccttcgagggtcatgcaaagaaaagaagacgttatctgattgacgacaaccctctcttgtcttcttttccctctttgctcttctcctctttttgttgacttttacatctcttgtagactaaggaagaaaagtaaattgatctttcactcggatcttctcggaaagaacacgaggaaaaaatccaaaaaggagcaaaaaaagaagaagcaacatctctcctgctgtaggtctcttcctgttctcgacgatagttgccttctcctcttctttttttttctttcttcttccttgctcttcttctgattctggaacgatatgactgatatcatcatgcgggcctttcacacattctagctcaatttatctgatatcgacatcctctacctcccttctcaattagacttacacccacgtctctctccgtgatcctatctttttcctttctcctttcaaacactcgatcggtcagacggtctccttaagctctttccataatagacacc

SEQ ID NO: 79 - DNA, 36754 bp, Xanthophyllomyces dendrorhous
cttgtggtggctcctcctctgtatcatcttctctttcttctccctcttcttcctctcggacagaaggagacagccgctcccagagctgatgggagagggcagcgcgctgagaacgaacagatggatcagatatgtcagtcattgctgcagcctttcttcagatatctcctcagatgactcgtcttccttacctgactgatactgatccggctctggatcgtttctccgacgtttgtctccagccaccaagagatgagccgagaagcccggcgcggcatgttcaggacgacatggttctggcaggccgtggtccacgacctggctttggcgccgatcatgaagcctagaaatctatgacaacagcaaatgaatcagtccctgttcgcagccagatacattactgccatggtcaaagagatcactcactttgagtctgttaactggtgctcagcagggaaagagacgtcgcggaggtcgttgagctcttgactctgtgttggcgctccttggtgcaaatttcctccacgcgtgttgaaaccaacgtccctgaaaataaagccgtattgtattggggagattcggtatctcccctccatccgcgcagaccttcgacatgtggatattgagaaggcgagacgcgtcaaatgttatctttcctagccgggcaacggccgactcgatcgggccagccagtggctcaaaggcgagtaaagaaccaaagcctatctttactgtccctgacaccatagggaccgctgacttggcgtggatttccaccctctgacgagggatgtaaaacgggtataggtggttagatcgccttgagtgcccaacctgacagcaggctgagcacgtggcagtagtagtagtgggagtagtagtggtagccgcaagggaagactttgccgaggcctgagccgtcctcttgcgcttcatgtcgaacacaagaggagcggcactcctcaagacaactgatgagtgttctgatatcaagagatgttctgatatggaagagcgctctgatcgtctggagttcgttgtgtcttataagctgttgggattgatgtctgcttgtttgcagaaaatctcctttgcccggtttcccctttgatcagtttgactggctgtcggtcatgatgaacgacctggtgaacgctctgccgtccacagacaaagagacaaagagaaaaggacatgagcagacaaggagatcatcagacaaagcaacagatagccaagttatcaagtgttgctgaacagctgaagaaaagaaggagtctatataggcatggtgggtgtaaccatggtgttacacgtctgtaaccaaggactcacagatcctgcgccacaactcatagtcacacagcgcatgtgctcctaacacatccagtgatctgttcttgattgtggctcatctgtgcgctcgagagatctcatatgggagatcatccttcgtaccatattacctttcctttgtcttcttccccatctatgaatatctcaactgctgagacaaacactattgagcagaatccatggattagaagaatctcatctcaaaccctcaactgctggtcaatgatgtgcgcgtatttcgtgtcgaccagtcagtgcaaccttatgacacagcgcctttacgatgagcataagacttgtaccaactgaggtagccagtccgaccgaaggagaggagagtttagtgagccaggcatcccagtatgtgttaagctaagcctatacacgtcagagatcgagaactatcgcaagaccgctggctggctcgactacttggatgatcatgttgtatatctgacaccgggcgtctagatggacaccgctgagatcagctgcgcgtggctcgatcaagcatgtcttccctgtctctttgtctgtctgtcgttttgtctgataatcttcttggctgctcatgactgtctctatgtcgcgctactcctttgtctgtttgatacttgctctcagacttggtgggacagagatgtgaacgcgtcacgcaacatgctgcaccttgcccttcaccaggaggagaacaagggggcgagaatgccgggctttgacgccgtcgctagtgagactgacgttgagactgccatgactgctaagactgaggctgaggctggcacagactaaacccgtgacccatgggaaccttggtggtctgtggtctgagggcacccaagtccaaaagggccatgcatcgaccaccatcggctgaggtcactctcaccatgctttttacatataatagaaaccagatcgagaaactgtgatgtacggcctccttcttccacctccctttcgttcgttgagcgccttcacaagacgcaaaaagacagccacaaccgcccatgaatgcctgaaagacaagagagaagaagagacctcatgtcctccatgggtcgtccatgtcttggactaggtcaatgacgtgagctccgacgatttcctcgctcgtcggtgtttgtcctcctaccggtgccggtgttgtcgatgcagatgtagcggtagatactgctcctacatcggcggccgacttgaatgagcccagagatgattcagaaccagatctcgaccttggtttcgagctagatctgattgccgagcccgaagccgaatcaacatcatgttccgaacgactcggtatgttcaccacatggaccgtctgcgctgaaagatctggatcgatgctttgctcaacgtcgtcgtcgtcgtcatcaccgctttgattgccgttgtggttgcgttggctcaaatcggaattgacgttcgcgtcagacaatggagagggcggccggtgaagagaatatatggagctcgtgctcgatctgtctggggatggcgtcctgcttcgagtggctgctgtgtttggaagagctgagacagaagaggtcgatgcggatgaacgtttagcacgtgatctgctgtctgtttagatacgtttcattttgtattgaattcgatcacaacatcagacttgtgcgaacacaacggacaagaaagagagatttaaataaataaataaatgaaaaagacaaaccttgctgttcttccaaccgattgacgaggtctctcagccgctcacagtcctcctcgacaagcctcaaagcctctttcagcatgaccttttgttctttctcgtccctcacctcatcctccatcgcaagccgggagtttcgttcgtcggcgaccatcttatttgcctcttcgaacaacgcctgggacaggttctcgagttcctcctccaacgccgcctttgatgactttaactcggcgagctccgtccgaaggctaacgagctgggtccgctcggccgtcaacgtctgtcggagcgcgtccatctgagaggtcgtgccggcttggctgtcaccggcggcagacagtgacactgttgatgctccaggagagagtgggaggttgccgaagccgagtccaagattaggggtggacgagttgaaggaacgagaagaacctgcatggggaggacgggcggcgagtctactcggactcccactgtcgccagaggaaccttccgtccggggtgtttgttcttctgccggcgcgggcgcatatccatccggacggttgtccgtctgattgagagcggtcgaggaggcagctggggaaaagccaagtcgtttggactgtcggttgaaccagcctccgctgcttggcgcgttggctgttgttgtcgtcggcgtcgtccgtgcttctgaagggaaagccatcgagttgggagatgagagctcggttgaccaacgatcagcagccgccgagggcaccggcgaggaccgggcggaggcggacgagttgttgagcgaatgggatttaggtggcgccgaccggcggttcgtctgggcgacgatagcatgactatgcggtcggtcgagtgcgcgtttcgatcagtacacgcatcatgtcaagttggaaagggagtaagcaagagaagaaagactgaaaagaaggagcacactcacccaaattctcctccgcgccgcatagcttcctccatcatttccatgttagattccacgagaaacagattggagcctaaacatatataggatatggcggatcccagttagaattgaatcacaaacattgatagcatcaacacaggacgtacgggctactttaagctgatggtccgtgtcgagttgtttcgccaaagaggcatgtagtcgagctgtctgcggacagtaagacaacagcggagggttcattgtaggttcagtggaggttttcttttcacgaacgcagacgagacggatccttggatgtatgcttcttcaaaaggaaaccctaaagaaatccaagacaaagagaggagggggaaagaatgaatgaaaacgagggaaacaaggaacagaagcgatctcaccaggccgtctacatgctcgaccagcgcgccaagagcatggctgatctcttgtttgttgtatgtatgtgaggtcggaggagacactgtgttgtcttgaagggaggataagagcaatcggaaaggggccagatcgaacgacagggacgatgccctgttgcgtctgacgaatgaggtcagtggttctcgcgataactcttggggtagttcctgtagtggttgtgatgatgatattgtcgatgatgctgttgttgatgttgtcaatggtgttgctgtctttgttgacgatgatgacacagagaggtcggccatgacttctgcagagagcgacgaggaagaagccgaggtggtgaaaatgatgggcggatcaggaggtgtcatgagtgcatctgaatggctagagagagatagagagagccaagagaagatccaaaagccaggaaaagatcaagaagaagaagaagagtgaatgcgagtaagagaagaagaggaacagcaagacaagaggggacgagaagaaagatgaaatgaaagacaacgcgtgttgtataaagtagatggagtgtggggggaatctgggtgggcgtcggatggtggttacacggtggttacgttaagcacacggctacgtcatcatatcggaaaattaggctgagggccagtgaggaccacagcacagactgatagatcggagcggtgacaaaggagtatagagatgagagcacagcagaggggggtttgtgtgtgtgtgtgtgtgtgtgtgtgtgtatttccacgacagacttgaaaacagatggagccacggaagatgattaggagcagagataggtacatattatagtgaggaggtcaatcggccacggtttgaagagataaacagaccatggaacaagacagcactgtagacattaagacgcacagcgcaacagaagagccagtaggcgatagaacagacgaagtgacgatattttattggtgtatgtacgagagaaggacggtagggtaaacgcagtggagagagtatagtatagtatagtgcgataatgtacagtacagtgtacagtacagtgtacagtacagcacagtacagtaagagttcgacagattatagtctatacagaagactacatagtatcatgtggacaacagtgacacctgatagaaacagatagtaaagtacacactcagtacacaatccaacacgctctaacacacatatcccatacaaagtgatagagtcatttcccacaacggaaagccgacagaggagtcgtgggccagaaacagacgatccagttagggttaccgagatttaggccgcggtcacattagcaagcatccatccgaccgggctcgacgcgagaggctagaacgttcggccgtgggcatccgatgcgaccaaaaagcgcagcagccaaaccttacctgcgctaccgaccgcgcgcttggtcggtcttttttaacgactttttttcccaatcttttccctctctgttctctgcctctcgaccctgccctggtgcctctgtcccaggctcgtgcctgtgctctttgtcatccccctggttctctttgtcatcctctcgttcctgtcgtctcttttcgccctgagttcttctcttccaccctccttccttccttctttctttttttgcaaacgaccatcccatccgacattcaatactcagaggaccacaactacggcaaacttcagccttccaacgcgtcttctctccctttctcttcctccttttcctttcccttcccgttctagctcacagctcgcctaaggcctttgcccaatccttcttggcactgtactttcgcttcttctcccttctattcgtccccatcggctcctccaacccacggcattttcttcttctttccatccgatgcttccagccaacctacagggactgaactcccttttcagcccatctccctcctcggagcccatcctttcggacgcagaccttgcctcgaccttggcactgtggacaaacatcgacttttcatacgacgacggtggaatcggtctcaattctggtctcaagttgctcgaggaagatcgggctagagaggctagggaacaggcagccgccgcggctgccggcaactttgaccattcttctattgccagaaccagggatgacaagcagttctacccgtcgcctggatcgactcggcaacagcagcagcacactcccagctctctaggtgatgactttgacatccttcccaacggtcctctttccacccaggcatccaccccggcctcgttcccggtcgacggaaaccagcctaccccggtcgacccgttcgatccctttggcttccactcaactctctttgctctcgcacagaccgatccggccgagctccagcttaggtttgccaatgaggtccccccgaacttccatgcaccctcctcggtcgcgtcgacccccaggaacgtggctcctgcccccccggccgacaagccgacaccagcaaagacgctcaagcgaaacgcttcccaggctgaattgcccacatcccgagcgagctctgttgtcgctcccaagaccgaacaggatgaagagatctctcacgaggacgagttagtttggctttttcttgtttcctcctagattgtcccgatctgatccctgatctttgccattgttctttctgtctttccttagcaaacgacgacgaaacacggccgcttccgccaggttccgagccaagaagaaggagcgagagcaggctctggaaaagtcgtccagttagttcatccatccatccatctcgttcgggcttctcctggcatacactcggtttcttactttcttttccttttcattcgcagaggaactccagaaccgatacgctcttctggagaaagaagtcgagtctctccgacgagagaacgtctggctcaagggacttgtcgtcggtggtggaaacggtacggttcctgtgttaggatccggcttgcccactgtcggacgagccgaaaacagaagttgaacggggtgctgataatggatggagcggtagagtcgggtcagcggcagagtcgtcggttttcatccaagcctttcctttcttcgtctctggggtttctttttctttgaattcgagagggcgttcccttcctctcgaacttctttcttgtttgtattcgctcttttttccattcttctttacgaggttgtatatattttcttgcaccatgtttcaacacaaacccttctctttacttttcatccttttttccccctgttaatgtttacgacctcgccctttttcatcaaactcttcatagtctttgccttgattttctctcgttcgactcggaagagcttcagaaaaagactatgattgtccgtcaaccggcaatgtttttcttctttctcttaacctctcttctcttcctctctctcctttgaatgttcaccctccccctttttgttcacttaaagtaggcctgattctttttctctcatctaaacaaagtctctactcctcttttccagttttttcttttcttttctttctttcgatcgatttccgttccattctattcgattcaaggtattcttttttgctcggtcgagtatggtccatcataaacaacgtgcatgtcggaagtctccatctagaaagccgaatgtggggcacatgcacatgcgtatgcgtcgagtcagtcgtcggtcgtagggttttcaagtccctgggaagagatcttcaagatatacagaggtagtcaaatacattttatttcattcacgcccctgtgctgtttcactctcgatcatttcatttcatatcacactgcatcatatcatatcgtcttgttcgttctgtctgtcctttactttgctttactctactttactttattctgcactttgttctttcgggagatcgaacgaggaacgaatgccagagagatcgaagactctcggatcgattcaatcagatcctgcatctcctcatccttatcttcttcttcatcatgcccgtgtctttctccttgttttccgtcatctccgtgttcgaacccacgtccatgtgtctcgtcatcgttcttttcccgtggcgagtccgatggacgcgtcaggttcgaaccgttcttatcggaaggtatctcagagcgaggtaaacccgattctatcgagtcaggtgatcgaccacctgagccttgagcctgggattgtgcatgaggatatgcgcgcgcatgggtctgggagtaggagtgaggttgagatgaaggccgagagtgggaaggacggatgagggaagctgctggaccatgggattctattatcgagtttatctatcctttcccccccccccggaggttgcgttttccgaataatgataaagataagaggatcgagtcaagtcaggggacaccaggaaattgttagaaggcgcgccaggggagaaagacaaaccccgaacttgatgatggcgaaatagaaatcggttggaaaccgatgtgcgtcgacgagatgtaatctcctagctttgaccgtgaggaattttctaggacaagccgatggtggtaagaaacactcgtactaagcgaggaacgaaaaaaaagagcactcgttataattcttcctttgtcctttgtcttatgtctcaaaagagaggaaaccgaggaaagaaggaacggacggttcggctgccttggtctcgttcgatttctaagagtgggttatgaaactcgttttgatgctaccccattagatgcacaagagaaacgtttcaaacaaaagttgaaagctcaacgggtcgttcgagttttgggcatagagagaaatagtcaagaaaacagaaaagaaaaagagacggacaagttccaagtatcgtctctccggaaaaaccttcccacaagtcttttctcttcctttcccttttcctcttcctccgacgtcacccacaggcgcctcacaaacgagttcgtgaatctttgcgtaatgtcgttccaaatcaccgacggtcgagaagaatgtgggtctggacgagcagagcggaggtagcgtgcactttaacgattctccaggcaaagaactgggtagccgggtgtatttcgagattgctctaggggacgatgcgtctgacgaggagtcagaacagtcggaggagaccggtgttgttgatctaggtcgtttgagcatcctttctacctacgccgtgcgtgttgcggttctaacccctttttatttggaagagattgtagaaccaggagttatctgtaagttatagatagtctggccagatagatgaagagtggtaagcacagggcgattcttgatgatgaccagagcgaatggatggagaactcggaaaaggctcaaaaaaatatccgactgaaataaaaatcatcatcatctttccatcaagaaaatccctaccgactactttgtcaaaccttccaccttaccctactcttccttcctacgttcacaatcgacctcactgcctcaggcgcgttgaatgctccgtcggatctctgttcatgccactagtatcgtcaacatcctaactcgcccgaggtcatcctcctatctcggtcgatcggtcagctccgccattctccgtccgtttgtctctccgcaacagaagaaaatctgggtgaacaggcttgtgaaatccaatggttccgacagggagagcgctgagagagagctcaggtggataggagaagagatcagcaggagagaaaacagccagggaagctcgtctttcagtaaggatacggtcgaacggatgatagcagaaagagaggatggaactcctctacaatatgttctcggtttcgtccccctttactttcccgttgattgctcgtctcctttcccagtttcaatgtaactttgtagctaacgatggggaagggtttcttctccttgcgtctgacatgtggcatgattgtaggaaaccaaccttttggaccggatcttgttctgaacgtccgacgaccggtccttatacctcggccagagaccgaagaatgggctagccgactagccgatctgttgacatctcttccctcttcctctccgagaatcaacctgttagatctgtgcacaggaacggggtgtataccacttctgatctgtaaatcatttgaacgagcgaatcgacctctccgagcactaggagtcgatatcttgcctcaagctgtcgacttggccaaagagaacgcccgtctatcaggaattcctactttaccctgtaccgccggtcgaaatcgagatcaagatgagctcctgatgacgttcgatgtgcgcaaaggagatatgtttgatccgtctttcaaggatgggttgagagacgtttggggaaatattgatgtgttgacatcaaatccaccgtatattccactctatgagatagaaagtctagacgagaacgtcagatcgttcgagtcgcctttggcgttgttaggtgatctacctaaccttccgtcgaacgtacgtccttctctcttcacttctctcgccttctcctttatgttgcactttcaccataagcgcaggatgctcatacatctcctttatcaatcggggtttttaaaaaaataaaaaaataaaaataaaattgagtccagttttatccgcaacatttgcaacactaccagacccacggcctcgatttttacctccagatcgctcatctcatctctgccggcctcgttcgcccccctcaatcgtcttctcaaacatcgtcctcatccaatcatcgcaccccacaggttatactggaagtaggttacaatcaagcttcggctgtcaaagagatcctgaaagagggaccagctaaagagctgatggagtctgtagaaggctggaaggatttcgcgggaatagaaagagtcgtcgtcggcttcctcaaagagcgatcttaaggcctggtgggaggcgatgctgaggccgagtgttggcttgaaggaaggggggagtttgcgttgaaccataatctagatagactgtatccgcacacatacacatatatctattttttaaattaacatcaatcagaaagcctttaacagaaaaacggtatgatctatatacagctgaatgattctgatcgataaagccgaatggattgaaaggataacattgttttgagaggaagaacaaaatcgagtgcgaagaaggaggaaataggcaacaagggggacctaggggtgaggtaaggaatacaaaattgagcgaagagaagtgtagcacaatatggagtgtatacaagtaaaggaatcgacaacagcgcatctaatgactgatatattggactgtaaagccagcacaaaccaacgaaatcaaggtcaaacataattcgttgatttacattctagcatttcagagagaaaaagtatagaaaacaatgaccacgtacaaacaaagctgacatccggttggccatattctgcccgaaggagatcgtcgtgcatgttgcccagatcttggttcgtgaaatggttccatctgaatccagatgaacgcacacatacaccagacagcgtcaaatttgtttaatagatagagggcatatacagaaggaacatagagaatgattttatttttatttttaaaaaacactcacgagctcgtatctccatacaacagagctggcgccttggtaatctgctttccgtccttacatctcttacatttgaagatatcgtgtgtatcacaaagtgtgttttcgttgaactggaaaagttcacgaagatcgttaacagaaaagtgacgttcggtcgtttcggcgttgtcgtccaccacgcaagatgacagggcgaccttttgagatctagaggaatgcacataggtaggtcgaatggtaagtaccaaggccactcatagagatattcgaatatcagaaaacgggtataaccgctactaactgtctctggaacaccttctcctcaatcgtaccctatacgatgagtagaaaattgaacgtgaattcaacacgcggtctaagcaacaaaatagaagactagaatttttctaaacatacagtggtaatgaaccggtaaacgaagccttaaggtagagacgataaggatgtatgattagtaaagtggcagcgcagagcgcaagggaaacatagtagcacctacattctttcgtttggccatcacgccatacacgagcaagtgcttgttgatcggctacacatgagagaaggaagaaacaaagagtctcagtaaagaagcaagtactaataaggtttctttaggattgtatcttaccagcgggattctgtaaatgaagaagaaagtgagaccaagcacatgagaacagtcgcgattagcaaataaaaaactctttacatcaccgaacgtatgaagagttgaatgacttacccagtctgtagatgattcaaaaagaaaaaaaagaaggagataagaccatcatgttagatggaacatggacaagacatgaaacagccaaatccaaactaacctgggtcgaacaagatcagccggttggcaccaatcaaattgataccacatcctccggctttactactcaacaagaacacaaactggcctccattcgggtcgttgaacttgtcgaccaacttctgacgtttcgtcaccgccatcgatccatctagtctgagcacagggtatcttttagacgatcaatgagcaagattgattagcaaatatacctgttgtgtaacaaactgtactcagaatacataaagcaactcacttgttgttatagcaaagcttctggaacaggtctagggtctgtgtataattactgatcagaacgatcttatcgtctgtagttgtcctcaactgatgtaagaatctgctcggcagaagagaacatagtcaggtcgagattatgctgtaagtatcacattgaccaggcaagaagatcacagaagaacatcgactaaccgttccaagaccaagaacttcccaccgtattctgaatgaatcggccccctactcgccctcttgtctttctcataattctccggcaataaatcctcacatccctgaagatctttggaaaggtccaacagatccggatggttgcacagtttcttaagaattccaatagctttgagcggttgtgaaccggttcctctaagaagtttacgaatgtcaggtgacttgatgaaatgtcggtagagcgcgagttgtagaggggcgagcgagcaaaagacaacggcttcatatttgaccgggactgggtttgaagagaggaaacacatatcaggtgatgaagtgatggaaaaagatgaagaggagaagatgggtgacgtacggtacttggacagcaggtcgtttgtacgtcggataacaaacttattgactttgccccctaactctctcagcttttcatcgctcttcgctcgatctttctccgtagcgtccgagtctcggcctcggaggatgtcaagctcaaaattctttcggaaatctaatcgggtacccaagtatccaggattggcaaaatctagcaaggcaaagtactcagacaagtcgttctatcatgagaaagtcgagaatattatcagtatcaagtatctggatataaatatctggactgaacaatacctacttggacgggagttccagtcaaaataacccgtctagtgcactgaatggcattgagtgccacgaatgtcagagactctaaataatcgcgcaagatagatgagttgatgtgtttgatgagaaagcaaaggagagttgatcattcacctgcgtttttcagcctatggccctcgtcggccaagagtaagccgacctcgcatccagccaactcgtccgttagagaacgtagagtctcgtaagaaacgatcatgacttcgaatttatcggtattgaggaaaggttagaacgtgtgtatgttcttgtaagatgactaagaagagtactaaccctgttgcgtgaccgatctccctttagcagagacccacctccgaacggccgggattaactcctgtcgcccaccctttccatctactaccaatgggttgatgactccttctcccagccatttaactaagaacggagagatgacatcaatacataaatctgggatcatcgatacttccaaaagatcaaggcttacctaactccttggcccagttcttgaccaaactactagggcacacgataattcccttctcaattgtggccttgcttggaataggggactgcttgagcaaagtgtggagaagggcaatgcattgtagtgttttacctaatgacgattcgatcaatcaagacatgatgggtcagcgcagctaccaagttgacttaacaccaagaaaataaaagtccttaccgagacccatctcatcggccatgatacatctgaagaaaggcatcggagattgaactgtctatcagtgagtgcccaaagaacaagtctggacaagattaagattactgacccaaaagcatcatgaacgagaagaccagtggtgcatctatataaaaactgagtgtcccgattatatggatatgtccgtcgatcagtatcgagacgttcatccgagtcacgaaaaaagaataaaaaaagacacaaacgaaccttgacaccctcgatctgatgtggtctgagaacttttgaaagtttcggatcgattacgacaggtactttcacgatctttttcctgtttctcgccgcgtccgccttgctttccaagccaagaatctccctgagactcttatgaggattcaatccgccgtccatctcttccgctatcttttgacgctcagcctcttgccgaatgagtacttcatccgcctctctctggatgcgttcctcgtttgtctcaatcagatccacggttggatcatagagtacgatggcatgatcggccatagggtcaaatagaggccgaggaagaagaaccggttgacgacggacgcccaaggcgatattcgagacaacatgagtaatcttttctcctgaaggtttgatgatagtcgggattgaaaacctgtagagcatattcaaaggatatcagggaaaaggtcttggaatgagctacctgtggcatggacgaacccttttctagcaacatccttccccgaagcgtcccaaatcgggaatttcttgttgatgttgatctctccaatcggatctccattctcgtccagctcgaccgaggcgttgatagcttgtttggtcaagttggtcaccttgggcttcttcttgtttgactcgtcatcgtcatcgtccgaagctcctttttccttatatgattttttggttcgcttgttgcacggaacacaccgagaatgaaagtaccaagtcttagaccatgcatagctatgaagatctataacaagagatatcgcacctttctcggagggagagcagacgggccacgcttgttgacaaatgaaggggtcttgaaagcaggcattccaactagggccccaaacccaccaccgagcgagtgggagtctccagatttccgtcgaagcataccggtatgatacttggacaggcgtttgacagataacggcgggagacactagaacaagaggagaaagtcaagaagagaaagtatatggatgggtaagcgtatgaaaaaagaagaggtatatgcgtcgaggctagagagttccgatctgtgggtgggttggagcggagtggagtggcggcacgacttcgatcgagagcgcgtctcggtgagggtcctaaatgagaacgcgtgaggaggcgtcaacacagcgaacgcgtcaagatagccacgtgaccttcgcttcaggctacgcttacgaaatatagccggtactgatggcgtcgtgtgtatagagagcgaatctcaaacccatttagtccctaccttctagatctccaagatcttacagcatggtatttcgttattctgttagagtgttcgcatcctactctacatctcctcagttgtttaagactactacaagatcaatgtcgtcccttgtgctttgttcccgacaggggaaagttaccctgctcaagctcaatcgaccaaaagaattgaacgcacttaattcggcactcattcaaagcttgaatgaagagctcgacaaagcagcggcagatcaagatgtcggttgtgtcgttatcactggggaaggaggaaaggcgtttgccggtaagctcattaaatctctccctttcgaactcttgggattaaaccaaagagcttactggtcttttgatctctccttaccttgcttggtataccatagccggagcagacatcaaagagatgcagtctaaaacttgttagcaaatgaaatagtacattccgtcggacagaaagcttgaaactcactgctcctttattctgatctagtgtctgaggtgtacaaccaagacttcttgaccacttggacaaagatcaattctttccggaagcccatcatcggagccatcaatggattcgctgtaagcctgcgcgatcagacttgttgttctgggctcaatgcaaacgtatgtccttaaacttactgaaaaaaaactcattccgatttggtagctaggaggaggttgtgagcttgcgatgatgtgagtcagattgcccaaagatcctctgatcgatcaacacatccctgctgatactctgtcgctgtacatcaggacggatatccttctggcatctcctcatgctaaggttcgtcaacccctttcaccttttctgcccgctatgagtatatatgtagtcctggatgtaccttcttttattgaccgttctttctttccttccttccttccttctcagttcggccaaccagagatcaatttaggaatcattcctggtgctggaggcacccaacggtcagacatctttttctattcgttctatctatttggcttgaccctatcaacttcgtttcactgatgggtcctatgtcttgctctttcttcaggttgatccgagcgatcggcaagtctcgcgcgatggagtatatcctcacaggcaacatgtttactgctgagcaagcatctgagtggggcctcatctcacgggttgtgcctgataaagaaggtgatgccaaaggacagggtgtagtagatgcggcgatcgagatggggaaactgatctcagagaagggaggactgagcgtgatcgctgcgaaggaggctgtcaacatcggtaagcttaatctaattctctcttctgtgtgttgattcagcactatttacttgacgagatgcgtgcgacactgactcttgatatgaaaatcggcgatgatccatgcattctacctaagcggaagaaacctcactcaacaacgggttggcttatgagcgaaagcttttccattcgttgttcgccacgcacgatcagaaagaaggtgagccttcaacatcttcttctcttcttctcttcttctgctaccctcactcaggtgatcgaatgatgaatacctgattcgttgacacttgccaattcggattgttttcttcccccaaacgtgttctgtcaatggtcatcggctcgaatttctcacgcatttatttcttcatccacgacgcattcgagcaggtatgacggcgttcgttgagaaaagagctcctaacttcaagaaccagtagcggatttacccgactttccttctctgtatatatctctatgttctgtttccttgtctttcttgtattctcgtccttccagacagagatctgattctctgtatgatcgaagggcttttcttccactgccaagccttttctgttttttgaggtcgtatctgagaagggatagattggctattcaaagtgcgttccttcgatatcaaccaaatgggcttgaatgttggatgccacaaagtcttcgctccacttctctgcatctggaacttcattttctattttgaaaagagaacacatggacagccccctatgttccttcacttttcagcctgatatcccttcaaagcttgctccctctcgtgttgaatcctatttctgttctccaaagcaagttccaaccctggccgtctgccttcttcggcaccatgtaaagcctcgacaaccatcctcattctcggtgtcaaatctccagcatctgaaccgatccagtcattcttcctagcgtttgctaagcgttgttgttcgacagcctcgaggtctttgggaaggacaaccgcgtcggctccaaagtccgcgtaattaggtgctgctggtgatactaaagaagacgcagaggaagaagacagagaggacgaggcgtctggggagagagacgaggtaggagaaggccgggagagctttccgggatgcctcatctcgacatgaaggtcgatcagggatgccatgagcggtcggttccggggttgtccatcgataggtgcaaactcggcatcaatcacagcgtctagattatctttggtgatatggtgttgggtagaatggtataggttcacgagagagcttagggatttctgttataagaaaaatcgttaggaaagaaagagtaagaaaagaaagtcaagtctacatgaagcaaccaacgatgggccatgcaagaagagaacaaaggaaaaaagaatcaagggacaaacagtagacaagactcctcccttgaacacaggctcttcgctcttgtagtcgatcaacacgtccggccgatccgctttggctttcttcgacttttttgttggtctggcagcattctgaccactgatgacggcctttcgagcgattcccatagaactcgtcgcttttgacctggtctgaagtcggacctgagaaggaatggaccgaactaggagtgaaggagcgaacatgatcttcttttctatggatatgaaagcgtcgaaagagaacaaggaaagccaacgaaacgtccttctggtgatcagaaccgaaggaggtaagagaagggaaagcggctgccctgaatacaaattcaaatatacttatacaaggtagctcgatgcctagggttgcttaggtaatctgatcggcccgccggtcatgagagatccctcttcatcctgttacctcgcctgatctttctctccacctgggaatcttctgtctttcttctcccttttgttctctccctgtcgtttgcttcatctgatagccaacttctaagtttgacaaccatcctcttgatctggaacaacaacaacaatgtctgacgagtaagtttccgagctgtggttgctcgcttgctatctgaaacatcaatggttctctggtcgttctcgtgtcgtccctgagctacttgtgcgatcactatcaaagcaatgacagctgacatgttctcttttgtcgcttgacaccctctttttttattatccttgttgtcgaacctgaaaacagtagctctgagcttgaggattttgagatggatgaggatgatgatatgctcgactacgacgatggttggtctcactcttctctctctcgcgtgggtgtgaatgttggcatagggaggcgttgggtcggtctttagagaagtagcgatagacgtctgtgttacagataggctatatgctatgtacaaagagcatgcaggcaaaactcctctttccttctaacctccgacctcattctccacttcaccacttgtgtagccgcacgacagagaccgcttactaacatctgggcgtgaatctttatacccactcgcgcagattcagcttctgaagttgatctctctgaagatgatggagcggggtttgctttcgaggacttggcagcttcgaaatcactggaaaagaaggtcagtcttcgcatccgttcgacatacctttcttgttccgttgttctatccaactgatccttggatatccacccctgcgacctttattgtgacgtaattcacctagccatacgatatcctatacacatcaaagaatccagaaaacttgagggaggcaatggacaacgaagtcaataaattcaaaagtctcttcgatatggacgtgagtcctcttcagtgctagtgaacttgcgcttttaaacaaccttttctatatatatagaggcatgtattaacttcggttctgtgggcctcttgtgtgtattcatatcaacagattcaaactgctactcttttactgcgaagcttcaattggaaccgcgagagagtaagctcttggatagatcatcacgacaaagatttattgttttctgctgatcgctcgtctttctcttcggttttagctcgtagaacgatatatggatgcgccatatgaatgtctggcgaaagctggactggacattaatcctccttccccagtcacaaacacagtgcccttaccttcttccgcttcacatcatgaatccccatcgaaaaaacctcgtcgaacgaacgtccgatccgtctctggctctcgtacaggaagtcttgacatgccctcctcctcttcttctcgccccacacatcttgcccctcagcgaccctctactcctgctcataccgatttcgagtgtcctatctgttgtatagatttctcagcagaagaggttgctgctgagacgttggcgcttggatgtggccatcgagcttgcaaggagtgctggaaacagtacctggagggtaagatcaaggatgagggggagagtgtgagaattcaatgtttggaaagtgggtgtgggagagttgtctcggtgaatgttgtggagagccttgttagcgcacctctgaaagagaggttagtctcaaagcatgctctcgagaataaaattctcgaacatctgaaatctgcgaggctaacagcatcttatcgatctatcattctactgtcggcaggtatgatgcccttttaaatcgaacctatgtggacgacaaccctacgcttcgatggtgccctgctccagaatgtgagtttagcttgatcacaatgcaacagaagcgagattacttctcttctcataatattctcatcaataataacaaatactctggcctcttcatctttaggtgaatatgcagtagagtgtaaacaggcgccaccgaaagtgctggataagattatccctacggtcaagtgcaagtgtgggcaggtgttttgtttcgggtgagctttgcttccttattgatttgacccaatcctttctccagaggaacctcaaaccaactgaattggttcaactgttcagttgcggatactcggccgatcatcgcccagtcatctgtcgagttgctaccaagtggctcaagaaatgcgcagatgatagtgagacatcgaattggattagcgccaacacgaaagagtgcatcaagtgccactcgacaattgaaaagaacggtggatgcaagtcagtatcagtccttacttttgccttcagatcaatggaaatatcaatcctgatttcttgcgcctttcaatcgatagtcacatgacttgcaaaaaatgcaaacgtctgtctgatctcttctgatgtcgtggtctgattcttcatgggctacgtttgctcatatcttctcatctttcttccgacatctagacgagttctgttgggtctgcatgggtgactggacggagcacggaacgagctggtacaactgcaaccgatatgaggaaaaatcgggtcaggacgcgagggatagccaatcgaagagcagggctagcttggagagatatctacatgtaagagcttttaatactcaccctcatgatttgtttcctacttgtacatctgtagtcttctgtgctgagactgcttcttgtccttttctctccaaatgatagtactacaaccgatgggccaaccatgagctttctgccaaactcgaccgagagctttatctcaaaaccgagaaaaagatggaacagatgcaattgacgtccgatttgacgtggatcgaagttcaatttgccaagaaagcagttgacacgcttgtggtcgcccgaatgacgctcaaatggacctatgccatggcctaccagtgagctcccttgtagtttctacacaggctctcgaaaacttggccactgatgcttactatctcatggtttcaatcattcgatagtctggcaaagaataatcagacagcgttgtttgaggacaaccaaagtgatcttgaacaagcggttgaggcgttatcggagctgttggaaaaaccaatcgagccggaattaattcctgcgcttcgacaacacgtgaccgataaaactgtttgtcctttttttttgcgatcttttcctagtcaagtgcctcaaactgactccctttgaacaatgtgtactcctttgtcctgatgggttggataggtctacgttcagaagagacacgctatcatgttggacgacagcttgcaaggttaccttgaaaacaggttggttcctatattatttgcgtcgcctttatttgattctcctgtttgtgaccgtgttcgtactgttatttctgacaacatttttgatggatgtgatcgggtctgtcattctaggtggacattcgacgtctagtctctttcctgcctgtttgcccctgtagtattcacctccgccccttttgttcatcatcactctaccattcttttgctgtttgctagctagccttatttatctcgctcttcctgtctgtgctctatcatttatctcacaattgacagttgtcttctctttgcatgatctcacgacgctttcaccctcttgaccgcttttgtgtttgtgaccgacctaccgccttcttcagtccattaagagggcttgatctttttttctttctttcttttttttttgccctcgggcgattgatcaattgatcgtttttgctgttccgtatcgcttgatttctctagactagcttacactacattcagattcttcgccatgagacaatgttgatttgaagagagcgagcatgaaggggaagggacgtgatcggcgaagagcgatgcgatagttttatgatacgcatgtctatgacgatttacatttcgaacatcttcgaccgataccacatctttcctctgaccttcactcatcacgatccttttcacctcagacacctcgactcccttgcttgtttgatcctattatattcctctggaggatctattccacctccaactaagatgagctcttcttcagcggatctccagaaccaacaggatccaatctgcgagattggttagccacctccctttctttcctcttctcttcttgcaatctgatcgagccaagactcggaccgaggcttcatctcacaagacaggcatatatcaggaacaactgacatctcgctcatcttactcgattgttttcaatcgggattgaatctcgggctggtgatttttttccagatcggctccctaatcccagccctgtatcgaacaggaaatggaaacgtcgagccaggctctcactcgtgttcttgtctatagccgggaactggtatggttatatgcttcttcttgatcagatacaatccttgatgttcgactcacgtctcgctgggttgggttggtcttattgttatcgttcgactttctggacagtatcacggcgggtggtgtagcatcgttccctttgttcgcgccctatatcgcgtctcacttcaacttggaagaagcagctacaaacgtcgctatccttggcggcttggtcggcgcctactttggagctgctcctgttggatcctttgtggatcgttatggcccccgaaagtatgcgtctatccccgctgtcttccatctgtcgtatgtatgtgagcggatctaacgttgccatgggctttatctttcggttgttgctagaacctctctactagcctccctctttaatatcactggatatttgtctcttcacattttgcttctccttcctcccgaccatcctttccttcaagcgtctccgttctcgatacatgtcttactttcattctcattcctctttatcgggctcggcacggtatcttcctacttttgctccttgacgacatcgtcattgaccttcccttctcatccatcactcgcccttggctgtccactagctctgttcggactgagcgcttgggcgatcagcgaaagtgccggttgggcaatctttggagatccgaccgacgagctagatgtcggaaagttctcgcttgcccttttgttaacggtaggagggtggaatgcatttgctgcctttggtatgaaggttatgcctcatcgacatgaagttgagttcatcagggacgaagtcgcgagggctgatcctgattgggtaagggaaggcggcgcggatggaacaatcgacgaggagacaccgctcctcatgggaagtagaagtttagggagagcaaggggaacggtggatttgacattcaaacatcttatgtcggaacggtcattttggatcttgggaatgagcatgtttctcatgattggacctgtcagtatctttcttgagatcgtcgactttgtctgattctcacctgttgaagtgtaaactgatgttcatcctacgtttgttggacctcctcagatggagatgatcattgcgtcggttggatcgattgtgacgtcgcttcttcctcggtctaccaatcaaacgactcttcaggcagtttctctccatctgatcgagtctgcttctcccttgagcttcctaacatcttctaaagcaacaaatccgttgaggattcgacagaaacatgtcaagatcatctcgatctgcaacacgatctcgaggatttctgtaggagccatagcggactatctgtccgcttcaactacggaccctgtcgtattacccaaacttgctgatcgaccgtcagtggagaaccgaagagctgactcatcctgggcaactcctatcgccaacgtctctcccccatccactccagcgtcagcgtcttttgaggagagtgatgtaacgaaggttgacgtggaagagtcaagaaggtggaagcataggttccacatgagtaagatcaccatggtcctgttgacgcttactatgttagctgtagtctatgcattcgcaggactagacgcagggctgggagctagagggctggacgcgctttgggtgcttacaggggtggttggttggagttatggctgtctctttgtaagtgcagtattctctcctcgtgaatgcatatcctcttggtccacttcttcctaacgccgagaggttctgttggttgttgggttctatcagaccctccttccttcgatcactacacagattttcggattaaagacgttcggaaggaattatggtcttctctcttactttgtcgccacgtcctctctcggtttcacgtacctttatggtctcctcgccaatctcgcctacacttcttattcagcggagagagtctgtcgaggagcaggctgcttccgacacatcagtatgttttatgcagttgtcttatggtgttgtgttctctcgtgtttagatactgaccatcaacctctggcttcgattcccgaatctttgcactccttcgttccatctgatgtggtttgtggctggctgaaacataatcagtgtggatctcgtttggaagtacggtggcagcggctgtcttgtttgtagaactcgggcgaagatggaagaatcgcgtgtagtaagatgatcacgttcaacgtgtattctcctttatctagtttgttgcatgaagcccgctttccttacgtgtttgctagaagtaaagaacgatgtatgctcttcaaacttggtctcagcgtgtcgtgaacatgatctactggcgatatcttatcttggatcggagcgaaatgattaaatgaagcacgtgttcaacaaaaggatgtttcaaccgttgttgaatcagaccaccctccatctctttacaacccattctctctcctcccttgtctctgaaaagccccagcggcatggactctataataacacctctacattcacctccatcttctggaacgctcgttatggagcgacggtcgtcagggactgggttaaacagcatgtttcctaccgagttgagtaaaagtcgcgtcggtgaggtcaccaacaacggggttcgtctctcaatttgtccttatatgctctgtcgttcagaattgatcaccactgatccgggatctcgttctgactgcgttgatttgcgtgttgtgtttgtgaacatcttgatgttcagctggacgatctggacgatttcgaatgggaagaagctgaggacgaacccccttctcacacactcactgttcctacgcttaactcttataaccactcaacacactcttttacggacccatccctattttccaacatatcctctttgagtccgtcgagagaagatggaacaaattcacccaactcagatacatatatcgtcccttccacatcttctccaattcctcttctttccccactcaacaagtctacaaagcggaatcggactgatacatcatcgacggtgtcagctcaagcttcgcctacttcagctttgatagctaggatcaagcagtctgccaccgcacttcaaaaggatcttttccggataaatacctcaccacttcgtatgcaccatcaccgacatcaaaatagaactaatgagaatcacagcagtagtagaaggaggaagagtagtgaatcagaaagtggttcatcgaatgggacggattcggaatcgggagggatgctaaagagagcaaagatgacaggtctggcagacctagaagactcggatgacgatttgaattcagatctgctcgttctttcgacgaaacgaactacaaagccggccttgacacctcgaaaggcggggaactttaaaccaacaaggatatctgcttcttcaagattttcaaaggattcgatgacgtgtcctacacctgatcgtcaacatcatcaacagcccgggttctcacctccaaagcttcgaacgagaccagcgatgtctgccaaggcggctcaaaatgttctatcttccgttcaaacccgtgcgttaccaggatctggaatcaaaaggccgaacagaggagacccgtcgatggaaaaacttcggttacaaatgaggacttcgaaagcccggatacaaacgcttgaaaagacggaggagatcaaagagaggattggactcagtgaaaaatttctcatcagtgatgatgaagacatgtttgcagacgaggaggaggcatcgggaaaagggtcacctcaaggagcgcgcaagggaaggggggcaacctctattgatctggagccagaagctcacccgaaaggaaagatcaatttatctttggaccgggataaacgaagaggtggatatcacgccgaaatttctgatcaagatttatcatctgattctgagtccgaggagagtctcttgttaggaaccccctcgccaatgctctttcctgaagacgtgccgggctatacgtttgcgcccgaccctccattgacggagcctctattgctcatggagtcactatttggagcagagaacgggactgcgctcagagatatcgtgacgaaggacaagagggcaagaaaaatggaaaggagggagaggaggagtctagagaggcagggcggtggggaaggttttagaggtgtctggtgcagaaatagatcaggagagaacgagttggcagtcgaacaggctgaggtatgtactctgatttagatcttgaaagctttcgacagtatgtatgattgacatatcaatgttgtggcatgtgcgtgtctggaacccagtgggcttttgtccgtcttcagggatcgtcaaggcatccactattcatttcgctttctagagctgttgaacagaaaggttggtgatttaccaagctaaaattctgtgaacctctctcatctgcatctcgtccttctgttacagacgtgcatgctttcgaaaacattgtctctatgggtgggctttcgccagctgtactagaaaccatggatgtaaaaggtagacggggacttcttatatccctcatcgagaatggtacgtctttgcttcattcttgcgaattgatgggattaaagatgagttgattctgattgcgatctcatctcgttcgatgtcagtatagcctgtctggcccccagtatcagtttgtcaacactatgtcttgaacatattggtcttatgttcaattcttcgttccacacgccagcatctcctatcattgaatccgcgcgcctcatcatggtactctcatcggccttccagcgactgggattcagggttgatcttctccgagcggcagcgagaaatgattcagggtcgaccccttcaaagcctatacctccccagcaaggaacgattttgccaatgagtcacacgagaagagagagagcggtaggttgcctgatcgaaatagtagagaatgctgtcaggtgagttttcaaagcattcgcatttcttcttttgctcagttctaaatcagctcccgtgaaatcggtaatctcgtacagacatagcatcttttcgaattctgctctttctcgagtgatatgcatcattgcactggtcacgttggataggatgacgcctatcaatctcctgtacacctgccaacgagccttaggtgtcgccattgaatcaatatcatcgcctaatgaagtgtgtacctcatctttcctttcaaagttctttttattccatatctcgattaatatacttcaacaatgactgttcctaacaaaatatctgcacacttcaggaactcaaattgtgccacaagttggtacaaatctcgagtccgtacaaaatggggttcaaaatggggctgctcgaagcgttccccatagcagggccagcttgcaggaggctcacctcggcattggctgtactcttgttagacggtacaatgaatttggtcagttttacccagtcggttggttctttgtggctgctcagaactaaatcttgtctttaccatgctccgttttcgtctggtgatatcgctcgtcattcgcttaagtcgacgtacggttctccaccatccatggacgttctacttgatactctttcccaatcgaaagaccgaactcctctctcgaagttttacatccatcctcataccgactacgaacaactcgttgcttcaatcagaatcctttcattcattctactcgacctacaagagatatatttagcggagcaagctcgagccaaggaccgtcggcttaaggctaactattcagataatttcctctccagaagggagacgtttgagctgcttgaggcagaggggtcgttacaaatcttggggaacgcgctgaatgcgtgtgatgctaaaatcggtaagttgtaattaattcgttattgcttatgcagcctttacccagttttcttttgattcaacgctttccttattcgttctttctagtggatgctagggcgactcacctcgaccgatcggcagcgaaagcattccttctcaacctgcgcatgtcaatcaactaccgcaacattgtttatcaatctaaattccagaaacagagggctgcaggggaagctggcaggaacggtcaaactatcctgaactttggttcgtcgaagatgactgccgcatagggttcgcgctcctccatctattcctttctcttgtacttctcgtgatgtgatgagtactgcctctctatgatatccttgtaaagttgttctgtatgtatttttgtgtatgtataagcatacgtcgttggctggctgggaagattgaagcttcgacaagcatgtcacgatgagtaaataaattcgggcaaatccgtcacttaatatctcatcatcatcatcatcgaccatcaactaccgaccatcgatcatcgtcaactttcaagacatgtctgctgctagttcttccgagctctctattcctctgttgatagccaactacctcaatgcttctggtgtcagtctacacatgttgttgccgtcatgacatctttcgtttctaatcaagagattatgcctccttttctgcttctcaatctcgatagtattcttcaacgctcgcctcgttcttgaaagaaaatccaatccccaacttcgactctctaccggctcctcctatcgaccttcgtgacttagtcgaagagtacaatcatgctcggctgaatgagatctttcaaaagatgaaagttgagaaggatgaagaggaggaagctgtattaaatagaactgttaaggatcaagaactacccagcaaggtcagtcgctaataagtagtggctcggtctctcctccccgtcacatttgcttcgatctttcttgcgggagaaactaaaaacaaactccttttccttcttatttggagcttttgtaggtagagaagacatttggaagtatacatgctggaaatatattgagtgtcagcgttcatgatgttcctcgaaggtgagctgatttgcttgttcaactgattagaacctacgtatgaagctttcatttggctcacttggattcgaggactttccttcttcttcttcttcttcttcttcttcctcaggtctttcaacacaactacagctaggtgagctcctcataattgatgaagcttcagcctagattcaacttatacctgttctcttcctgtttcggttatcaagatatgaaactatacttcacccttcgctcctcacgacgtcatctgacaagaccctcaagatcacttctttatcgactggagaagttaaagatatattagaacctcacaaagctgcaattttgagtgttgctgttcatccacaatgtggtagacttattgggacggggagtatggatggaaggtgtgtgtttctgtcttcgtctccgtagccttcttcacacctattgagtatactaatcttactgtcatggtatttgatgaccaaacagtgcaaagatcattgacctaatcactcaaaagactcttcaaacgtttcagaatcagaaatttgtacgtatacatcagtgttgcctgatcgcctcgtcttctcgtctctaatctcttgaatttttatacaatattcttgactatacacatttttggacgacattcaaatacacaaaaaggtcgtgagggtcttgttctcaccaacaggaaattactttgcgaccgcctcctatgaccataccctcaaagtctatcgattgcgaacccctcttcccctcgcgcccaaccttggtccgagtaatgatgaggatgaggaagaagatatctcggagcttgaatcggactatgaactggtcaagatcttagaggtcaagagtaaccctgagggtctagtctttggacctccgactgaagaaaccggggaagctgcgtggttggcgttcactacccggtatgatgtctttcttgtagttggcacctcttcaccgctgacaactgatcatctttctttcgttttcttcctggttcgggcagaggagaccatcatatcaagtatctgatgttgccgtcttcagttgaagaccaagccgaatgggagattcgaaagttcaatttgaatcctaatggagacgactttgtctcattctctattctgttcgtccatctttcattctcgttgccattctgatagatattatatctttcaactatctatggttgtctgtaccgttgttcttactaaatttgttgtcaaaccggcctttagatcacttgcgcttcatccgtccaacaagtttattgccatgacgacaggagatcatactggacctcaatccagtcgagtattcttatatccattcttgagcaaggagcgaaaagcgacattatggactggatcaggtgagcgatcatctcttcctcttcttccttctcattcacgaactttttgttttctaaagaaacattgttcaccaccacaccgttctgatatctttcttgacggataaagaatgtgatcaattcaccgtaacgttcgttctcctatctcttgcctattcttttctcagctacgcctttcaagctcacgcgtctgcctcacgtccctctcctgacttctgattcccaattgacgtctcgtgctctgtttctttattctttcaagtcgaatgtcttgggccccatcaggtaactttgtggctgtcacctccacggacgggtatgtccgtctgctcgacctccagggtcgggtccgacgggctatccgggcacacggtgaacatccgactacaggtgtcaagaacgatgttgtcagagacgttttcattttctcgaaaggaacgaccgaatcagaaggaaacggagaggggtggaaggtattgagttgtggtttcgattggacggttcggctgttggcttgatgtgacagttaaatcttctctccatcatttgtagacggaggaaggaggatatccgagggaaagggtatcataagatctttaagcaacgataagaaagagcacaaaaaggagagattccagtattcatccggttttggagaaagaagaggtacaaagacacaagaaaaaaaggaaaaaaaagatgaaataaaatgaaatgaagaccacacccgaccggcagagtaagaaatcgtttgacgataacgaaaaaaagaagaaacagagtgtgtgtatacacgtttctgaattaagacttcaaaaaaaaaacttcaaattgtcctagtgagtaacgaagaaaagaaaagaacggagaatagaaccgaaatgagaatgaaggcaatggtaaacaaggagcaatgaacagcaaacgaaacacctgaaatcgatgcgccgacacctaaaattaaaagaacattttttttgctatggagctccaataggatatcaagttaggagataaacatatgcttctagagtttgttccaatgaagatgctacgggggggctccgtccgtttgatctcgatcagatagattttttttacttgtctttattgggaatcgtggtagatcttttggttttggttttgattcgggttcgaatatccaaaattcagaagtagtttcctgtctgtttggaatctggtttttgagctgatccacgtcggaaaaaaggagaaagaaaagtcaagcaagtcacgttctttcgtttagtcaagagaaatcaaaaagacagtgttatccgtcatagagtaaagagagggaaggccatcaaggagaaaacgtacaagggatgctaggatatcttcgatgtattcccgacttcatctcgatcgtctcccctgccggactactcatcatcatacttgatacgcctatcgatagactctcttccgttctccttcttcgtcttctaccaccgacaccattatcgccatcgccatcgccaacgtcatcgccgtcaccgtcgtattcatccgcatcctcggactcgtccgcgtcctggaagtatgagttcctcgggtcgtaatcatttatctggacgccatgtgattgagcgagtcgacctagcttgtcatccatctgattacgttcgatatagcccggctcggacctcaaggatccatcgacagaatacatactctgtgaatacgccgtgtctgatctgggccgtcctgatctactgctactaccatcgtcacgggtaggaactcctaacgaggacatgtcaccgatctcggcggataacccgatgggtgcgttctcgacctgtcttgtcgtaccctgaggagtgaaggtcacgaccgaagccatcgcgggactctgacctgctatcatccccaggacctcttcattctgtctatctcgtccgcctatcgacgttctcgtcgtcccggctgcgtccgtctgtttggttagtgaaggtgtgtccggttggtcgtaaggtgggtagggagaggacggatcgtcttgttttggccatagaggggcggtcggcgtgctggggcccgaatctacggataaatcggatggattgatgagtctcgagaacggccttggttttgatcttgtgtggggttggaattgggcttgtctgtccggaccgggggacgacgaaaacggctgtcgggccgataggccgaaggcccgactgttcatcgtcgtggctggactagagaaaaagttgggataggaagtcgagccgccgcttgtcattcccagggtcggatcttgttgccggcggcgtcgttgaatcgctttgaagatgataagaaggataagacctaaaacccgagtcaggtgcggcaatcgcccgaaagtgaggggaaatcaaataaaccagagtgaaatcgtcagggatacaagatagatgaatcaatcaacctctggttggataacaacagagaccaagcagataactcacagataccagccacgatcgcgatggcaacggcgacccagattcctgtgagcgaagactctgaatagttggaagtcgtactagacgatgtattagaagaagtcgcgacagaagacggcgatgacgaagaagttgtggtcccggatatcgctctatacatcgttgttgtattttgtttcaaaacgagtcccaaaacatagcaatgagtcaagcaacccaagacagcgaatatcagtggtactgtcacaattcaatatgaatgcttcctgtccgtcttgtagggtatcacagtatagaaaaaaaatggaatgactgacgcttgagcagcggatccatactcccaataatcaaccatcatcaaaccaccctcctgcatgttcgtcatccgaaacgtatggtctcctgatcctaagcctgctttacgccacccgatctgtttgaacgtcgtgcttgaatccatgtcggccggtgccatgtttttcgacagattgacagttgggtaagcaaccccatcgatcgagggaacaaactgagcaagggacggttgaatagctgtcatcacattgagatagtttcctatgtttccatccgcgtttttcggcgagagaataccagagaataaaaagaaacaacggacgagttcagttataaaacgaggccgatatcagacacacgcatgcacacgacgcgacttacctgtgaaagtgaattctagataagacccgttggaactcgtccaactgatggactgattataaaatgatgagatcattgaccggattgtttcggcctgtgtctcattaacgatgttgccatctgatacccgacaaccatccagagtgttaagtcaattggcaagaatcccatgcacccagaagagttgcttctgagtatacacatcctggcgatctggatgatacaaagaatgacgtgaggcgaaggagaagaaaactcacccagattcgacgcgctcatcaggttccaatcggatgaaagctcaatcttatttgtttcccaggccgagtcgtccaacaccgagggttctgtcgttgtcgacgttctatccgttttgatcccccaaaaggacaccccagacagaacgaaagaatggaaatgaagccgagaagagaaagggaaaccgagcaagatcgatcgctggtgtcagtgtttccgttcctacacaaccacacatgaccacttgtcttctccctcgctggcgcaatgtactattcaacacacatacaagttatcccacccaatggtgatgcccaacaaccgagctacatcggcctgactagacgctcgcgagtcgtcaatgctcctgaagacgcccgagaaagaatgcgtaccgaacggaaggtcggtgatgtttacagagctcgtggccgacatgtccgagatagatttcacctcggtcgagttgatggatagggtcaattggtatgccgaggtcggttcagtgagaaaggatagcgaggtacctgtacggatgatcacccgaacgatcaacccgatgcaactcagtacagtcttgcccggtcaagttcagactgtcggcgaaacgcgcgacgattcacagagagaatgaaggaaagagagaatgagcaagggacaaaccttcgaactctaactcgacccctatgtcagtcccaaccgcccaagcctccgcccatcgctgactgacaccatcccaagctgcagaattattccaaccctgtttccatccaacagtccagtcacaacttatacaaggcgtgtacgtgattaatggagagagcggcgagagagtggttgctagacttgttgtcgatgatgatgaagaggaagaagttgaagtcattgagagaggggagatatccgaatttgttcactctagaacgcgaatggaagagaaaatcgagtgatagcagagcagttaggcgggacacaggtgggtcaaaaagatcaaggctaaaaacgaaaaacacggcaatcgctagatatcgttgaatgaggagaaggacgaacgaatgaatgaacagagaaaacaaaggaataagaacaagaacaagaaggagaaagagaaggagacgagaaaagaatgctggtagtctgcggttcagtcttcagttgatgatctcaagcaagaaggaacgtaaatcgagcctcggctctgtcgctgagatataacaagattcaactaagatagaacggaacctcgggtaaacacacacacacacacacacac

SEQ ID NO: 80 - DNA, 9877 bp, Xanthophyllomyces dendrorhous
acacacacacacacacgctcgatgtggagttcgatcaacctagaacgggagaaagatctgtatcaaacagaggacgatggcgagagtgagaacagatccgaaagtgatggaggctatatgcctacggaaaggtagatatcgaaacaaataaacattgtcaacgaaacgtggccgaagataaatagtcacgtgcacttgataactctttgagcatgtacattctctttcttcctccctttagacttggacgttctgatttctcattaaactgtactgttgtggtaatggttcttacggtcaagagaacttgtttagattaaagctaaagcatcatgagatgatcacaacagggtggatacagtagtcggggaaaagaaaatggttgtgggagggtgagggaagcagatgtaggcaaaactaaaagctcatatagaagaaacacagaagaacccggaaagggaggaaaaccgaaaggggatcaagagaaaacttcttaggcgttgtaagtggaagcagagacgtttccacctcggccggtccagttgatgtggatagcctgtcccttctggagtcgctcgttctccttaccaggaaggacctggaaggtgtgggctccgaagaaatctcgctgtccctggaggaggttggcaggcacggtctccgatcggtatccatcgaagaaggaaagagcggtagagtggcaggggatggggataccccagatggtagcctgggcgacgattcgtcgccatccgggctgggccttggcgatggcgttcttgaagaagtcgtcgaacaagaggttctccaagtcggcgttcttctggaaagccttggtaatgtcaccaaggaagacggacttgatgatgcatcctcctcgccacatggcggcgataccagcgttgttcaagtcccacttgtactccttagcggcctctcgcataagcatgtaaccctgggcgtacgagatgatcttggaagcgtaaagagcctgttcaagatcgtcactgtggtttccagtaggaaaaatcgagggaggagcaagcgatcagatcaagaacctggctcgaaacaaataagggaatcagtacatgagtatacgtacatgaactgctgcttgtcaccggagaaggtctccttttcgggtccagagaggaccttggaagctcggactcgctctcccttgatggcagaaaggcatcgggcgaagacggcctctccgataagggtgacgggggttcccatgtcaagagcgttaatggcagtccactttccagttcccttctgaccagcctggtcgaggatcttggtgaccatgggctcgccatcgtcatcgttgtacttgaggacctgggcggtgactaagaggggatcgagaggtgagctcggatatggaaatcagcaaaaaagaaaaaacgacaagactaactgtcgatcaagaaagagtcaagaacacccttgttccacgtaaggaagacatcggcaatctcggactcggtcatgtcgagtcctcgcttgaggatatcgtaagcctcggcgatgagctgcatatctccgtactcgataccgttgtggaccatcttgacgtagtgaccggcaccggttccaccaacccagtcacagcagggctcgtcaccgttgggtccctggatctgggcagcggtcttctctgtattgtccggaacgaaacgataccaagcggattcaaggttaggcgtttgtgtacatgtaacagtctaatgaaaccagctgggagacgaacggaagatctccttgatagcgggccaggcggcctcggatcctccgggcatgagggaaggtccgtgtcgggcaccctcctcacctccggacacaccggatccaacaaagagcaagcccttggcttcaagctcctgggttcgtcggatggaatcagggtagtgggagtttccaccatcaatgatgatatcacccttctcaaggtggggaacgaggaggtcgatgaaagagtcgacggcctttccggcctggacgaggaggatgatctttcggggtcggacaagcttagagacgaggtcctcgatcgagtgggccccgataacgttggtgcctaccaaggaagggagcaaaagaaaagtcaatggttgatgcggtacatgtaggtagttgaagaaaacaaccttacccttagcctcgttctcgaggaagtgatcaaccttagagacggttcggttgaaggcgcaaaccttgaaacccctgaggtggacggtcagatcagagggagaaaggtcagaacggaatggttcaatagagattgatcgatataaagaactgacttgtcgttctataaggaaaaatgggtttggagtgaataccaaatacagttagttttctcaagttctcggaagattgttgaacgtgatgttgtgcttttcttctcgctgctacccatgtctcaagggatttttttcttcctgttatcttgctccggggttacgtaccatgttgagaatcaagttctggccctgtggagatgaatcgaacgagagaatgtcagaagcgataaccaggcaagagcgatgggttgcaaagggaacgaaccatgacggcaagtccaataagtccgatatcagcgctttgagcgggaagagttaatcatcggccgagggaacgatgaagagatgaagagtgagagaaaatggaagaaagaaagagaaagaaggaaagagatgagatgagatacaagatatgagtgattcaaaccaagagaatgaagaaagcgaacacaaagaagagcatacctcattttgtttagttgatggatgtatagaaggatggaaaaagaaaggagatgatggttgttggcaggagaaacagagatgggtgattcgcaagagaaaagagaaaaaaaagaaaagaagagaaggaaaaaaagaaaaagaaaaaaaagggaccgtacggcaggcgaaccgagcactctcgtcgcccgccctgagcgttactcatcacacaagccgcacggaccggactgacgttgaccgcgcgtgcttggggtagaaaagtgcggggaacaattgggggcaaaggaactaatgccggctttagccaggcgtatggacacggttatctgaccaccagcctaggggatttgttcctgacaagtccaagttaggtacccatatttggccatgtcttggggttgattcaggcttggctgccctatgagtgacgatcgaggcccataattgcccataattcctcgaaggatcccaagtcgttttatctttccccaagctaccccgaacacaaacatccccggtgtcatcatccaatcgaacgctctccgcgatttggttggacagatattccatcattgcttcctttttcgcgtctgttttccccgcatggacggataggtttatcgattacgtaacggatgattgatctccccagtgttcatcacactcggcgtctctcctgccttggtattctcgttctgcccttgatatcacgctgatgtcgttgccataatctttacgcctggtatctttactccatgacactgttcgttccttgtttcactactaaattaatctccctatcagtattcttgccttcgatatttgtttgtcttctataacttttcctgtagtgtttctgtagtattcttgtagtttccgatcgatcgatcgatctctgttagtacaatcagtacacctactgagcttactgagcttactgtgcttgctacactgctactctattcttttctattgccctttccctctctgctaggcgaccgcttcgtcgatctgatactttctactactttcctctaccgccctgtacttacactctttactgctctctatacttctgactctatatgcatgccatgcttgataactgctcgctcatcagatggttcccgccttcagattgatcatgtacacatccctctgtcttactgggatctctctgttcggatagtaacaacttgaacgacaaacgttgagcaaccagaccatacacagacacgcacgtatatgctcacatagatgctcacatagatactcacacagatactcacacccttgcccacacaagtgctatcgatcaagtaacacgttccaccagggaagagcacataagcagtgttgttacagcggtccgcagttcttgacgaacgtatgtgtgcgcgccctggtgttctatcccaagaaggccaaacagcccaaccgttcgaagcttcgcccatctactctcgtccctctggtctccactctctcatctctatcacacacccaatcggttcgttgcgttttctctttatccttctcttcttctcagtctgctgtgaatcattcagtgaggtaggcggtcagagcccatcatcgacacgcttggtgatctctatttccggcttccccagccctcgcggatttaatcgcttgggaccgagccccgttcagctgacagccccctctcttcccctttttctctctgtctccctcgtcggctctctcatcaacaccaacttgaaaaaaacctcaaagacaacagtctctagagtagctctgtacttcaattcagagtcatatcgcctgtcttggggatagctgtttggaacatcgtcagtaacttttcatctgttcaagaagaaaagagaaaaaaaagtcctcaaggttcctctggccatcttgcgatctcaccgtacctctcttccatctctctcttattttctctcctcagaattccctctaacttctagacacaacacactctctctctatcttgacaacatacatctcctcccataagccgactgtcagagagcatctcgcactaaaagaaaacgtacggctttccgtccatcgatccttcgctgttctcctccaatacggaaatgtccttcagtctcgctcggagcgcctcgctgggaggacctcgaaagcagatggacgacgtcgaacgtgcacttggcacagaggactaccatcaatctctccggtcggacggacagaacgtttcctcctggtcaagtagaggatcacattcacccggagagtatcatccaagccatcggatcgtcggcgagctctacccttcctccatgacggctgacggtatggccagaaccggtctgtttcccgtcaacagtgtcaatcaagctcaccagcacccaccaccaccaccgccgccgccgccgccgtcagcatcgtatgctccccaaggatcggttgataaggttgcgcctcaccgacagtcctaccatcaggttcctcctccgccgtcaccttccgcggcagctcgcaccaaccatggtccgcctccgcctcagctagaggccagcccaggaaacttcaactcgtcctcgtcttcttcgtcctttcatccgcatccctcatcttctcaccccaaccagtcaggccaaccgcctccctcagcctcgtccaatccgtatgccgcccaggtatcatcatcctcggcctcgtcctcttcgatggcttacaacgtaggagcttccggtggattctcgcctccttcttcagccggtcattcccaagcacacagatcgtcctgggcggactactctccgttgccttcgcctaatattgagatgcgcgcttcacctcatcagccatcttcatcatctggtgcctactactccaagcctcctcctccggcctcgccctcatccggctcatctcccaacccaaatagggcaagctatcatcaaatgaacccgtaccttcctcaaccgccggcctccttgtcttctcagttataccctcaccatcagcaacaacaacagcagcagcaacccccactaccgccgtcgaatcaaagaactcatagcagttcgaatatggaatatcagcttccagttccgcctctgccgccaccccctcctccaacgcaaagccaagctcagacgcaacatcattctctacagcagcaacagcaatatattgcgccaccccctactcagccccgagcgccttcgactgaacaactgtcgacaggtacctacggtcatcaacactcccagtcgatgtcatcacatcagatgcattatcaacctcatcagtatcagccaccgccgccggcaaacagtatagccaatcaatcatactcgagtcattcgagggaaactatgatgggctcctccggcttggtcgattcgggaatggattcagggccgggtagggaggacgtccatcaccatcagcaacagcagcatcaacaacgaggtgggcagacacaggaagattctcaagggttcagaaccgttcatagcccaagtgatgtgaaacctcgggcattcaactcgagagagatggtccgttgttcttattccttgtcgctgttctttctgtttctttcgcgcgtttcatcttcaaatcgtccttctgttttgctgactcttccttctattctggcttgtttcaaccatcttcgatgctcattcctttcagcgtccgttgcaagccctgacatctgacctggctcagacgtatacgcggtgtaacccaaactttcggtatgagaccgctgcgaacccgaggagggtgctgacaaagccgtctaagggagtcctcaatgacgggcacgataacgaagataacgattatattttatacgtcaacgattatttgggtacagaagaaggatacaagtcagttatctgttctcattctctcttctttcccttctctgttctgcgcccattgggttcttgctggcgatatgatcggaacatgtaggtctgattctccgctttctgacttcgcacgtctcgctacagattcttgattttggacgtgctcggtcaagggacgttcggccaggtcgtcaaatgtcaggacatgaggacgaacgagatcgtagccgtcaaagtagtgaaaaacaagccggcctactttaaccaaagtatgatggaggttgcgattctacaggaggtccgttcttggctttttagtgtatgatgtccgacaggaatcaagtgctgaccgtatagtgatcttctcccgcttgtcttctctttcatcagctaaacaacaaggccgatccggacgacaagcattgtattcttcggatgcacgcctcgttcatccatcacaagcacttgtgtctggtgtttgagtgtctgtcgtccaatctttacgagctcatcaagcaaaactcattcagaggactgtctatccagctggtcaaggtgtttatcacccagctgttagactcgctcgagacgttgcaaaaggcaagactgatacactgcgatctaaaaccagaaaatattctgttaaagaggttcgttcgaactgattgcctatagctctagaaccttatggtttggatactgacatctcgctttgctgcctcgtatgtgtttgcgcgcgtttcatgttgctgctcgcttgtgtgtgcatccactccacatcactgctcacctcagtctttcatcacctcagatcaaagtgatcgattttggatcggcctgtcatgaatactcgaccgtgtacacttatattcaatctaggttttatcgatcccccgaggtcctcctcgggctgccctactctacagcgatcgatatgtggtcattaggttgtatagcggtcgaactcttcatgggtctcccgttatttccgggaacaagcgagtacaaccagttgtccaggattatcgacatgctagggtaagaccaagccttccttcttttgtacaatgcgactgatgaatcatccttgaactctgggtatctgataccctactccccacgttttgcccaatacttcttgacccactcagaatgccaccgaaccatctactcgagaacgggaaacaagtccacgagttcttcaacgcaaccccaaacccggacgcctacactggcggccgtgtcttccgtttcaaatcgatggagcaatactcgaaggagcataatgtacaggaaacagtgagcaaacagtacttcaaggcttcgaccttgccagagattattaggacatacagcttttcaaaaaagggggccaaacagtcggatatggatcgaggttagtccttctttgtcttttatcgcttcataagtcttcttaaggggaagacatgctcatcatcatccaacgccgactcttgttctggttcactgtactttatctgtacgtcatgatcgacagagatggcaatgcgagcttcgttcacggatttctgcacagggctcctcaacctagatccgatcaaacgatggtcccctcaacaggctagacaacatccgttcatcaccggtgaaaagtttatagctcctttcaatgtgagtgtttgtttgctcgtcttctatctctttgcgaggtggcactctcactctgggagtgattcagacagggaagaaggataaaagagaaagagaagtatctcatcaacttttttttaaaaaattcttcagccatcacgacactcctcaccagcgtcggtcaaggccgtgccttctgcccattctggatctccgaccgattccaaacgaccttacggtggccttgtcgcgaaatcttcggcccgcccccctcgagcctaccaggatgctgccgcttataaccagcagctcaaccaacatcagacgtataccgctcaacagcaagccgcccaggcggccgcgaacgtataccgacacccgttcgcacctccttctaccgcttctacaagtagttcttcgacaggtggtcaaccggtggaggatcaagcaggatcataccaacatcaacagagacttttacaagcgcagcaagctcaggtcgtacaagctcaggttcaggccgctcaagcccaagcccaagcccaagcccaggcacaggcacaggcacaggcgcaagcacaagctcagcaccaccatcctcaacagacgctccgagcgagcacgtcgacttcaaacttaacagcttcaccttactctgttcggaactcgaccggatcgacaacgaccattcttcctcctccggcagccgccttacatgcttctagcttgggcgggggtggcgttggtggcggcgcaagcggcccaggcggttattataccggtggaggtcgtgctcggtcaaacacgatcaaccaaatgtcgattgtgccggcacagatcgctcggatggctagtttaggggtcgaaggacctggttctcagataggaaggggcgcgttgacaccagtgatgaacagggaggaagccatgagagaatgggagaggagaaactcacaggcagccgcgtcgtcgacgacggcaggcgggggaagttctggaaagagaggttccattggcggtggtcatacatggccgcagctagatttcttggaagaacgagcggaaagcttgggaaactggaacacgacttctcgatacagcggaactgggctggactcccatcaatcacatcaccaccgtcatcagcagcagcagcaacaacaccaccagcatcaacagcaatcatatcaccatcagtacggttctcagccttcactctcgatcgtcgttgatgaggaaaatcgtcggaatccgggttcaatatcatccagacgggactcttcaggaatgaccgcgctcgaatccggtaccagttcgggctatcatgactcgacaccttccccaggctcgtcgatcaccagtccgccaatggcctacgctggttcgaacagatatagcgcttattcctctggtccgaatccacaggtttcgtcttcggcttctcttcctgttgcaggttacgaatttgatcatcggttggacgggatgggtagtctgattcaaccccttcaacccaggctggcaggtggacctggttcgggtggcgttggtgttcgatcgagcgctggtagtggcggaggtggtgctgggggagccggggga

SEQ ID NO: 81 - DNA, 9281 bp, Xanthophyllomyces dendrorhous
ggggaaatacggcggtgtcaccccaccagtcaccttcgcacgggtcatttgcctttacaccgagcgggaaccatcgtttaggaaccggaggtacattgagaagataggtgatctctgttgacgaagagagagagagagagagagagaggagacgatgaaagaaaaagaaactcagatcgttctacttttttgtccttcccttctggaaattcctttgccctcgtccctatccttccctacttttctctctcccttctgcccctttctcagtcttctttccaccctgcccctcaatttcgttgccagagatctcttctcatctattcttcatcttttcccttccttctttcctttctttcatccgttcctgacatgtctatcttacatctcatttttgtcctaccctatcctgcgtgcctgcccactttgactgacaaagtcaaatgaagatgacaaaactctgacatagaggaaccaggaccggaaaaccgaggtatggaaacggggaacagggcatcgtatatgccatgagaatcaagaggaaaaaaaagagaaactaggaataggggaacgagagaacatgatatcggctttccgaagagtttcaactcggggtttccgggtgcgcaacgctttcttgcctcttgcccccttccccccccctccttttcctctctatcttctgcagcaaggagagaggaaagggtttttgtgtggtcgaatggttaagagagacagaagcacgtacatcattatcaacatagatcatttgttatatcaggtcaggtcaaggaagacaggggaatatataacgaaagagtaaacagagaatgagatgaggaacgggagagataggtattgaatacaactgatcgatcgtgcacgatggcacacgagacggattggataggatgaagagtagagtggagacaagtcaggtcgagaaaccgaagaagggaaaggaagaaaaaaaaaggggggggggaaagaaatacaaacgcaaacaagcaaacaacagagaagaaaaagaagatacagatacaaacgatacgatctctcccctctcccttgttgttttcttcttatctatctaaggaatatatattctggaataaccctcgactttagatctacagcaaggacaaccactcaacgccccattttgtcctctagtagccaacgtttctctacagtcgttacataatgccagacatctgcaaggccagaggatgaccgtcctttcgtccgctctacagatcacacatactctgccttctggttcatcccctgcgtccggtcttgagaaagaattcgaaggagatggtgtcacggagggttcccttcgttgacgaacaaactctttcaaggatagagcttcctgtccggcatacgggctggaggaggagaagggcggaggagacaaagttgaagaaaagaatgaagatgacgtggtcgaagatgacgaagctgggtcgagtacactcaacgaagggaggagcgcattgaaccgtcttctcgtcagaggagaggacgaagacgatgtcatgtgtgcaaggaggacggtgggtagcgtcggggatggggggagcattgatagtgtcgacagaggttcgtcagagtacgcagcaggtgatgacgacgaagaatgggaagatgaggttgacgatgatgatgaggaggaggaggaataggatcgagctcggagttgaggccggatttgatgagaggatctagaagggtgatacgtcgggtcgtcctcctcagatggatcgttgacttgcgtataacctccggcaaggaacttcttgtacacattttcatcctcctcaccctctccaacgtcgtcttgtggatgctcctctcttcgatcttcttcctcttgctcaaagtctggcccaatcaaggcatccccttcagcgagaatggggaccaacctaagtccccacctgcctcctctcgagagccgtctagtacctccgaatctcagtgctctcgcacccaggtcccaagcacctcttccaccgggtacccacccaagcgtccaccagccgagtgcacccagccactctttgagcgcggtgtagaaccgactgaactctgtccagtaaggagaatcatctccaccttcccatgagccgaggatcccaggtcggaaggacgctttgacctgagtgatctctcttccaaacccagtcgaaacgtgtcgatccaatggggacgaagccacgtagaggtctgtatgtggaccggtgggatctctagcaaaagcagagttggataaatcgacgtaactctctgccgggagctcgatcagaccgacctcgttccctagaccgcccatcttggtgtgggtgagacaacaggcgctcagtttgaggagcactgtaggaaagtcctcgctcgtcgaaggccaatcactgatgggtagtagcgtatcgagattgatagtaccctgggtgaggagttgagtgaagaacgagaggataagcgtgagggcgaggatcgtaaagtgaaagagcgtaaacatgtttgaggccaaagtaaaagcaggcagcgccgatggagacgtgagaagaagataggtgaagtgagtctactcggaggttatgttttgtatgtataacaatcgaatcgccatgatttgtcattgtccattcggtcataaagacttgaggtcagcttgatggacgtcagagcgaaggcgaaggcagaggagaaagaaagattctcttacgacttggatcgatccgcatactgcagtcggcagcaacctatttctggcccacctttgggagcattcagccccgtgcagccaggcgaactgtacagtcgtcagccagataacgaatagaatgttccaatctggcctgctcggctctggctgtttgcggtgcataaacgggttagagtacagatgaagaaggaagccgaacgaaaacaggttggcctgggagcctacatgggcgaagccttctagggagcgagcgaatgtgccggtgattagtccgaccgcgatactggtaaagacccgtttaaaaagcttttcggtgggcatcgtcagtgtctggttggcaagcgggagggaggccatccatggggatgcggtcggagaggtcggatgaggtagcaggcataatgtgagaagatagaccgagtagagaacatacagcagcgacggtattctgagaagcctatgtgtttgagtcgaggtcaacgttctccgaaggatgatcttccatcgaggctgttcaattgacggatcgtcttgttccgcttgtctgcggtccatcggaccggccggtcggacgacggcccaaattcgattggttatcagagctacagcaaggaggacgaggccatagtaagatatgaagaacccccaaggggtcatcccggacgaatcatcggttggaccagactgaaatacccgagtagatgatgttcggtacgcttcggccacacgtttcacacgggaagggatgaacgatgtgattcgagtgagcagacctggcatcgtgagagatcaaggagagtatcggaggtggtatcaaactcgataggaatatcgaacgagtatgtgacaacgtatgcttgccagtatatctgtatgagaacagaaaggacgaagaacgggttgatgatggagggaagataggaagaagaaggacgagcggaatttgttctcgcttacccccaacgggtaattccgactgggcgagattgtgtctgttctctttctctttccttcctttcgctttcttcgctctcttcggactctcagtgtactatgaacgacggagtgtcttgtgctctcattgtgctgcatttctctccctacaacccatggcgtttgactgatggacaccagccaagccttcttccggctggcttgctctgttggcatctgtgagttacgtatatgaaggcgtcctgactagataaacatcacgtgactagggctgtgtacttatgtagcccggatgttgtctaaggttatatacataaatcaaaaatacccactcaacatccgtctattctagatttctttgcctctcccaacttgcaaaggatacggacacggatatcgtcttctcccttgtctttgctctcctttgcttcccaagatggcttctcgctcgctacttgcttctcttatgcagggtcccgcttcagctggatcttctcgagttgctctgaccgccgcgtccagagtcgggccttccttggttcgacacgcccactcgcatcatttgattcttgatcccaaacgggatgtcgttgtcgatggaaagatcggtgagagcttgtctttttattttgctttgcttctcttgctctgttgtgtcaggaggctgtgtaccggtcatcttagaggtctatcaaaccactccaagtgtatgtcgagagatcgaagaacagtcttagtacataatctcttctggacgtgttctcgactcttgcgtcgaacagatagcttgtcctttgcgtcctccattctttggttcttgcttctacttttctcccttgatgatgatttgtttctgtgtatcctcccttcttttgtaactggtgtagcttacgtcttgaattggtccttttttccctcttttctcgcctatctttaccttctcttccagtcaacccaatctcgccgatagcgttcagccctaaaccaccctatgcacccctcttccctatctatacccctctttcctcgatcactccaacagtacctcccgcccaggcggccgagactatcgtcccgcttcctcgggatatctttggtgttcctctgaggaaggacattcttcatcagtgtgtggtccaccatatgactttgttgagacaaggaacggctagttcgcttcgaagggacgaggtcagaggaagtggaaagaagcttcgaccacagaaaggaacaggaaaggctcgagtcggtgattcaggaagtggtatccgtacgtgtctttctttcttagaccggataaatcttattatctcctgtttctctaatcatcgaaatctcctgcttttttcttctcttttcctctctcctttatttcacgctcgacaggtgtcggaggaggatccattcatggaccgaagcctcgagattggtctacagatttgactcgaaagacccgtcagcttgggttcaagattgctctgtcccagcgaatgcgagagggacgactccgagtggtcgattcgcagggacttgttatggacgattggcttgtcccggctaagcgggttgtcaagcctggcaagcctgccaatatggtccaagcagcctccaagtcggctcatatcggtaatcgactcaaaggtgtgtcttcaacagtctactctgtatacattttcttcctgttctgatcatcccatctcttttattcccgttctttcctcactttctccattccttagagctcggctacaaaaaagcattgttccttcactcaccgttcgcggtcccaccctcgaatttacttccccgatcaatcagcaatatctcgtccatgaggctcgcctcgatttcctcaatctctactctcgacatcctcaagactcatgagcttgtgtttgacatgcccgctctcgagtggctgattgccaaagtccgtcagtttgacgaggccgcttactccgctcagttcgacggaaacgccatggtcatgagacgaagagcgcttggattaagtgacttcccggaggacggtcagcccgatgaaagtaaggagatgctgagacagctggaagctcagctaggcggtgagggtgagggtgatatgacagagttcgggttgggtcaaccggctggagaaaggctgagtctggaggaggagcaagagatgaagaggagagcggactggctcttaagagtgctgccggacggtcaatcaccctcgactgcttaaagaaggggtgggatggagagaagaggaaatggaaacagaagaaaaaaatgaatgaaagattgtaactcttcactcagaattcctcttttcttctcgtcatcattgtcttcttcttcttcctgaatctctgttgggtcgatccgcgaaagacgtggctcgttcatagtgagaaatcgtgaatgtgaaaaatctaaacgatatgagtgaatttcctaggagggacaaattggactctaatcagtctccttgtaatcacgatccatcatctttgttcgaacaataccaggatggattgagccacatggtcaagtctttttcttctccaatattgcttcctcttctctttgttctctctcccttttttcttcgatttcggttgcacacgactcaaggaaaaagttaaaccaagacggcccatgcacatatgataaactccctctctcccttctttctcctctctctcctcccctcgtcccgtctgcactttctttttttgatctatacctcaaagaaggaaagattagatgttgaaaggtttcgggatatgcattccactccagattccacgagcagaggtcgatcccgggccaggttggatctgagcatgacgaagggagaagattctgtttcctgactgtcgaagcaagtttcgaacctgttttggtttcaaggggggttttatatataaagttatgatttcgtccgatcgtccaatgcaagaaagagaataagggaacggttcgaaagagagcatgctttaagatgaatagagtgtacgtacacgtaactcgacagtgtccggtcgaagctgcttcaagcaaacggacttttcccttccagtagctgcagcacacaacacccaaaataagagagagttgccaaacaggaacatcaagcaatatcgcagacagacaaaccatgacggtcagctcagtcccgatcatgtagctaagagacaagaaagaaaaacggccaaaaagtagaaaagagtaggagggaaaagcgggaacgcactgtatatagctcgaacgacaggagcttttcctcctcgggccgaacgaacgatgaattctgtctgagggttggctctagccagtcgggtgatagacgttcgaaggtattccctaaaggaaagaagagggagaagagagaaagcgtcaggacatggtaccctgtggatggaccacacgacaggcggatggcagagaaagagcagagaacgataaagccgaactgatccagacagaagaacttctttctcttcttgaattcctgttgaagctgatagctaaggaaaaaccaaggtctcacctcataccctcggcagtgacatcggactgatggtactcaaactccatccgtcggcagggctgggtaaagtgcaaatatccgggtaccgtgtaggatctcaccgaagaaggaggcacatagaacggcggaggaatcttgaccggttttatgaacgaaatcggactgggtctcattgcggaaagagtgaagaaagagagctagaaggaggcaaagaccttagccggatgggaggatgagaacgaaaacgagtagcggacgatatggaaagatcgtataggaaataaagttgtttgttagggttacacccgctcaagttagcttttctccaagtcaatctagatacgatgaggacgcgaccgatacatcaccacatctgctctatcctcatttctctcgactttgcttgttcagaacttcttacacgcgatgagtgtgttgttcgagacctcactaggagatttggtgatcgatttggagactgaagcatgtcctgaactgtgtctgaactttctgaaggtgagctcttaccatcccatctatgcaagatgcttttcttatggattaaggactgatctttccttcgatacgtatacgggtttttattctggttacccacagctatgtaaagtatactactacaatctgaacgcgttcttcaatggtacgttccttcttttggctagttcagtttctagagagtgctttggttgtttgcttacctacaagttgatgcatgcgcgttggctttgttctcttttgttctgttctgttcatatagtttccaaggatttcatcgcccaaaccggagacccaactgccacaggtgaaggcggagaatctatattctcttacctatcctctccgtctgatgattctgtgcctcgatacttcaaaccgccaatcgtccaaagtctgaaacatacgagccgagggacggtctccatggctttcgccggaggtcctaaaggtggatgtggtagtcagtttttcttgacgttaaacgaaggacctatcgattatttggatgggaaacatcccgtgtttggttcggtggtcgagggtctggatgtgttggagaagatgaatgagacctttgtcgatggaacgggaaggccgatgaaggatatcaggattcgacacgtcgtggtattaggtgattccttccacctatctttgcttcttcttcccattcactttcgagtcacggaacacagaaaacatgtactcgagacaatgtactgacatcagatgtctttcgtatacttttatagatgatccgttcgacgatccgcctggtctactcgttccgcctggttcgccgacgatgattccagacacaaactttaacttgcgaatagccgacaacgaagaccctctggaaacgttacctgccgaacaggcggaggaagaacgtcgtctggctgccgcttctgcttctgctctaacattggagatgattggggatctcccgttcgcgaacgtccgaccaccggagaacgtgttgtttgtgtgcaaacttaacccggtcacgagggacgaagacctagagttgatcttttcgagattcggaacgatcatgagctgtgaggtcatcagagataaaaagacgggagacagcttgcagtacgcgtttgtcgagtttgacaagagggaagaagccgagcaggttcgtcgtagtcttctttttctcgtctgatttgaaacccgttggcgcgctgtgaacagtcgtcgttgtcgtgttttctttctgacgtccaggaaactggttatgttcaatgaaacttttaggcatacttcaagatgcaaaacgttctcgtggatgatcgtcgaatctgggtagatttgtgagtgtcttgtctcatgttacttttgagttgctggccaattcaacctgtgccttgctggtatctttgtacgtctctatggcttgatacatcaactgacgatgaacgttccatagctctcaatctgtatccaagatgggaggttcatggagttcggctgcgctcaaggtgacatccgcctccaatggtcgaggaggaggaggaggag

SEQ ID NO: 82 - DNA, 19170 bp, Xanthophyllomyces dendrorhous
ggtggtggtaatcgaggtgggtttggtggtgcaggagaaagaggaggaggagggggacatcgagatcagcgattcgatcaacgaggaggccaatcctctatgggtatggtgtttgacgatcgtgatctctctcgaagtgggtcatccaaaggcgcacgaggaggagatgatcgtcctgaccggccaagagacgacagacggtccgaagggagacggagagaagatgaaccgagaagggattcgggacgagactaccgaggcagcgcaggaggaggaggagggggaggaaggagaaggagtcggtcgaggagtcctgctggatacggaagagattccggtagaagtagcggcaggtatagggacagagacgatcgagatcgagaccgagaccgggaccgatatgctagtcacaatggcagacgagatcgatgagagattacatgcctgaacgagaatcgagaccgagagcttagcgttgcttttagagtgtatgtacacccaagactacacacctgtgaacgagtgtaacaagaataaaagcggtgtccacaacaaaattgctgtgcaaatgtaacataccaccagccaagccagccaatatcacgacttccccacacgtgactcgaccaagccagcgaattttcaccttccccctcaccgcaccgagacaatcctcaacgccgggcggaccgcttttctctttaccatcctcacaccatcggcttatctccccctaggaaattatttacatttttaatattctcattttattttattttatttttctcttcttccttcttcaccatgctcaatcgctccatccttagacggactatcagcacctcatctttcagagacaacactagatctttttcttctatccgacaaggtcttttctcgcagaggccttcttctattcgtccttctaattccagcagagctttgtgttcctctttcgtttcccctgtccagtccttccagcgaatgtccatctcttcttctgccgtcaacgcttcggcccagccgatggagggtgtcgagacccaggcccagatcatcgacggaaacgctttggccaagttcgtcttcttctttcttcttggtcggggttctttccttccttcctttttttttcttcgtcttttttcctggtcgcaaagagagatcatctaggaaaggctatctttgctgggttgacaaggaaaaaaaaaatcctgagaaaactagagagactttctcgctcgccttattctcgtgcctgcatatactcatccatccgatccaagattgcttgccttctctctttcctaaaacggagaaaaaggagtttcaattggccatctttccgttttttcttcgttcctccatttatcggaatcttgcgccgttctgatgggaatctttttgggatttccaatctccaaaaaacaaacaaacaaaaaacacacacatttcagtgaggctgactgttatttcccctttcttgatccttccattccttttcactctaccataggagcgtccgagccaagatcgcctccgagatcgcttcgattcagtcaacgttccctcggttccagccaaacttggtgatcctccagcgaggatcccgaccagactcatccacctatgtcaagatgaagctcaaagccgccgaggaggccggcatgcgatgctcgctcgttcacttgtctgagacctcgaccgtcgaggagatcatcgccaaggttagagagtgcaacaacgacgacaccgtcgacggtattctcgtccagcttcctcttggcgagggcgtctcgtccgatggagagcgaagagttgttgagagcgtcagcgaagccaaggatgttgatgggtatgcatacttttcatttcctcccttctcttctcttcttctccttccagtccatcaaactcatgtgttgacatcggtcctcctccagtttccaccctaccaacatcggtcacctctcttctcggcttaccaccccgcttttcactccatgcactcccgccggtgtgattgacttgcttgactctgccaacgtcgacatttccggaaagaacgccgtcgtcctcggccgatccgacattgtcggttcacccgtttgcgccttgctccgagagcgagacgctaccgttacccagtgccactccaggaccaagaaccttcctgagattgtcaagggagctgacatcgtcgtcgccgccatcggcaaggcccagtacgtcaagggagagtggctcaagccgggctgtgtcgtcatcgatgttggaaccaactttattcctgatgctaccaaaaagtctggccagcgacttgtcggtgatgttgacttcgagggagcatccaaggttgcttcgttcatcactcccgttcctggaggagtcggaccgatgaccgtcgccaagttgatgcagaacacgttcgactcggctaagaggcgatttgagcagggccgagagcgaaagatcaccgtcaaccctcttcatctgctcgagaaggttcccagcgatattgagatcgccgtcgcccagactcccaagccagtggttgacattgcttccgaaatcggactctcgcccgacgaggtcgagagctacggtcgatacaaggctaaggtcgagctttccgttttggaccgactgagccaccgaaaggatggaaagtacatcgtcgtcgccggtatcaccccgactcccctcggagagggcaagtcgaccaccacgatcggtcttgcccaggccctcggtgctcatctcggcaagtctgcctttgcctgtgtccgacagccttctcagggaccgactttcggtatcaagggaggagccgccggtggaggatactcccaggttatccccatgaccgagttcaacttgcacttgaccggtgacatccacgccgtctcggccgccaacaatttgcttgccgccgctatggacgccaggatcttccacgaaaacacccagaccgacaaggctttgttcaaccgactttgccccgccaagaagggtgtccgaacctttgctcctatcatgcttaagcgactcgagaagcttggcatcaacaagaccaaccctgatgatctgacccccgaggagcagagcaagtttgctcgactcgacatcgaccccgagaccatcacctggaaccgagtgttggacgtcaacgatcgatacctccgaaaggttaccatcggtcaggccgccaccgagaagggattctccagggagaccgggtttgatatctctgttgccagtgaggttatggccgtcctcgcactcagcaaggacctcaaggacatgcaggagcggttcgtccggccttccctcttctttctttgcttgctaactttctgaagacgcggtccgaaactaacttccctgactgatttcgttgttttcacttctcatacagattgggcaagatggtcgtcgccactagcaggtccgggcagcccgttaccgctgacgatatcggatgctccggtgcgctcgccgtactcatgaaggatgccatcaagcctacgctcatgcagacgctcgagggaacccccgttttcgtccacgccggacctttcgccaacattgctcacggaaactcgtccatcattgccgacaagatcgcactcaagttggccggtaccgaggagggcgacgatgccagcagaaccggttactgtatcaccgaggctggtttcggagctgacattggaatggagaagttctgcaacagtacgtcgggttctttctcccctctcgggtgccttttgaggacctcccagtgcattctgacttatcgatatgtctgttctttatcgatcaacagtcaagtgcagagtgtctggcttgaaggctaacgccgtcgtcttggtcgccaccatccgagcactcaagatgcacggaggaggacccgaggtgacgcctggtaagcccttggccgagacctacttgaacgaggatcttgagaccctcgagaagggatgctgcaacttgggcaagcacattgagaacgctaagaagtacggaatcaaggtcatcgttgccatcaaccagtttacgtaagtggtcttctcctcgcttgtctccttgattcttcattcctctctgcctcctgactgaccgttcggttggtgatcaatatagtaacgatactcctgccgagatggagctcgtccgaaagtacgcgctcgccgctggagccgaccaggccgtcggatccaaccactgggccaagggaggagaaggtgcgatcgaccttgccaacgccgtcatcaaggcatgcgaggaggacaacgactttgagttcctctacgataccaacaactcgattgagaacaagattgagacgatcgccaaggagatgtacggtgctgatggaatcactatcgagcctgaagctcagaagcagatcgatacctacactgcccagggtttgttcctctcgcttcctcaatggagaagaaaagagagactataagctcgtgaatacgtactgaccactttgacttcttaggttacgccaacttgccgatctgcatggccaagactcctctttcgttctcccacgagccggaacgaaagggagtgcctactggattcaagattcctatccgaaacgtcaagcttgctgccggagccggtttcctctacccgctctgcggagccgtccagactttgcctggattgagcactcgacctggtttcttcgacatcggtttggacgacaacggtgacatccagggtctcttttaaagagaacaaacaaacaaaaaagatcatgaatctctctaattgaaaggttctcttctaattttcttctcatttgttctttatcctcttttctttttgggagtttttcatatagatctcttttctccattcgtaagttcccgtctatctactttcacgagaaacttttcctcaccattcaataatgtcgactaactttgatctctttcgtttaaccctcatgcaggtttattctttgttttcaaattgccttgagcatcaactgcatctattagcatcattctcacacttcaacaagtgatctttccttctcgaaatagaaaaggccgttgtatttctaatacagaaaagataacgctctcctttccgttttcttcgttccttcgtttcccatcttttccatcttttggtttgtttactaattatcaaaatgaactagaattcgcgcgtttgtgggtgtgagtgtgagtgagtgtgtgtgtgtgtgtgtgtgtgtgtgtgtgtaagaaaaagaaagagacagagacagagacaaggcaaaacaaaatggagaaccagaggactaaatcattcattcatcgattgagccttgttctctctctctcctctttgatcggaggaatcaagacatctctgtgtccttctctccagccttcgcttttctcgcgatctctctatccttcctatcctttgctttaagtttagccgagtcgatagcagagttgagactgcctgctttggccaatcctaagagtagttgatgggcgaatgagatatgattatgctttcgaagcttttatcgtcgacaattcaccaagccaaagagaagtagaaagacctcgtcatttagagcataatcgaagagaaagaagaatagagggacaagagggatagaggggacaacttacagaattctcaaaagcccatttcttcctttttgcttcctcctcctcaatcttttccttgacctgaccgatcagatactcttgaccagccttctctgcctctttcaactcttttctcagctcgctcatcgggtccttgacgaccgccaagagtgagaattcgagggcgcccatcgggtaactggagatccgttcttggataacctctcgtgctctccctatccattcctgatcatccttcgtcggtacaggaccgtgtgaccgagggtaagattggagaccgtcgagttcatagagtgtgcctagagaaggaaggtaggagatgaaatgataggcatccgaaggctcggagggaatcgaggaatcgatagaaaacggatcggatctggcaaacgagttgtgaacttctcgaatcttttcagacaaaacggatgcaagcaacacggttcagtatgaagcggatggtttcttggaggggacaggcggtgaactgactttgtccgagttagagatcgtgtatcctagcgtctgtatttcgacgaattcgtcacttttcataccatcaacatcatcgcgcgaacatagagggtaagatttctgacatgaagcagaaaagtacgtacgctggggtccattccgtgtccgaattctttcaagttatctagttcagctcccagctcgattttgtcgtcctctgtctgcccacctagaggaaggttgaacacagagtttaaaatggcgagcgtagcgcacgcgctaatatgttttaaagacagaagaaatcagccctatctgttttaggaatacgagcaagaaaaatagagaataacaatggacaaaataatgaaacgaaacgaaacttgtcgatgacttgatgagcaaagaaacctgggaaatccggatcctagatgcgagcgtcaacgtcggggttaaacatatatagtaattcctgtcagttcactccccaagtagccattggatagataaaactagaaatgtgacctcacgggagaccctgctttcttggactcttcgatacctccaacatactaaggtccgtaaaaacaaaacaaaacagaaagaaccccgatcttgacattagtaacgatgtttagccagccagccaggccttcaccatccttccttctgttcttcagcctcaaggatggcccaaacaagaagatcgaacgaaccttgaagagaaatatgaacgccttgatctctccgacgttcttgagtgcctcatcctccaacgaccagagatcctcgacttggagacctttgactcctagctcagtcaagagtgcggtgaagaccgatggatcgctttgggcaaatgggtgattagcttgagaattcttcttgaaacgattacgaggcagaaaaaatctccacatacgactctgtgagagaccagcctgaattatcctctgccatgatgtatatatgtgtatctgtgcgtgtgcgagttgagagaacagagagagagaggaagttgggaattgagagtaaggcaaggaatacaaagcaagatgagaagacggtgagcgcaattgcgtaagcgtaatcaatccagtgccacaagcgaatggttacggattacgtcagcctcattccaggcttggtcaacccttcccgctataaatttcagtttttttcctctattctctttcttctcttctctccttcaagacagtcattgggtcaggtatgtctctctctttgctatcaatccttcgtccatcctctcccacccaaaaagaaaacgccataacatgttgagcctaaacaccaaaatgatttaatgagcatgatgcccgtgacacggcaaaatgatctgaaacttttacgtctgaatcttcccctactccctatacattccttttggccttggtgccctttattctcatctagtttcgatgaagaatagcttgactgactctgtcttgcgtctttttaacgctttgtttatctggtgggttaattatagtcatgaactttcatgtatgaaaaatagaatggtctcgatgttgcaacacaaatttaagcttacgcttcttgacaaaactgatgaggcgagaattgagagaaaaaaaaagaacagaagcttgtactgctgctctcgggaaagacgttcttgaagagaaagaccgccgtctcagatagttagttattggtagtcgaggacttgttacataaatcaagggattgttttcttcatcttttgtactaccagaatcgataacaatcatgaacagatacatatagcaagtaatgaaaaaagactgtatcgaccatggtgctatcctgacttaaccaagtgcattcctcacgctagcttctgcttggttatttatgcgagagtttaccacagaaccaatccaagtcgaacaattcaacatgcgctgtatccagactctatttccgttcttagttctactctctctctctctcacacccaaccaagcttcacctctgatccttacgaacgatctccaccatctcaacactcccatattctatctcgaaccctgcgctgtactctaccgacgctcacactggattcaagaccggttaagcaacgaaagatgacgtaagcgagacgatcacgaggttggccggcaacacccgccggacgacgtgctcgtgttatatcatgtctcgacctttactcaccctcatcgttcaacccaccaccatcaccatcaccgctactgccactactgccacaatatcgatcagtatgcttaggaaaccttctttgatctcgcctagacagctactggcattgtctggaaagacagtaatccctctggatgcaagttggcacagtaagagaatcttctttcccatctcatccttctcatatttcgatttgctgaacccctcttttgaccttgcagtgcctaattcttccgagaacgccctccagaacttccagaaagagcgaattcctaaagccagattcttcgatcttgacaaagtcgcctccgcccatgatctcggactcgcgcatatgttacccactccagagatctttgccaaagcagctggtgggtgatcgatcattcgccgttcgacaaagaacatttctatcaagagtttacaggtcgatcgtttcctgctgactctttgtttacctcatcgtacttttcctataatcacctcaacagccaatctcgcgatcgagccttcatctcacatcgtcctttacgacactcacggcttgttctcatcttccagagcagccttcacattctgggcgatgggacacccaggagaggttagcatcctcaacggagggctccctggatggaaggcagaaggtttcgaagtggagaccggatctccagcctccttcgctgtgagtgtgtttatgttcggactgtcctgtaataaaggggcctgcttactgaacatgtatcaacacgcttctttccctcaagcctaccgagtatcctacccccaagagtgtcgttgatagagcaacggtcccctacgcagatgtcctttccaactgttcttccaaagtttcgcttgtcctagatgctcgacctagacctcgatggaccggtcaggctccagagccgaggcaaggattggagagcggacacatgccgggtagcgtaagcttgccgtttggagaattggtcaaggatggaaagttgatcgacgatgatgcggtcagtctttctagcataacgtctccattttcctcttctacagtcgagagagattcattctgataccaaatcacgacctctcggacgaaaactgaaacagatcaccaagaagctcagggaaattttgggagaccgagccgatgccgtcctggagggcaagcaagacgtaatcgcttcttgcgggtccggaatgacagccgttagtccttctctttctttccctccatacgcccaactcacatgctttttgttctctcacacacacaaccgacaggcgacgatctggttagcgcttcaaaggctcaacatctcttcctcgatctacgacgagagttggacaggctgggcctctcgacctgagactagtccgatcgtcaaaggcgaggagtaagaacacgttctcaggacctcatctacctctttgtatcatttctttgagggttgcatccgagtctttagatgatggtttttattttaagtgttgtgaaatagggccgtggtatggacgaaaagggtgggagggatcattcctttggtattgcacttttaaatagacacttgatcgattgagtcgtattcgaccatgttttccttgataaacctctgctcgttatatccttatcttctttctactttcctctctttgcctccaaagggtgatatcatgaaaaccaaggaaaagacgcgccagatagggaaaaaagtgaagcatgaaagcgcaaattcttatcgttatgatacacattctcgttattcatgtcgaaacaagccatgatcactctgctttctcaccctcgccgacctcgctctcaccagcctcgcccttgcccttgcccttaccagagctctctctccgcaagccaccgacaatggaagggggtttgtccccggatcgaggcgcgtcgatgttctcctcagatcttttatcatgctcactcaatcttcttcccaagaccaagctttcaggtgttcccatcaaagactgagactcaagtctgacctgggattggggttcggtcagtggttgatttgacgatcgaggacggtctgatggggttcctttctcatccgatgagcgatcgtccgtcgacccggtctttccgttcgacgcgtaggtcgacgttgaggttggcgcatagtccagattgggatcagagtcgaggagagaaagatgactggtatgtctagaaggtgtagccgaacctacgtagtccgatgcagatccaacggagctcgaggtacgatgcgcgagagtcaacccatggatcgtgctcgaatttgaacgcaatgaatccaccggggagaacactaaccttcctggtgccgtcgttgtggttatcgttgtcgttgtcgttgtagttgtgtcgtgattgtcgtcgttgttatcatcaatatggctcttgctaaagtgagggtcccggtctaggatggcttggcgggcgtttcggatggttaaagtggccgctttgggagagatggccgatgagcttcctgatggaccataaggacgggcggacgagatcgaagaagacgacgaggttgatatcggacgtggcgatggatggttcggacgggatcgaagaggggaaggaccggcaccagcgccgtccttgcctttgctacctatccaacctcttctcttcccaccttcctcatcccctggagatcccctcatgcctaaaccggttacacccgcctgtttaacaggtgtcgacaacgttgtatacgtcgtagcagcatgcggacctccaacgggcaccacaccaccatcacctccgccaccagcggcggcaggacgtgaacctccgggaagggtttgagatctggaggcttggccgaccgcccggaggaggctctcgaggctttctcggagtccatgggtgtcttccgaatgtgaagtcgcaagcgtaggctctgtcaccgtttcaggaccagccacgatcgccgggtcggcttgggtcatcagctgattaaatccaaacgccaataagggaaagaaagaaggtgatagacaacagacttctttcttagcattcaccctatttcaagacaggtaagagaaagaacaagttgaagaaaacaggtgcgcacgatgagagccatctgttgcaacctcgccaactgttgttgactaggaggcgacctcttcccgacttcctccggggaaaccaacagtttcaccgtcctcggaaccaacgctcgcaagatggagagtaagaacaacgtgaggagatgttgtctgacgtcgatcggttgtgtttcaaacgctttcgatgatgaaccagctgacaaaccggaagacatcgtcggcagggaagaggcgtagaacgagccgttcctcaacacaggtgccgacgagctagacgttgaggaagaaagaccagggccgaaatttgcagaaccggcaccaacggcgccgatagcagagccgatggaggcagcaggtcgtttcgatcgagaattatcactcgtgatacgaggacgggcagagtgggcgttgaggatgagtggatcagaacctagtgggaggaagattccttcgaccaagggaacgatagcactccagaaaaacacccagagctcaaccaatcgacctatcaacttgccgtccgtcacgccttgtagtttctgtatcaacgcacaattcaaccgagttcagcttaccggatattcgttatgcctcttctcgtaatggaaggaaagtgtgtagtccatcactcacagcttgtagcgtcagcattccgcttcccaagatatccttcaaatcagtgattagagaagggatcgctctggaagggtaccgagtgaacgtagattgaatatgattcttgaccagcgaatttagtgactctaacgacgtgctcagaggcgatccgttaaacaaaggcaaaacatgcaagaacaagctcgacagagcggaagtagctggatagagcgcatcgcgtcgttcgcacgaacgtcgtccgatcagtaaacgaccatcttttcgaaaccttggtaagacagaaaggaaaatgccaagaacgaacgatgagatggatgaggatacggctgttctctcccgacactcggatctggcgtcggatgtggatttccgaaactaggcgctgaaggcaagatgggtggtctttcaaacgagttgaatatcgtctttgcatcatacggcaacaacgctgccttgcttatgccatgtgcatggtgatggtggtaactactactgccgttgttgttgttgttgttgttgttgtatgtatgggttgaagaggaaaggacggaaggtgtgatcgatcttttatgagacaacgtagggttcggagattctgggggctctcttcgagtgaatgagtttgttgattgaagaagaggtgaagacggtctggcatgagatcgtattgatgtcggtgatcctggcatggatccagatattggcaccggctgttgttgctgctgttgttgttgttgtggtggaggctggaaccaattcctaatggcattggaagaggctgaagcacccgtctttgaagcaccctcaaccggacctcctgctcctatccctcctgttgttgtcgctgttgctgctcctgctgctccagtaccattcccactcaacgaagcgaatgatctctccctcgccagcttcttcagcccgttcggatcaacagccactccaacccgtccgctgtcaagactgcctctgcctataggtggttccgaagggatgagagatcgagctggtccagatgggcgacgttgatctatcagcgtcgtcagtggtggggagtctggtcgggaaagtgagtttgaccgaggccgactgggtattgatgatgcaggaagaggaggaattttgaagattgttgaatgaaggagagaagaagaaggagaagagacgtgtccaagagaagggctgagtctgcaggtagagctagcctgcttgttgcaagatggcaatggtgaaggattcaattcggtccggttgagacgatggtccgcgaagaatgttttctcttggctgctcacatcacgaaaggagacgacaagtcattttgtttgttcttttcattcgctttctcttcggtctcttttgacatctccgtttcctcagacggttctacaaagatttggaaacgccatggtagtctgagcgcacatgcacgtaagaacaaggagcgaaacaaaacaagaaaggtggaagagacgaaagcagaagaggtggggagaaattcgaaggaatagatatataaagaaacaaaaagaaaagaaaagatattacacgacatacgacatacgatggacacagacacacacatacgacgctagctatcggaagggaaacagtcaagaagaattaggtgtatatacgagagctcacaagaaaaaaaaagcagaagagaagaagacgagaaggaagaaacccggcacaagtagaccaagaagaaggaaagaaggaaagaaacaaatatagatcaaaatataaaattagggaaacatgacaagagatatatttacaaccgaggcaagccccatcatacgtctacacacgcacatgcacatgcacacacatatacactcaatcaaccaaccaacccaccaaacggcaaaagctgtcctccgacttttctcactcctgtcagaacaatcggcaagaacgagaaaaagtagtagcaaggcacgacgacgagaagggaaagccagaaccagatcattcggtcctgcttgaccttccgcctcgaagcagttcgatgaccgtacgccttgatatgatcggcaggtgaggccgctttgagctcataaccaacctggtggcgagaagacagcgtcgacgtcgaaggaccagccaactgggtcgtactcgcgctcgaggacttcacatccttgacgtcgatcaaggccgaaccctcctccgaagattgatacgccggcgggggtgccgaacctgaagacatttcctttagccaggctgagatcgcgtagggcagccaagggtaggcagcagtgtagtgatcccatgcgtgctgctgatcgcccgtcgaagacaccgctttctcatcgatctttcctcgaccagcggtcttttcccgtccacggagtgcaggaaaatgggcgggtagaggcgaagccgggaagaagtttgcagggaaggccaatgtcgacgaaaggtccgccaggtgagcgaccgaaggtagatgagggaatttttgttgaggcaggttcaagtttgccaggttcggcaggttcgggaactttcgtttcacccaagattccataaacggcatccttgacggtggccgagttttagctatcgatggatcgaccccagtcgagtcggcagtttcctgttcgtctccagttaatccgtcagaatctgggaaagtgtcggctgcgactgccgatgctgctactttatccgaactgagggcggcaagctcctggtgatggcggtgttggtgccgatgaacaaagtcaccatcgtctgaactgtcgtttccggtagaagggttatcatcatccagatgtcccgactcatattctccttcgtcatccgatccatcgaccgaggacggatgatctcgatcggccaactgttgtctgctcgctctcgttagcaaatcgacgacatcgatctgatctcgctccctggcaatgtctaccggccgtttaccctccgcagtgacaatctccatatcagcgcctgcctcgatcaacaacctggaacaggcgatccgagcggacaacgcgcctagggccagaggggtatacccgttcttgtcccggacgtccaaatcagatccaagggcgatgagtctggcgacaagcctgtggaaaccaaggaggacggccaaatgaagaagtgagtgtccgtgtctgtttcggagagagatcgagttggcattatcggcattgtcgatctccggagacaagtcgagatcgatcaggtcaaggaatttgagaacagtatcttgaaagttgcctcctccaacggcattcgccgctgcttcccaacgggatgtgatgttctccgatgtagacgcatctcgagcctgctgagttgttattgaggagccagcatgttgctgaccgttgctgctgccggcgttgtgagattgagagggttcgctaccagccgagggggcctgtccgacgatccgcagggcaacgttcttggcatcttcgattcgacctgtcatcttgagtcccacgacctgaagagccagctccattcttttcgataaaaatgacaccgaacaaagtgaagatgtaaaaaaaagaaaaaaaagagtcagcccaaagagcgtcgcggcgataaggttgaaagtcgaaagaaaaagaaaacttacaaagcccgatcagaggtatccaaataagtaaacaactgaagactcatttgactgccccgttcgtcaacttcattctcggactcctttctgaatctgacgacgaccggccctggggccgcactcggcggtaacagacagaccatggccgattctccccagagagttgtcttggaggaagcggtatctccaaacatgcaggtcagaccgtgtacaaagtttgcgcctagaatagtcacctcaattcctccgtgcatcggaccctcgcctggtatgagccgggtgatcatcggtgccggcggaggcggtggtgacaattgaggaagcaaagatgccgagtatggttgaccaagtgatatattcgattcaggtaattgcatttgcatttgctgctgctgctgctgttgttgttgttgttgctgttgcaaagggaagatggaagaagtcccggcagcagaagacgaggacgaaccgatatctggccagaacgggttgggaatcaacgtgttcagtcgactatgatcggacacagagcctgacgatccagaatcgtcaagctcgatcggaccggtgtagagtgtcggcgagggcagatcgattggctgtgcgggtacaatcgacgatcctggtggtgagagtggcaaggtaaacattgattcgaacgacaactgctcctcctctgtcggcgtcgaccacccagcgaccggctcggcgttcaatccaagaccaccattagccgccagaggaggggcgaccggaccatcatagtcaactagcgagtcaaacgcgacttcgaccgacatatcgtggatgccatcctgtccatcgtccggtttgaccgaatggagggaggaagtgtaccgatcaaactcatcttcgacgttcatcggatctacctctaaacggccgacctcagcctgccgaaccatggcgccgacgagctctcctggatcgagcgggacagattctccgaacatcgacaccggcggggtcgtctctgaagacgaagcctcggccgtgcttgtcccggagaaagtctggttgtctgaatggatgtttccgatcctcaggtctcctaatccagagacgtcgacaggcgagtgagcggttgacgatgacagcgtgccgggcctgccgatcggggtcatcaagagttgttggctcgtcgtggttcgcggggtgccataaacggagctcccggccgaagaaggagaaggtcgtctgtcgtacggcgtggccgactttctccggtgatgatgctgatggtgatgaccgatcgactgaaggtcatcttcgtctccatcgacagaggtcgaggccgagatagaatctcgcttgttgggcttcgacggccgacgaacacccctgatcgacgcgttagacgttgggttcgaaggcatgatcatcgcttttggcattctgttcgtccggctcgcgaccggctcggcgttcgaggtggctccaggagttgaagctgctgccgctgccgctttggcggctgctatcgacgaggacgtcgccttgtgatcgtcggtgatcatgattgggggtgttaaaccagaggcaacaatctcattcaagtggtttttgaggatgaatttgatgctgtaaagaaaaaaaatcaaagagacaaagatggatatgattagccaatgatcctcccctgtctctcgtaagaagcaaactctactcacacaaacccaaccttttctcggtgatgtctacaataacaggtgactctggccggcaattgagtttctccttgggaaaagtccaagagagaggcacagttgaagagaacgatcttttgtcgttcgtcctgaccgttcgtcccgtttggggatctgttggcgggcgtggtcgaggtggagtctagctcagagtctgagagtgtcggccgaactctggcagccaattttcgttgtgatcgtttgacctgatgttccaaacaaataaacccggtcagcgtctaggggtaagaaggagaaggcaaggtgaggttgaaggggcaaaaactgaagagaacgcacctctcgagctcgacaattttgacaggcaaacactcggagacctagaccttttccgtttggactcccgctatcggctccctctgtagcacaatacacctcggtatggagatggaggacttgttcttcccttggatcgacatcccgcatcccttctgcatccttcttggaccgtcgcttggtggccacacccttttggagtttaagatgggtgtacgttgagagaaagccgagggtcgcttggttcgctggtgtgctggtcgtttgcggaccggagagtgggaaggatactgagatgttgagcttcacttgtgtctctactctggattttgctccggacagagggattccagaaatctggagtggcaggtttcttgctccgtttggaccgacgtcgacaagggttcgtcttgtttccgggtcgatccggatgctgggtagactcttagcggtcggggtggtgaacagaccagacgagccctgttggggcacgttctgccgggcaaatgacgagacctggcctgggatctgagtcgaggcggaaagagcggtctgtgaggatgtagggaatgaggacgcatgtggttgtctggattgataaggagaaagagggaggcaaggagggagaggaaaggaatgagaaaaaaaaaagggaatttgcatcccccaaccaaattgaagatgagtatatgcaagccatcagattagcggagatatcgatatctctctcgccctcgccctgtgcatatgcattgttatctcttcctctcttttgccgagttccatccatcgtttggtcttcgtgacgaaggaagcaaagaagagagaagcacagagaaagaggaaagacaggcaaagacaaaagcaagggcgaagaaaagaaagcgaaagagagagagaaagaagaggacaagatactaacctgttggttggaccgagtgaaaagtctggactgacagcgttctctctgaggattcgatcttcttcatccgagccggactctctcttgacgagtcctcctacggcggcgaccgacttttcgagtgcttgctttcctgcttggatgccactgacgagtgaaaaggcggcgtaaccatatccgggcggaccaagacgttcatccatgtttgaggagctcgaagaagcctgagaggcaggcgagtttgggttcgcttctgaatctgacgaggaggaaagcatcaagcagtgggttgactttggtgatttcaaagggagggcggagagaggggatgggagtatcccacttgactgtaaagaaacaaagttgtctttcaagagtcccaaagaaaagaagagggatagggaaaaacgaagaaagaaagtggtccaagtggaagttgacggtgtgtccttaggttgggggaacgccagaaggttgtgtatggaaagaaggtctgtgcgttcttgcattgggtcggtacctggggcctgcgcgctggggcggcgg

SEQ ID NO: 83 - DNA, 9006 bp, Xanthophyllomyces dendrorhous
tccctggttacggggtactcgagtgcgcagtaacccggggggggggggttcgcatgtcataggtttttttctaatattctttctccttttgtaatcactgtattgtaaactgtattctagaactgtattgtctctgacaagtctcccttggatgtcgaatccgacccgaacgaagaccggagacgagggaaattaattcctttccggatcatcaccttggattatctcaccttctgttttaccccaacagagaagaagaagagaaagaaagtgtggaaatagcagaacccatattccgacacctcttttttcttctagaacatctttcactctttctttgtctttgtctctggctgtcaagtcatttgacgtcgcaacctaggcagaaaggagtattactaaattacacgaatcacgcatacgcacacatcgccacccacacccagatatataaacacacatacatacactagatgcaacaaaacttgctggataacgcgaacccgatcgttcacgccgcttctggggcgttcccaggaagctcaaagaggaacttgaagaaccgaacggtccgatctctttggacggaagaagcgggggagtccttcaagtcggctgctattgatgacaaagagagtgaagaggagaccgagaatacagaggaggaagaagttgaggacatcgatgaggaagaagtctttggttcgttctttccatcattttcacttgttctatttctatttctatttctgaaacgaccatgcccgggctgactctcaggtttatcggttcaatagatttgctgagatcgatcaccgatccagaacatccacttactttggaacaactggccgttgtctcgaattcacaaatcacattgtcgaagaaccatgtgctcgtcgagtttacgcctacgattcctcattgctcgatggccactctcattggttcgtctagtatctcgtttgcggctgtgtctttgattgcgtctgtgtctgtgtttgaagctgatggcgtgttgatcggatgaaacaaaaacatacacacacgacacacacaatcgttcaaacccgtacaaaataaaatcaggcctctctcttcgagttcgattactgcgatcgttacccgaacgttacaaggtggacatccgggtgaaagaaggaagccatcaatcggaagtagctgtcaacaagcagttgaacgacaaggaacgagtggccgccgctttagaaaactctcatcttttaggcgtcgtcgagggttgtctcagtaccgccggaaggagagggaaggaggtcgtgaccgtttgaaagagggcccaagtaagaattgagagggtctgtgtatttgtaagcatgggataagaatatatataaagagaaaacggactagacttttctctatgctctatctatctgtagtctgtacgggtttcgtttagcgattattcaatgtgaaaagcttcatacgataaggagaagagcgaaattgcgaacataagggcgagaggaggaggacatggttagacagagagaagcaaggagggagtgtgtgtgaacgtgaatgtgaatgtgaatgtgaatgtgaatgggagagggaaagaacaaggcacaaagagcgagagcgcatggaagagatagagaacagtttgctatggaaggaaaaaaagaagaaagacacacacagacatagagtgacgcaacggagcgatgtggtcggcaagtatcatacagcatgacatagcactaacacaacatgagtaaaatatgaccacaacctttctactacgcggcctctgatacatcagactgacacagcagtgtcgtaatacaaacacacccaggcaaataaacaacgcatacatataaagagctcgacatattctgccctgacgtctctggggtggccgccggagagatggatgagttacgcgtgattgattcgtcactttccaacagcacagcatcgtgtgtaaccctagatcgaccaatcagataaataaggccggctgctgcgcctccgaacacgccggccttgtggatttcaatttatttttatttccttattttcttattttttttcttctcttcctctgctcattaaccgacgaggtagacctcagacccaatcctcaaaaggcaacacactcgttcattctcgtataccaaacacacatacacacacccgttcattacactcactcacactctttgtaggacaaaggaaaaaaaaacagacggaaaaaaaggagaatttataacacaaagatcgatcgtaagagttgtaatccttcttgaacgttccctcaagctctcgtgcttctcttcttccgccaccatccggccggctttgttttctcttttggtctcctccccggaaaattccaatcgaaccacttttcttctgcctcacctttagccactttcatccgttcttctctatccaatatcataccggcctcgacctcgttgattcagcctcacactctttcattcaacgccaccactctgcctctctgtttgtcgttgacaatatatcctggacgttcgctctcttttgataaaaacacccagactcaccttcaagctccctccgacacagccctggctttactaggtgagcgtttttctttggtcatcaaccgtttgtcgtactacatcatgcccatacacacatccatccgagtatatactatataggctgaataaaagaaaatcgaaagctcattcttttctttctctcatctttgtaccagtgctcttcgtcccttcgtcccttcgtcccttcgtcccttttcctttcagccaccgatggaatatattctagacgcagcagacgactacttgtttgacaaggcgtactctgcccttctcccggcttcgcgcttcgtgccttctcttctccagtcggccaaccacacagtggcttcggtaccgacttctccctgggtgtcccagctgttgtcgtatttcccccacccaccactcacctcgtccacagcggccgagctcgcctcggcctccatctggcctagagactacatcctccggcagacgctctcactctccatcatgaccatggtcggcatccatctgatgtacttgaccgttgcggccgcatcttactactttatcttcaaccgagagatggagaaccatcccaggttcctcgatggccaggtcggtaaagagatcagatgctccctcaaggcgttccccgcgttgaccgcgatgaccgtcccttggttcgtcggcgaggtcagaggtcacggaaggtattacgaccggatagatgactacggttggggatacgctcttgcgtctattccaatgttcttgctcttcactgattactgtatctactggtgagctctgtcccaggtttcttgttcccgctctcccattcgttggcttatcccctggaccatctttctctctagggttcaccgactggagcaccacccatctatctacaagcacctccacaagcttcatcacaaatggatcagtatgtttctcctcttctttttctttcttcatgctcggtcttccctgcagggcccaatctgatcatcagttgctcggttcattacagttcccactccattcgcctcccacgcgttccacccggttgacgggtatctccaatctcttccttaccatatctttcccatgatcttccctcttcacaagaaacgtaagcctttgtttctgtcttccgcttcagccagacgctttctctgtattcgtgactgatcgtcgtgtgaaaaaatactctacagtctttttgattttgttctcgtttgtcaacctctggagcattctcgttcgtcttcccactttcgtagcgtcatcatcagcacgtcgttgtgtgctcacctagaatgtgtatggtatattgtgtttcctctcttcctcttggccttccttagattcacgattcggatatgatcaccggtcacccactagaaaagatcattaacggaccggcccatcacaccttgcaccacttgtatttcaccgtcaattacggacaggtttgttctccccttttcttcgtcctggatggctcttgctgacgtatgcacatcctctcctctacctgtgtgccttgtgctccagtacttcacttgggccgacaggacacatctgtcttacagacagccggacgcgtcgttggatccgatgctacaggtaaagatgcagcagaagaaggaatataaaaagtctcagtaaatgaaaacaaccaaaacggataccgatttctttctcttcctcctctggtgctccttccttgctgttttttttctgtgttttttctttctctttcattctctcgctctcggtttcctttgggtctgttccttgctgctttcttttcgttcatctctttctacttgtgtgtttcttgatcacctttgttctcctataatgataaccccaacccaccccatctttgtgcgcgttccttgtctgctgctctctcgctaaatcccatcaccacctcgtttcctcatccgccccggcaattacttcttctttgtttttaccgtttcccaacatctaatctagaagctcaaaaaagagaaacaacgtctagcatacaagctggactggctgtcccgtatctttgtctcgtgtttcttttcttcctcctttcccattgtctcttttcttgcttgccaatcgtattgatgtccatctatggttatatatcttgtctctccttttctttcccacaacgagtaccacacgcttagggagacgaatagagacgttcgatacacagtctaagggaatgagatggcgagacaaagggaaagaaaaagaagaaggtgatctaacgaaattgtatatcggtcgaatatcaaatcagatcgattgcctttttcttgtttttctttgctcttctgttttttttttctcctttaattattcgaatttcctttttcttttcttttacctttctacctcttactgtttctctcctctctctttccttctgctttccgctctcttcagcccttctctcttctctcttttgtagtttccgtctcgaatcaattcggcccggtttggtttgattcgtaccgatcataatcttggcttggagccgcaaaactaaggacggaggtaacaccgagttaggtccgaatttaccaactctaccgagccgagccgaggaggaggagcggaaggaccagattgggcatcaaacgctaagcccaagaccggaattcagacctgcaccaagcagaaaagccgatctttgattcaaataccaacataactggtagagtatcgggcgaccgtaaggaaggaaagtccagaaaacgaaaaaaaggaagagaaaagaaagatgtcgactctgcagccgcctatcaggttgaactcgaatccgagtacgatttcgatttcgactttgggttcgggttcgaggtcgggcgtaccgtccaacgcaaagttcaagagtgagctcacctattgcttctgattgcttttctcctcgctctctctcttctttctatcgtctgtgtgtttctctgctctcgtgtatatgtgttgcgtccacctatcctggtctggcgagtttaaaagtcttgacggggttcgccaagtgggtgatgtaccgctgttgtgatcatgtggtggtcgtgttggattctggactctcttcgtcaacgtctctcaggaaagaaccactcgtgttgcccttgaggttttaaccggatagagattcgatgattgaggcttgaacctaggaaaacgagactgactcatccttcccttcgttttcttgcctctttctcttgtcttctctttttcgctgccttgccattgtcactgacgtcgccatcgccattgccttgacgttcgttcgtttccactttccttttggatcctggggtgatagccgcaccatgccagaactttgaaaagaacgggtattgtaaatatgaggatagatgcatatttcttcatcccggtatgtctccccctcttcctttttctctatcctcttctttccgtcccttctttccagtctggtcctttttctctttttcctcgttctattcttttgcatcttggctttgtcttgtatctgacgaggttaatcgggctggacgaacagatccgactatgccaacgccgatctcgatgccgatgttgatgtccatgtcttcagctgcgactgcttcaatatggtatgacccagacactgatcctgtatgtatcttctcgaccttctttccccttgttattattctcccttgaaacactccatgtcttctgcacccacgcgctcatcacttgccacgcatcaaatctctagttcaaccctacaaacgacccggtctctcctgtatacccacttcctccaggtcgatcccgaaacgatgggtccccgccttctcctgtaggttctcctatcgggcgcgatcattctaacggacatgggcatggaaacggacacggaaatggccatgcaaacgggagcgcaaaccaccacaagagcgggaacgcacatattaatgggaacggagcaccgaccaacggatcctcgggcttcaacagatcagcctctaagcaccgtccgttcttttacggaccgtcagactatccccagctccctctatccaacggcagcaacagtggtagccatgtcaacaacaacaatctcaataataataataataataataacagtaatggccatcattcaaagagaggaggatcatcgtcgtcaaccaagcgcgatggcttgcagggtcacggtaatggtaatgggaggcttggcgaacaaggtttcgtggaagctggttcgacagctgcacacgaccaggatcgatccgcttacaggagtaagctttgtggattctttgctactggtttttgtcctaacgggaatcgatgcacctagtaagttcttcctctgatttcgacgtattcaataccacttctcgtcgaagaaaacttgtgttagatattgacggtgggtgactgtgtgttgttgccatctagcttccacccggatcaccctttgacggctgctctgggcaaaaccgtgtcgtcgacttccacctcctcttctggtcactcatcctcctctccttccatcgtcaccagcaccgtgacgacaagcaataagggacctatccgatcttactctaaccaatcggcgcacacggacttgtcggcttcatcccgattctcatcttcgatatccaacggatctcctattgactctcaccatcaaacctaccctcactctcacgcccggacccaggctcaagcccatgaacgacagaggatggacgatctcgattcgttggacgaatatgagtatgctttcgattacagtcttacaggactcgggccagaagatttagatcttccgttggacggaccgttcgatcagagctatccaattcaggccggagtcgagtacgggagggacggtcatcctcttcacaagagtttgtctctttctcttcttcagcagatgccccatcttagagtcctttctttctattattgttagtggatattgatcgggtttcgcttggcaattcggtttatagcccgaccatgtaggtactactctcagccgagcggatgcagcaaaggcgacagatgttcgttcagacacaccgaagaagcagccgctctagctaaatcgggtcatgtctcgcttactgcgaaagacagacgaatggctaaggaagctgctttggaggagaaacaccgactttggaggagtacgttactttcttgttttcctactttcgcgttcgtcggcgcctttcatacaatttaacgtcttccttctcgcgatttgaatcctgtctggtctctagccgaaccatgtggtatgtttaccctcttgagataggctttcttctttgtctcttgaattaacgattgattgatgtctggtgtgattagcctatttccaacggggttcctgttctcgtggcgagagtatgtcgtttctctattttctatctcattcatgcataaccttcttccggttaaagatcagaatacaagaactgacaaaccaaccccgacctctcactgaaaacgaactaccagcctgcaactttcttcatgttcggtcgacaacgaatcaaccgttaggtcggaaaccttgtcggatcttgctctccaacgggtattgccggtttggtagtaattgccggtacagacacgatctctcgaacgttgatttcggaggatctttccctgtcgaggtagatgcgaatgaaggaggtggggaagatgatgtgaatccttcgaaagagaggaaggaggatgatgcggaggctggatcggagaaccagcgtcgtacacgacgacaacaacaacagcagcaaacaaagcaaggagaggaggaggaagggttggaggatgaggaggatgaggaggacgaagaagaattagaaatcgttctagttgcggatgatggatccgagggaaaatcatggtctgttgaagaattcgaccaaaaagttagtccgagcgagatcttctctatcacatctttcataccagagagccgttggtcggagatctgacatcccgttcggttctttctctttcccctcgtccattctgttcgtctgtgtgtaggagctcggagacacattcgacttgttgtcgatctagtcatctaaattcacgacagacatcttcatcaagccccgtcttgtcttatttcgggtcaataatcgcttcaattcaaccacatctatccatttgctcgcgactcttctcttcttcttgtccatcttgcattctgaaaacatatgtcctttttgaacagaacagaaataaacaactcttcttcctcatcctatcttttcatcttttcatctcaaaataaataataaaataaataaatacaaaacaaaaaagacccatcaatatatcgtttttttttcttcctacaaaaactaaaaaaaatcaagaacaaaagagttatgtttctccaatcgtttataat

SEQ ID NO: 84 - DNA, 2330 bp, Xanthophyllomyces dendrorhous
atcatatatatgcacatatacgtcccatcttctactcccattccgaatattcctactactctcaagtcctgcattcgctcgagaaaacaaatgttcatccagtccaaggtagaggacaaaaaacagaaatgaggatcgataggagaatgattactactcgtctggtatcgtccgccaagaatgtaagtacagctcgcacgctcaccgggccggagaagcggaattcgaacattcgactttgtgattcatccccgttcctccgaacccatctcgtcttcatcccttctcttctcgtttccttcttacccttctttgttgagcaacgataataataataacaacaacaaaacacacaacttgcgtgaaatgtcggacgcggtacagctcattacagatcacatcatagcacagtatgccattcacaggcaggcgcatttgaaggaggaaactattcctcctttgatcgttggacttcaaggtcctcagggttcaggtaagttaccttcctctcttctttcctcctctcccttggttgggactgaaattgcacctctccctcttcatgtacgtacgccatacttgtggaattaaaaggaaagacatacctcacctctcttgtcgatgctcaactcaaaggaaggccagacaaaccaagcgtagtcacgttttcactggatgatctttatctcactcatgccggcctggtggaagtagctcagaaacaccctggaaatcctatcttacaaggtcgaggtcttcctgggacacatgatattggtgagatttctttattatatcgcccttgattcttcatgctcatgctcaatctctgaatcggttggattggacccttgctcgaacactgtagaactcgctcaacagatctttacctcccttctttcttccggtagaccgtcccggcctgaacttcctacacctcagaacatgactttgcttcctcggttcctcaaatcgcttcaatcaggccaaggtgatcgattgcctcctcaacaaagtacacttgtccaagcgcctgtcgatatcgttttgttcgaaggttggtgtctcggcttccgacccttaggccctcaaggactagatgaggcattcgcaagtagcgttcaagggaggttcagagatgtaggaaaagacaatctaggggctgtcgagacagaattgggacgtatggtagacgggctatggggcgttttgaattgtttcgtacaggtaacgagatgtctcttgtacttgtgtctcctcagcctgtcggtcgatgtgtcgactcttagggatttgtgtgctgatcgtttctcttctcgttttcggttttcaactcttggcttgacctccagctgagcgctccgtcactagagacaatctatacatggcgtcaagtgagtctcttttgttttcggttacgttttttcctctcccttcgatccactctagacatatcgctcatctttcctttctttcgtagcaacaagaagttgaccttcaatctcgctccgccgaccgggtaatgagcccagaagaagtcatccgttttgtagatcggtatatgccagcgtacgagctttggtcggctggcgttcgagccaatggtacgacttgggccggcaaaggcttgggaattgttcttggtcagcagagagaggtcgtaggtatcgatacattttgagcctgctgatttcgagatgaatgtactcgagcggacgctcgtagatagttggacttcactttgcttacacaacgagcttttgtatggtatgatgagtagagagatagatagatcgatcgatcgttatgtcgttctatcatcagtcaggttcagatctgccggttagtatgaagatcagtcgcaggaagtcaagatccaaaacaagacgacgtcgcaagactgggagaaagatctaaggaccgaaaaagaaaaagaacgagaatggaccaccttgggtcaaaagtctcatagaagttgatcgtgcggcgttgggccaagcatagagagaaatggatctcatgagggcgaagacgacggaatgaggaaagccagccatggctgatgaggtccgtcaatctctcccatctgattctcgtttcggacagctattctgatccttctctcgttagtacacacacacgccgaatacctttgcctttcttttctgttctctgttcggtttgggaaaagaaagctcgaacgagggggattgtgaaagaagcatgaacctaaataaaacacaaccggactatccttctcctctctctttctccatcaccccttcttcctgttcctccttagtcacgaccaaaagaacctgatataagtc

SEQ ID NO: 85 - DNA, 11182 bp, Xanthophyllomyces dendrorhous
gtttaagccttgacagcagcctccaaaacagtcaacacatcgacctcgacctgagcctcggccttagcgtactccgaggtagtagacgacaaggtctgcttggcagcggcaagggaagacttgacggcctggagatggaaataatcgagtgaaagatggatgccgagagagtaggttcagcgagtgtgtcggtcggaagtgacaagaaagggtgaacaaagatagaaaatccgagtgatgtgagatggatgggtattggtcgaaattcaggtcggaaaaaaacaaaagatggaataacattcgagagcgaaggaatgacagaacaagtcaatctcgaagcctcatgaaagccgttcacagctcatgataatgtaaaatggaaagaaaacgaacggaagcatcaaaatcggcaatgtcgtaagcctcaacagcgttgatggtaagctcgttgttggggtgaacggaggcgaacccagaggagactgttcgcgacaaagcaaaaggagaaccaatcggtcaggatttacatcagaaacaaatctctatatgattgaagcaaatatcatccaaaacggaaggaaagaaaaagcttgataggaatagctgaatgccttctccagcttttttcttccctccgctttcgtgattgcatcgttcatacttgatcgagcggagacgcaagcatcgaacgtgataggatggaaaacacagaatgtacgtactgaaccacttcttggagccgttagcaccctcaatgacctcgaccaatccgggagtaagagcctcaagggtagggacgtgtccggaaaggatgcccatgttacccgacgaggcggggatgttgacctgggtgacctcggaggaggagaacaaggtcttggaagagaaagcgattagaagaggtataccaaggagagtggtgaacacaaaagaaatagatttcagcatgagaacaacgatcggaatagaaacagactgatggcggagcgaatgtagctgccataattgaactcgtgtagatggatgtatagatctggcttttttaaaaaaaagaaagagaagaaaagaagagaaaaatctctctagaactaacctggtggggaaggaccaaagagagcttgagcttgctagcggtggcaggagcagcctcagcgtaagatcgcttgaggaggggaagagcagctcgggtgacgggtcgaagggcgaacatgataatggatgggatggagtgagtgtggatggaagagagaagggaaaaagtaggagaaaaaaaaagagcgtaggacggagaatgattagagtaaagtgattagagaattttgtagttcgactaggaaaaaaagatactatgaattgtatagtcaagactgtaatgacatttgccaagtttgtagtatccccaaacttgtagtcttttcgtagtcattctcacagattttgtagtcattctgtagtcgttttgaagtacatttgtagtacatttgtagcatatttgtaatctatcttgtagtatttttcgtagtcttcgaaagaatcaccacaaactcatcatccatccactcattcatccaccgctctcccatggtaccatggatccgacatacaactgccaaagctgccgtcaagttagtttggtagcctgttgagcttgaagtttctctatactgaaaccatacgttctgttcgtcacccatctagcctctgcagctcgactcatccatatccaatatccaacagtcccagttcgagctcatctcaggtacgtttcactcatctgacacaagattctgtcaagatctcaacccttatttgttgcaatctggtctcccttgatacatccgtcctcagcttctctgcccgctcagtcgactcctccttcgtcacaactctccctccaggaccgaatcgccaaactaaatgccccagatctgtccaagaaggcttatctccagacggtgtcaactaccgatacctcatcctccaatcaacctctttcatcgtcatcgtctcgtcaacctaaaggcccagccgaatcgttcatcgttctcaatggcaacgcatcctttccaccagagttatctccctcggtccctgctccgagtgtaacaaaaccctctggaaaccgacaaccagtcaacaatcctgcagaaaaaccgacgaaacaggctctgatcaccaccttactagaattggtgtcgtctagagcagacaccgatcatccagtgtgtacggaatgtgcaagactccttcaagaagttctcgctcagcgtctagaagaggtcggattcgaacgagacaattatattgctttcgaaaggcaggtcaaagagaaacaaacgggcgtaggcagaaagaccaaggatgaagttgacgcgctcaggagagagcttgatgaggctagttctcgtctacatcggcttgaaacttcctggcatatattcgtagatgctgctgacacattgatacactggcatatctgatagatcacagcggaggagaacgaagcgcacgcgacgcttctcgctctcgaagctgagactcaagctttacaaacagacctatcgaccctgcaggccagatcggccgcgctcttgtctcaggaactcgagttccatggctcccatgcagcacttgccgacgaaaaggatcacctggtatcagtcgccactctggtccaatctcagtatgcttcggatctgaaacatctgcagagactcgaggcgaccaatgtgtacagtgatgtctttagtatcagcgtcgtcaaaggagaagccggaagtcggatcggtagtatcaacggactgagattaggcaaaggcggaggtcccacaccggtgcgtacactctcacgactgttcgaagcatttggatagaaaatcattctgatttagttctgaaacttgactccaaacaggtcgattggccagaaatcaatgctgcatggggactagcattgttttgtctacatagcttggccaggaaagcaaactttcaattccaaacgtatgacatcctcgcgactttctatccaccaaatcaacccatcagtgaacttggctgacccattcatctgatgaacgcaggtaccgactcgtgccattggggtcaacatcaagaatcgaagagttggacggcaagaacgtttacgaattgtaagtcataagtttctagcttgccttgccctctggtaagattgctgtgcttacgaattgatatttcctcatctcttcctggtgtatatcatgctctcggtcctcgaagatatggctcttccgatctagcgctctcccgttttcttcagaacaggagatacgaaaacggcatggtggctttcctcgattgtctccggcagttcttagaattcgctcggaaacgagactctgagcgtgagaccgttcgctggggacaggaaaagtcatgggactttggtcgttatcagtttgtccaatttaatcctgctttctctgccttcgttcttcctacttggctccaagaaagcatagactgacgattgtcgtcttctctttttgcagcatcgtcaaggaaaagattggagagccgtcacgagaagtctcgattcgatctggctacgttccgtcttcgctatctgtactcagcccaggactaggggatgatagttggacgagggcttgtcggtatacgcttttgacgcttcatcgtttgatcggatggacaacgagagatggtgcttagagcaatgagtccttcatactttcctgatttaaagaaggaaagtggtcttttctctcctctttttctgcttgttgtaagggtccttttatggaccatgtaccatctagactatcaatgtatcaccacagatactatttgctgttacaaaagaatacacaacgagacacctcgatgagggaaaggcgtttgtttgccctttcgtgtagcaccgcttctgaacccttcgaagcacgtgtctcaacatcatctcggtcatcatcgcacttaaccttgatgcccaaactggtcttgcattcagaaccttgaaggaaccatacacatcctgattcatcacatcatatctcatcacgagagagtcatggaccagcctgctcttccatattcttcggtggaatcttctttgactggagaggggacaggatctactatcgaggcaccgggacatgccgatcatgttccttctgatgaagaatcacaagaagagtcagaggacgacgacgacgaagaagaaggagaagaagaagaagaagaagaagaagaagaagaagatagagatgaagtcgaggagaaagaaaaagaggagaacgatgatgatagtgattcgaacctatcagcccgagatgaagctgagcgatcggaccagaaggctgaacagaccatcgacgtgactgaagaagagagcagtgaggaagacgaagattatgaggatgaagaggatgaagagatatctgacgacgaagatgaggaagaggaagaaccgtatgtatactcttacagaactgtttgccgattcttggttcaagatcacaactgacgtacttcgagttatctccggttgcttgttatccacagagtcctcaagtattctaggctggaaccggcagtgtccgagattttggctaaggacaaagcatcggtgatcgcttcttcctcacggattatcgtcagtagctctatttctttttcatgtcatatcaaagacacctcatttacttctgttttcttctggtcgcaaccaaatcctcactgggtgggtttaatcaacgcaggcggtaggaacccatgcaggaatggtccatattctgtcgcccacgacgggccagaagatatcttcttatagggctcatacggctagcgtgatggatatcgtgatctcggacgatggaagtgaattcataggaacgtgtagtatggatggtaggtctagcttcttcttcatatccttcccccgttgtctatggcttgcaattgatcaatcgatcctttaattgcatctcgtatcgatgacacaggcaaagtcgtaatcaattcgctcttaactcctgaaagatacattcaccagtttcctcgtccactccgctcactcgcgctagagccgttcttcgccaaacgaagctccaaagcattcatctgcggtggaatggcaggcacgctatctttcatggaaaaagcatggtccttggtaggtggtttgatgggtggtctaggaggtggagggggtacaggaggaggaaatcacaaggagacaatcttacacgagggtgaaggaccaatttgggcagtcaagtgggcaaatagcggattagttgcttgggccaatgatctggttcgtcgacatggcctccctcttatatccacgttgatgaactatatgcgccagagctatcatacaacccactgatattcatcgtcttctcgatcacagggcgtcaagatctacgacacatcttctgaaaaactcttaacgtacattgatcgaccagcgaactcgcctcgggcagatctttataaaccaactcttcactttgttgaaccggcctcagcaacatctttcgagcccatcatgctcatcatcggctgggccgactatataaagcttgttcgagtccgttctcgaatttcccattctgtcccttcgtccttgtcatcttctggccgaccggctagtatccatagatctgcgttgggaggaagttcaatgccaggcgtgataggtgctcagaaagaaggcttcagcgtggagatcaaatcgatcttccagctggattgccacatctcctcattaattcctttcgagacgtccgaaaaacccacatcatcaggcctctcttttcttgtgttggcatttttaccaccttcggattcaacacgcaaatcatcatcatcgatatcagatgaaaatgacgatgatgatgacgaggataacgcctcaagtccgatgttcagacgggtaccatcgctacgtccggagttgagaatcatctcggggcaaggagaagaactgtcgtcggacgcgttgacattagcgggttacgaacaatggagctgtaacgattattggttggttcccactgttctcgcccctggtagcccaccctcttcgatatccgccggacgatcttcaaatggcgcacaagaaaaggccaccaagaagccagaggttggatatgtcgtactatcaccaaaggatattgtggtggccagaaaaaggggagtaaaggaccatatagcttggctggtggagagaaaacgttaccaggaggcattggaccatgtgggaaagctgactgatgaagagagaggagcgaaggatgaacatggagagattagcgtgagaggcatcggagaaatgttccttagaagcttgatggaaagtggtgagtcttagttgctagtttgtcaaaaaatgttctccttcaagagtactaagctgaccaaacgtttgcgtgatccaatagccgaatacgaaaaggcagcttcattatgtccaagggtattggatcaagacaagaaagcatgggaagattggatctttctgtttgcccaaaaacatcaattgcaggtaagtgttgattgatcagagcacaagctgaaggttttattaattaattatgtgtggtttccaacaacataaggttatcattccttacgttccaacgacgagaccacagctgagtgatatggtgtacgagatgatgtttgcccatatgctcactcatgataagccggtgagtttctttgcgtattaacggacggaccaagattgtacaacgaagaccaaggttactgatgtgctgttcgcgccgaatccaatagtcattattacgtatcatcaaaacttggccttcatcaacttaccgagtgccgaccgtgatagacgccatcgaaggccttttggctgattcatctggagaggctatcttgatggagtgtttagctgagttgtgagtcttcaatccaattctttctcgtgtatctgctctttgtgttttgtgctgataatctcattctctctcgccgggtgtatgaatagatacctgatcaacggccagcctgctaaagcactcccatactttattcgactgcgaaggtcaaacgtctttgatctgattagacagtacgacctgttcgaggcggtgaaagatcaagcgctcttattggtcgagttcgattctgagcttatctcgaagccaaatggtccatacaatgttgatgaaggtggcaggaaaacaaaatcgacaatcgtgtcgagtaaagagaaaggaacggcaaaacatggcaaagctataaaactattggtggatcactgtcattcaatccctgtaagtacactgtggaactccttttgtctgtaggttgtagatcagctgatgaatctgacctccttgttttcttcttctgggtattttttgtccttcctttagatcgcaagagttttcagtcagctctcggaacgaccggagttcctgtacatgtacctcgactcattgtttgagaaggatccatacttggttttggactatggagacgagcatgtgcgttatctctgtcggtgctgatgatcggttgaacgttttcagacggacagtactgatagttgtagaatcggtttgtaactttaacaggtcgaattatgtgccgactatgatgcgccacggcttatggaccttcttcggtcaagtgtagactacagtcttgagaaggtacgtcgtccgtctcttctttattcatgaccatacgctgtacgcgttatccatacgttactgaacaatccgtctttctcgggtgtccgcaacgttgatgaaactttaggcctactatatatgtaaagcaaaagactttgtacctgagatggttttccttttaggccgcatgggtaacaacaaagatgcgttgatgctgattatcgagcgactgaatgatgtccaacgggttggttcacgctcatagttccacgcaaacagtcgtgattactgactttgttctcctaaatgttgcatacaggccattgagtttgcgagagagcagaacgatgaagacttgtgggaggatcttttgcattattctgagaacaaaccaggtgaagctcagtctttcgtgccctttcccttccctcatttgcttggtcagacatctcttctaaacactcttatttctacaaacatctctggaccaaacgctagctttcatccgagttcttttgcagaacgtaggagcagatatagatccgatcatgttgatcagacggatcaagaatgggctagagattcctgggttgaaagacgcgctcatcaaaattctacaggatttccaattacaggtgagctacgcatctcgttgtatacgtttaatctttgctacgtatgttgaggctcatgttctgattgaattcttgctatcagacaaccttactagaaaactgtcagacgattctcaattcggattgcaacgccgttgcggtcaagctttataaagcccggacgagaggacattatcggacgggtacgtgttcatctttgctatagcctaggcgttcgtgaaacctttctcaatctaacctccacttgggcattgggtgatcgatatgtcgaacaacgacctacaaaaagaacttaccactggcccccaatacacgtttgatgggtgatgtttgactgcctggggaatatgaatttgaaatatacatgataccttatctacctattgataatagattaatgactccctacggacggacagtccgaacgatttcctattttctctctcaccttcgctttccttctttctaatcatcacattcacaccaatcgtctcgcaaaagcaatgcaatatctatcgaccagaggaggacaggaaagactttcgttcgaggaggtgaggatttttcacatgcgttccttctctcagttgcttatagaagcatccccagcatcagggtggccatctggagtttaggctgaatgcattccgtgtttcttctttcttcataattcggtgctttttcactggaacaatgcaacctcttcaggccgttttgaccggtcttgctcctaatgtaagccttcgcttgctcttgttccttcttttcttgatctgttcaatgagtctcgactcacccacccgtcaattcatcacagggcggtctttacatcccttcccaaatcccttctcttcctgcagactgggagactagctggcgtggtctttctttctccgaactttctcacaaggttctctctctcttcattcccgagtctgagatcccctctgatgacctcaagaccctcgttgatacttcgtacgggaccttccgacacccagagacgacccctctacaccagatcgcctccaacgaatacattctcgagctcttccacgggccgactttcgcgttcaaagacgtcgccttgcagttcttgggaaacttgtttgagtacttcttgaagaggagaaacgcggccaagaaggagggtgagcagaaggagaagttgaccatcgttggtgctaccagtggagacactggaaggtgagttcatgacatgatcgatatgtatattcgcaagctcgatcggctacatgaattgatgtgtggatttgatttttttttcactgtcgacagtgctgccatctatggagtccgaggaaaggaggatatctccattttcatgctcttccccaagggacgagtatctcccatccaggaggctcagatgacatctgtcttggactctaacgttcactgtatcgccgtcgaaggtactttcgacgactgccaagtaagcgttcttaatacattatcatttatttatccaaaaacaacagtcacgttggattatggctaatggaccgcgtctttctggatgattttcgaatcaggataccgtcaagtctctcttctctgaccccaagttcaactcgacacatcggttgggcgctgtgaattctatcaactgggcccgaattctcgcccagatcgtttactacttccatgcctacctttctcttcctccctcgtctcctcaggtccagtttgtcgttcccactggtaacttcggagatatcctcgccggatactacgctaagcgacttggtctgcccatggccaagttggtggtcgccaccaatgagaatgacattcttgctcgattctggaagaccgggcgatacgagaaggtcgactcggcccctgagaacggagtggccaaatcggaaggaggagtcaaggagaccctctccccggctatggacatcatggtgtcttcgaactttgagcgactactctggtacctagctctggaggctaactacgacaagggagtcgagggagcgtccgctctgttgaagggttggatggatcagcttaagtcgaccggtcgagtcgatgtgggtcaaagtgtgctcgctttggccaagcgagactttgacgctcagagggtttcggatgaacaggtttgttttccaacgaacacgagacttatcagggatacgcgtctttttctctccgatgggaataatattaactcatccgttcgttctctgtcgtgtattctgttctactatagacgactgcaaccatccagcagtactattcgaactccaagccttacgtggctgatccgcacactgctgttggtttgaccgttacccaatctcttcttccctcttcgtacgttctttcctttctttttttttaaacccggcggaatcgaacgtttctttctcatcgcgcttatcactttgaatcccttgttgtttttcttctgattgacaggccggccgatcagatcttcatcactctctcaacggctcaccccgccaagttcctctccgccgttcagcaagctcttccttctctcgatttcgatgctaaggtgatgcccgtcgaactccgggggattgaggacaaggagcgaaggttgatccacgttcacgatggagaagaaggtgtccgacgggtcgtcgagcggttcgcggtcaacggaaaagagatcggagtggaggtcggagagggcgaggccgacttgccggtcgttgctgctgcttaagagtggaccaacgagtccaaagatatagatttttttaaaaaagagtgtaaagaaagagaaaaagtgttgttgcatgaatttctgttctctgaaggattctttacgatgcatgtccccatcaagtccaaacacacacacacaca

SEQ ID NO: 86 - DNA, 33952 bp, Xanthophyllomyces dendrorhous
acacacacacacacacacacacacacccctgaacaaggttgaagaggtcaaaatttcattttgtttggagaataatagtacaacaatgtgaagtaagaaaagcaaggtagatagctaggtcacaagtttggagttttcccattcgttcttttcggattaagaggaaaacccagattggaagagagtttgaaggaagaccaatagagtcaaggtgggggtagcatgaagagatatgaagattgagctgattcagaaaaatatgaggatgaaaagactagagaggaaaagaaaaagataagaatgatagagagaagatagggatatagagcgagaattttttcaagttgctttgctcaagacaacatggttgaacagaagtaaatggatatatgtgtctggaaagaggaatggcaggcgatgaaataaaggcgtgcatgatgggcgattagaaaaggagacgaaagagaatgaggtgaaaaggaagaggggaaatatgttgaaaacatagtaaagaaatattaaggatgtggatgataaaaagggaccagccttcaatgagaggaagaaagggaaggtgttcggcctgctgcataacctcccaacttgagaaaacgttgtgaggagagagagaaggtcagatgagaagcaaagaccttggacaagtatttctaagcctcgatcgcgccttctcttctacctaaaactcccaaattctgtcctgctctctttcgaactctacgaagagtaatatttcgaaaatttcgtcagaaggcgcgtgtttgagaagtagaactaagaagaaaaggttgtatctacctgcttgcaaagttcttggaacccagctcatcgggtacatgtggtggtcctctcggctgtcggatcaccaccaccggtcccaatgaaacctgtccggcacctgcaactggccccccattctcgttcaaacccaaccgttgttcaatcaagtcaggcaccgaaggttggggagagggagagagaccgtctctcataagtgaaagaatctgttgatctcgtcgttgttgttgctgttgttgaagatggatttgctgttgttgttgttgctgctgcatatgaagatgttgaagatgttgttgttgttgttgctgctgagagttgaacccagcaaaggatgagacgccgtttgctccacctcctaacatccctgagtggtgaccaccggaaccgttgatcgaggggccacctgtgtttgcatgaagaggtgagggtgataatctgggagaaacagatgttggccttcctgttccgatgggtcctgactcccgctcaagcccgaaaccgaaaccaaagggagcacctcccgctccgttgttaactgacgagggaggtggaagaggaggagcactgcctccaccaccaccacccgcagatgacctcgcacgcaggttggcttgaatttgaagttgagcagcctggcgttgctcataagcagaggcaagttgttgaggtgtctgatactgatctctttgcaaccctcgatccgcttgagcgtatggatcaaaggcagtcactcgttgttggtgggcttgggcggaggaagggtaggcatttgaggtttgaggttgatacatcttaggagcctgatgctgaggcgtgatcgattgaccggaaagaagagcagctttttgggcctgggccacaagctgctgttgaagtttttgagtgtgctgtgagaacggaaccatcgatcagcattagcgtgtctggagcgagcatcttcgttgatcaagagaggaaagggaaaagactgacttgaagtctgagcaattgctccatccgagcttcaacctctctctggtgaatttgctgttgcatttgttgttgggccagcgcctgcagcaactggagttcagccagatttcgagtccccgctccgctaccgttcatctgtgctcccccagaattcatctggagcgtagcccagagaagatccgattgctgttgctgttgctgaagagtgttctggccagccgcgggctcggttctgttacctcttgaaggttgagtctggatgtttcggttgttgaaaccatcagcccctccttgcttgtttccaaatcctgcggtaagccgtccaccctgattggcgttttggaatgattgctgctgggcttgtctattagcaaatccgaacccggaagcatcaattcctgaagatccaggtctatgatctcctccagcgttcaaagcggccattttggcaaccatctcttcatcttcttcatcgtcatcaaacgatgggccgagtgtatgatcagatgatgagtaccgttgatttcgctgtgggacatggttgggaagtttggctccacccaaggtgtggtttccattgtggttagagttgttggaattagaaagaggaccattagaatgagaggttgaaggcactcggagttgtgcagagggagaacctgaagcagtacggaggttggcgaggtagaaagatcggggcggacctgccccgagggcattattgctaacgtcagaattattgttcatggagaccgggtaagacatgatcagatggataagcttcgttggttggtttaagatttgatgaaggacgaataaattcgattgccgtttgttatcgctgatgacgatggattgaagtgtttgtgagaatttgaggcaagaaaaattcactagtgtctacagtctgttgatagaggtcaagcatctgcgtgagtccttctgtgttctcttggatgatcttaatcatctaaggaggaccatcgacatgtgctactcacgtgctgcaagagggtcgatcaagaggaaatatatattcacgaaacgaatcacttttgggaatgtagattggacgaaggcaatgtcagttatgttccatctgaatgtgactctccttcctgcgatagacggaacacgacttcaagactgataggagagaagagagagaaacgcacgaagataacagtcgaaagatggacgaaagagaaaaacaaggacacggaaacaaaaggatgctgcaataggattgaacgtggacaaccgaggcgggtcacaggagccggatgttctgacgatgagttgagaagagaaccggttcgagataggattgttggttggttgcggtgcagaaatataggtaggcgggcgtacgtgagggaaacagtcgttaagttggagcaaggataggagaacaggaaagaatccggtgtgacttcttcggtgtcagatgaaagatagagaaagagtttgccgatcaaggagagttggacagggacaatgaagagacacgtatgggatagatggaaacaaaggaaaccgaaagaaaagcaaaagaagaaaggccgatgaggaaggaaaagatggttgttggggttcaaaaagaaagaaggtgaatgagaaagtgcgaccaagaagttacagcgaattttcctttaagattacacgtggcaaatttcgatctcatctgatgggcattctttccatcctagttgatcttcattacatcatgatcctctgcttatttcgtttacaacaacgccaactcggctctcttttctttcgttcgtccttgcttctcagattttcttggcctgatccttctatcaaggcttctcgtccagccaatccaggaactgcggagtgaagtatgtcaggatgatggtcgcacctggatacagaaatcacaagtagacagacagaatatagttcaagacatgagggtaagagatgtcagtatgagaccaatgaatgaagaggtagtggaagacgaaccagctcgaatgaacccatccatgcactcaaacgctgcgtccctcaaagcgtagacccccttgtctgccccggcgcacaccatcgcatactctccactaacctggtaacaggcgatagggtgatctggtgcaagttctgcggcagacgcgatgatgtccaggtaaggaagcgacggcttgaccatgatcatgtctgctccctcattgacgtctcggacctgaatgaatatgatagagaaaagggcagtcaggggtacgaacgctagatatggataaccatgaagtttaacacctacaatagctcgtcgagctagtcctcgtccaccagcagggagttggtagcactttcggtttccaaacgaaggtgctgatccagcagcctctctaaacacatatatcagggccatcaagatatcattcttagattgaaatgaggtatagtagcatctaaggtgcaagggagaaataaacagcagtcttaccggaaaggtccgtacatgcaactagcaaatttggccgaataactcatcagggcacacctgatccgatggaaataaacacatagtcgtcaggacccgaggtgcgcgcaaagacgttcgaagtatttataagaaactttggcagacctgttcgcaaggttgttggcgattaaagccttcttgatgaacttgattcgaccgtccatcatgtcgctaggcgcaacgcagtttgctccagctttcgcataagccaaagcgacttcggcaatcctataccaagttcaagccaaccccgttcacgatttatgattaaatgcatagtgccaaaccctatcatatatggcggagaagtttcaagatttgaaactcacctgggagcgctcttttcttggttgagcaaaccgtcttcgtcaagaattccacaatgaccgtgggatgtatactcacagagacagacgtcgcaagcaataaataactcgggaaagagagatcgaatcttgtgaatagctcggatcaccggagaatcaggcgactctgcattagatcctcgggggtcctatcagagtagtgaattaggccagaacagaagagcgtctgtaagcactggaaggaagaagaactctcgagatatatagagcctaccttgggctgagtctgagggactccgaagagaataactgagctcaggcctttcttgacgagaggacctaagaactggtggacgaggtattgagagaaaagaaaaagtagaaaaagaaaaagaggcggacgatatcaacctctcggtcagtcggatctgattcgtcgatagaatatagcttggagaacgagcaggcggacgggcatcctagtatgtactggaaactcgaattccaactggtcatatattcccccatcgagaaggctaaacacttggaacgaaagactgaacggacctcttccaacctatcaataccccatcgcttctgaccaggaagggagctgatgacctgttcggcctgatcgtcgtcagagataaagatcggatacatgagcatctccttcgtcagtcgctttccctgggattgccatgatcgagagagcggatgagcgtatcctccttgaaggatcgatctaacatgaatcccaacatgacacatataagcatgccagtttccacaaacaagatgatagtttgcagcacgtacgagatttccatgttgaatgtcgtggtgggagtatctgtatccgatcagctcaagaagaacggaataagtgccgtctccgtccggaggatgtgtggttacgataagtaacattgattcaatcacgtgtgcaatcacgtgatgtggctacagccctcgactactgtttatccgacctctctcaacaaccgaaccggatgaaagctggaggacaggatggctgggataacagatgggatgaacatacatggtagaagtacacttgcacatccacctatccactcgcttgctgtgagccggtcagacaacaataacaacaccgtggaagaccaacgacacacaccttgagctctctgtcccagtctcattttcagttgtcgccgctttcgtgcacgttcttctttctttctttctttttttttggatacactctccttccagttttactaccattcgttcctttttctcttttgctttctgagccctacaaccttactctggaggagaaaacttcctttgcactttgaacaagatgctttccagcagccgacatggtcatcatccatcatcctctcctctgggtcctcgagcgacagcctatccgtccgcagaaggtccggtctctcctctgcttgccgcatcgagaggaaggccgtttaacccgttggatccggatcatctctccaggcaacgggaccaggacttggacagtgctcgagctatctgtgagtggtgttcttgactattttccaccatcaggatccaatgccttactcttcctactttcaagaaccccgacgaacatgtctggccggggttatgaccttccctttcttgatttagagactgaagctgatttaaatctgttccttctttcatgccttcttttctctctatttcttctccctatcaaacggaacccgtagaccgagctcgatcaaactcaatccacctatcgtccccacctctacatgctcaacagcctcgaacgtctccaacaatacatcctaacccagcgtcgcatcagccacgaaagtccctaaattctatacaccttccccaagcctacaatctgaacaatgattatgaccccacatcctttcctgcgctctccttctccgaacaagccgacgtgtccagagcaagaggtgatcgaagttatctttccgataacgaagtcatcatggagcatgaatctgaacaggatgccactcttagcgaggatgaccattctatccactctcaccacgacgtgaatgacgataccgaagaacatccctcgctgtcctataacagacgacgagcggatcgttcaaccggatcgtctagccctcccttgcttgacatcgatcatgaatctcaacttgaacaccttgaaagcccggcagaagatccccaaagacctcgtctgagaggtagtcagtttgatttctctattctcgaatcttgggccggacaagagaggtcaaagtttgtaactctctcggatcaacaagcacgtcagacagccgaacaagcggcttccactcctatcgctgatgtcaaagaaggtatcggaggagaagtcctgatcgaccttcgagattacccagccgggtcgaagcacgatatgaccgatttgacgaacctagagactaatccaaaggaagcatccgttcaacaggattctccgctatcagaaaagcttccgatgaacgagcctggggggttctcgacccggcgtcaacggcgggtggcatctttagataacaagacatccagaagacagggcaagctcgcaatgttcgaaggtgctggcgccggtgatggagcatttgcctcaccatctttcaaccgctctgctcctaattcttccaccatcagtttagtacctcccatgactcattcggtttatcctcaactagacgcacatgaaaactttaccgaaagccaaacctccactcccttacagcctgttcccccgtcacttcctttcccgactcccctttactccgatactgaaactcaagagcgacccttcaggttttcattctactctaacgctcttcccgcgacgatccatgctcgatcactttacgagctcccggcagaggggcagacctttgaggatctctttggaggaagatctggatcggacaagccaaacatggccgctgcggctgccaccgatttcggcactcaaccttctttgagtggaacgacgacgcccagaagtttcgacagatcgaaggcacactcaacaggttctttctcaggtctgactggaaacggagctcatcacagtttactcggtcgagcggttgagaacgcaagggatcctactgggcaaacctatgcgaatactcaggcaggtacaacgaatggcggaatggggtccgccagattggatgatgtggaggcaacaacttggtggctagatgtgacttgtcctacagatcaggagatgagaatgttgagcaaggtcagtcaaggttgaggtttttgaaaagaatttcaatcctctagccagataaagaagctcacgcgtaactctgccattgataccaggtgtttggccttcatccgctgaccactgaagacattcagttggaagaaactcgagaaaagatagagctctttaggaattactacttagtctgtttcagaagtttcgtctcggacgtgtacagtccgacccacttggcgccgttgaacatgtacatcgttgtcttcagagagggtgttctctctgtaagtgaagctatcacgtaatcattgatctttactaggttgaactcactctagatgtttctttctaatttcagttccacttcagagaaactcctcacccgcaaaacgtccgtcgacgaattgcatctctcaaagactatatctctgtcacgtcagactggatctcgtatgcactcatcgacgatatcaccgatgcgtttggaccgttgattcagagtatagaatacgaggttgattcagttgatgaggtgtgtttgttctacatgtttcaatatatcagtaaagtagaaaagaatactaacgttgactttgttgtatttgttatagttggtgttaatcatgacagaggaggagcagagtgatatgctccgacggtcagccttgatttccacactcttcttatgtctattgttcaaagacctctagagaatgctaactagacaatgaggtgttgtcacataacagaattggcacttgccgaaagaaagtgatgggtcttctcaggcttatgggaaacaaagcagacgtagtcaaaggtcttgccaaacgatgtaatgaaaactggtctgcacccttctttcctccgaatctttctgagcagagatgtttctgatgctgaaccatcgtttgtgtacacgttgaacgggatcttttgtaggagtgtagcccctagatcagatatcggactttatttgtcagacattcaggtttgctcgtcctgactagaaaacttagaaccctccgcttctgtgttgatgtgcctgacgggtctgtcttgccttgattcaatctaggatcacctgataaccatggtgtcttctcttaaccattgtacgtagtaccaatatctctggtttccttctgaaagtttagttattgataaagtcaacacaatcatagtcgagaagattttatcgagatcacactcaaattatctcgctcagatatctatcgaaatgacaggtggatcacgttctttctcactcaacactctctcaggatcactcatagccactgctctcttattcgtaacgaacgctgggtggacagacgcaaacaaccagatgaatgacgtgttgagtcggatgactgctataggaactatcctcatgtacgctctcctccgcttttctccttttcctaagttcccttctgatcaatactttttgtaacgttctgtacatacgaacggaatacaaacgcgcggaacgacatatttagcccaatgaatttggtcacaggaatgtgggggatgaatgttcatgtaccagggaagaacgtacaaaatctaggctggttctttggtatcgtcgtaagctgatcccatcatttcaaccttcgtgcccaatcaacgagatcggtctttttaatccatcatgactgaccatattcactctttttgcttgtaaaacgtcttcgttacaaagggtatgctcgtggccttcggcggtgtaggcgcgatcgtcgcatataggatcttcaaatactcacaataacttggcaaattcctgctttttctctgctttcctatccgcatcttgcaaacgtgtccaaccatccatcacaaatatatatctctatcctactctaaccttcagaaagggttttcttgaacatacttgttctctgttatcccaattaaaataaagtaataactgttctttcccttctatctggtgggtcaaaaatcagttgaagatatcattgtactctagcgcatggatcattttcgttccgacctcaaacacctgtagttctcccaatcaatgatccggtattgtcgatgccaatgttcagaaggattcaaaacgatcagagtagagatggttctatacgcgaagttaatgttgatgccaaggttgatatatagagaacacaaattttataacatagagttagttttacagagttgaaggagaagaccaaacgactacaggttcatcctcgagtctatgaggatgtagatatgccagaacacaataagatgtgggagttgacagagataatataggtgagaaaacctttgagatgtctaaccgaaacgggcgagaaggaaagtcgaaagaacgtactttttcagctcccgaccacctcatcacagattcaaagacaaacaacgcagatgctaatgcaaaaatcatcaaaccatggtcaagttcggtcaacacagagtgagagtatgcgccagaattatcgaacactttcggtgaacgaaaccgagatagtaggaaacgactaaccattcgtcgggaaagctcgaagtacgacaggcacaaaccctctgtaaaatcctttgaaaccggcctcggcataaatcgctctgacgacggacaagactccggtgtatctaggttttgtgatcgagtccgtcatcattctgtttttgacattatcagctttatgattattgaaagttgaacacagacggtcagctcaatttttgatacttcaaggtagaacttgtattcaagaaggaaggtgtataacggagaagatgaaagcataagaaacataccgggtagagctcctagccagaaagcattggctcccatgccaccagcaataaacgtctgggttgggatcgaaagcgcatacggcgtgttgtccaagagtgagaacaggcgcatgttgagttcataaccaccgaacatgaatgcgaaatttctatttagagcattttggcatttccgaagttatgaggatagattatgctttagaaagagagcatgaagcaacaaaaacgggcgagactgatttgttaccacagataagtgatgcagaagaggacgaacgatctaaacgccagtgttgctccaaaacctctccaaagcccttgaaagccttgctctctgacaacctggcgagcacagtctatgggacctgagaattgtactacaggaggcttaggagacgtagttgaggcgtgattggtgcgcgagctgtgatgggtgtttgctgcagcgagttggagttgaagtttacctttgaacagaaaagaacagtgaaactaattagagacttgctcgtatgtctagaacagtcggatgaagggatttcttgaagtggtaagaagttgtgcctacccttgaggagctctataggatgggcgaaaacagcactataaatatggaaatgagaggctcagcgatcgtcaattgaaaaaaaatctcttcaacagacgatatgatcttctcaaaaaatgcgtcggaaacgtgtgactcactttgtccaacctgccccgataccagctacggcatgacctaaaagactcaaccgcttctcgtctttttcttccactgtcagggaaggagttgtctctgcaaacccatgacttaacagtaggattcggtagttgtgtaaactaaatgaaaacggaaacgattatagaaagagaacgccacgcgttaaacttgacattgaagcagtagatatagcaaaggaaactgtaccttccgagcagaacgctatccgtgatagcccatcccacagcctgatatcgggtatcatgctcaaggtttagtatacgtatgtctgatgttaaaactttgattaagcggtacgcgaaggataatcttactggaggactagcgcctttataaagggccagaggtccctataaacgatacgtctatgagcttcgcgcatttttttttctaacaaacgataaattaaacacacttcacgtcttattgtagtcaagaagcaatcggtggctcctttgtatgtccctacatcgagtatcagaagtgaaacttttggtcattagtatgctctggttggtcaaaagaacgaggatcagagtttaccaataggaacacattgcactggatggtagacgtattccaatagttgtcagctttcgtctaacgaagggaaacactttgcctgtatcgagaggaaaatagttctgtaactcactcctggttttaatggtgtcaaacctggtgttcgatcaagatgtgatattcggcgaatcagccatttatggtcatgagatggataagaattgaaaacgtatacacatacgggtgtccgactgctagctttgtgaggcctaatctcgcaaaagagaggagagaaacccaagtgaaacaaagaagaggaaggagaatagagggaacacgagcacgtatatgagtccttttcgtctactttttgttccttctctaatccaaagtcgcaaagaagagagtcagagcgtaccagagcaggttcccgccaagaagccaatcagtcgaacactgtttgaggaatctgcatcggacgacatggtctgccaaagctatgaggcgttgcaattaattacggagggagccagctgggatgagacaaaagtttagataacgtatgggtgttttatgggactttgtatggggaaatctggggtacactccccatagactggactacctccctccatatcattcttgcttatgagaaagctctcttgctctgcttcgtacttgacttcagtcatagatcctcaacatcgataccttaatctggatctccatctctccgatcttatccctattcatatgagtcgcgtaagaaacgatggagtagagagtacgtttcttggtctcctgtagcacgcgaatctttctcttcacatcaacaggacgacgcgtcagaaagccaagctgatttgtattgccttgtttgatcagactggttcgtcgaagagggaccgtcgaaccgaatgattcttgcccttcgctcctttatccctgaagaagccgactggagcttacagcgtcttctccgagcttcctcagatcataacgaccgtttcgttcttgataaatggcatgcttcggttgatactcttttgttatggcctcgggaactcttcgagatcgttggtcgcgactcgccggctcaggcagtagctaaagggagcgctctctgggatttcgaacgatccaaccagaaagaccttcatagaagagctatagagagcttgttggtgattcgtaatgcaggactcaacgacccagccaacggaaaactattgtcgacaagtttaaaactacaacgatttctgctcgagttcctctctggagtcgaagtagagctcctcatagatcaactagctgaagtgcttatacttctccttgatatcttacacaacatgtttatatcttcttcgctcgacatctcttccattcaagagaatttcgtcaccgaactgcccctagttctagttcagttgctgcaatccaaagatcgggcaatcctcattgcaacccttcgtgtagccctggcattatccagtcctaatccagccgacccaacagccgacccgctccttcatttttcgtctgttttcattcaagcctccatcaaaatgtcgctgtctcttcttttactcccgccgtcatctggccagaatatttcgcttcgatctcttgcactcgacatactctacacacatacaagcgacccaactcatgcagcaggggttctcaaacgaaaagatattggaccggtgtcaaaaatagtagcaaaaggattattcgaaggatctgaaaagaaggaaactccgttcatcctggccggtggtggacgaggaaccgagacgggcgaagcatgggaaggcgcgccgccaggaagaggcgagctcgatcagatggcgggaatggcagagccattaagatcaacctactggttcggctcttcgttcaatactttcaaaatattctattcgcaatcttgctgttaactgtctttgtgcatgtttatgtcttcgcatctcaacaggatgcaacgaacattccttcctgcccccaagtcatatgtacctcagacacagttctggcaactctacagagaagctttctctcagccctacctccaacagaacggagtaccaccattgttgacggcgacagagctcatcaacaatgtgtctttcgtgtttccaggagctcaggcatctttgcatgaaaacacattcgtgatgaaggggatgaaagttcgtagcggcagaagtggttcgttttctattctctaattatatgcatggtctaatcccgtggtgaatctggtctctaatattcaacctttatttcgttcgcagttccttctgtcggacagctccatatgtcgacgtacgaaacactccagacgtctctcaacccaacaaccaagtcgcccacaggaacgtctttcacttgcgcgctcatcttgcggaacctctcccgggcgttagttgagctgcttgatgcggacagcgaaaggcaaaacgaccagaaaaagaaagttcagtcgggcgagttgttcggtctgccaatccctgatgatattctatcaggaagtcaatctcaggacgggccagatggagtagccgagtcgatgatatcatctggtttgacaaaagaagaagaaaagagggctgtagcggccgtcttggctgtggaggacgtggtgttggaatgggttatgaaaggaggggatacgttggacgtctggctcagtgaggtttgtctgcacagcatgttatcctcatctaaatggtttctttgtgaccttccttctgactcattcctcctcattgatcttctatcgttcgtttggcaggtgttgagatcgatcacgctgttgagcgcatgattgtcatctcttgtaattcttcatgataaacatatataacgataattttaattggtctagtgattcagcctgaacgggtctgtttttttggggcgtacttgcccccaaggttgacctttgggtaacctgtcagtcgtttaatgagaatttgtttcaccaggagaataggaaggaaagtagcttggcttgtcagatgagcggaacgtcgaacatctttcacagaagaaggacaggcacgaacgattggtctaggggtagtaacccgtcattttcatagatgactctgctcacgtctaccgctggaattccttgacatcttccagaagagagtttcatcggccattttcaagacaagatagcaggaaacagaaggcgataggaatactatgagcctctaatcagacggttggacaatttgatcgatcactcactttcgaaagatccgagggagagggtagcaagtgacggtgccacctttgagacgttcgccagtggtcggatgatagttgaagtgaggttgacaagcatattgaacgatatcgtagagcggacagcggggcaagctttcttgagatgattttggtgtagatgaggtggatgatactgaatttgctgattgaccttcacgtgttgagtccgtcatcttgaccgctgattgggatgggtgtatgcggtatgtgtgaacgcgactagaatgaatggttctattaagatatcttttcgaaacattagaaaactttgttgaattatctattcaaaatatttcctagccattagataattttccgctcgaatccggtgagcttcttcgaaagaggaccaaccatccgatgaacccaacagaaactgggtctactctgcactacactcaagaaaccatgcctaaagtcaacaccccgtctgttcctctgaatggtctctttggagtcaataaaccgtccggcccgacatctatgagtatcctcgagtctctcaaaaagatcttccgaacctcaccgctctttatagatcctaatcctcctaatccggcaaataagatcggccggaaggccctcaaagcaggtccagtcaagatgggccaaggtggaacattggacccgctcgcagatggagtcctaggttcgttgcttttccttcctagtaactcatgcacaagagaagtaagaggaagctcatgatcgttcgtttgctcttgaacgacttgtctcggttggggtatctacctgcataaagtggtcgcgacgggtcggggaacgaagcagcttgctcggttcttagattgcacaaaggtatcatcgttcatgttttcctagtcactggattggataggcacgattctgatacacgaatacgtgtgtcttctacaggaatacaggaccgtcggacttttgggatgcgcaactgattcggctgattctcaaggagccatagttggtaccgcgccgtgagtctagtccgtctttacttctgtcaagcgtagccaattcgtttctttcatatgtgattacttgtatgatcatcccgctaatctagtggcctgagtctagttggaaacacatcactcgacaagatgttgaaaatatcctagagaaatttagaggagagatttatcagattccgccagtgtatgttcttacttcagattatatgcttctactttgtaatttgttttcgaatatggctgaaaatcatcgatttctgatctggtgctttcagctactctgccctaaagatggacggcaagccgttgtacgagtacgctcggtcaaacactccattgccccgaccgatcgagcctcgaaaagtgatagtgcacgagctagtgttggagtcgtgggatgatgctgcaacatcggaagatggagagggtcaccacttccaatggccgacagaagtaatgagcgctgaagacaaactgatatttgacaaaagcaagaaggtagcgttgtagtttcgttccttttgtgatctcccagtcttcctaggaactgacttcactgtttctgcgacaaacacgatagctcgtcgaagatgccgagaaaacagacgcgcctccttcctcaacagatctcatgtcatctgaacccaccttgacgtccacggatgaaaccgtatccaccgacccgcgcacggttcctccgacattcacgctccgaatgactgtatccggtggaacatacgtccgttcgctcgtcaatgacatcggcgcagcccttggctcgctagctcatttggtggttcttacacggacgagacagggtgaattcagtctagaaggcgacaagtgtatcccttggtctgtgttcgaagcggctgccgcggaagaacagcaaaagtacttggaggcaaaggctagaggagaggtcggtaaaggatcgagcacaaacgcaaagaaggggaaaggaaatgggggaggaaactcgtcaaccaatcaggaagaagaagaggaggaggcaatggctaactcccttcctgttactcaaaaggaagaaaaggaggaaaagaaagagcctatagagctccaggcatgggagaagtatcttttggagaggtttgaatccgtataacaagaacgactgctcaatcacgatcacacctaggattcaacctataccgatctgaatctggcatcagctgtcatatgacctgtcagccttgtctatagagaacagaatagatccagacagaaaatccttctaagcgcaacaaattcatattgtcatttttatttcttaacaaatagacgtgacaaagacgttgatatgagaagctaagaagaactgaagcaaacagatatgcaagcagaccaaatgaattaaacgacgaagggcaaacatcgatgatacagataaacgaacttgacgcccacggaaaatgttcgaatagctaacagagccagtatacagtacatccaagacagctgtgttagaagaaaggaaccaagaagatgaacatggggttgagtttgaagatcaattctaattgaggaatccacggcatttcggacttccacacaagcagacaatctgttccgaaattgaacggaattgtaagagccctttctaaaatttgaacaagatacgagacagtatggtagaagcagacgacgtactttttcttgttcaatgggaaagtggtaatcataagttatctcatccccggcttcgatattgatctttgcgtaaatgacaatctttttctaaaagtcaagcaaaaagggacaaaaaagcatgttaatacatatgcataaatgggagatcgaggaaagtagacgatacgaacttcgccgttgatggtgatgattttggcggtacagtttggggtacaactaaggcaaggaaacaatgaagtcataagatttcgcaaacatcagctatacatatatatatgtggagtcgttggataccaagcataccaatgattgatgagccgtctatttgtgataataaagcaaattgggattggttcgatgagtacaccttgtgagaacttatacaggaaaatcggatatttgaacgatgactgacccaagattccctttcttcgtagcgtccaccacgctctcatcgtcgatcctgaacagataactgctcccgattccgattcgctcatagtatttctctctcttgtccgctacggcggctctgataacctctccaacatactcgataaccatctcctgggccgggatgaactccatagcgtagagaccccaatcgtggataggagatttcgagaacttgagctgtttcttccgagttcgcaactgattgaatttgaggatatcggtgtcgctcgctgctgcttttcggttctgttcgataccgagtacaagccgacgagtagcgactcgagcagatcgaccggtagagatcgcagcggccggttcaacagcagatgattcggccgaggtcgctttgttccgctgaggaagatacatcgacttttcgagctctgaaatttttcggtaaccttccgttcgagtacaacttttctccggaagctcgtcgtctatatcctctgcatccgatagagttgtaatctttgctgacgtgtcatattgagatgcctgctcgtccacggccgcttcagaaacttttcgagctctatcggccatcaacttgagcaaatacagatcttcgttgtcttcgaccacacctgcctggaagagatcgacatccttatacttttttggaggtcgttcgggtttcttcttgggcgcccgcttgcgagaaggcgctgttggtggggcaagtgcatctgaggtatcaggttgcgaatgagcgatcagactgggttcttgaagagcagagagtgaatcgagaggcgaaggggaatctatctgaacagaaagaggagctggggtgggttcttcgagcggcgcaagctcaggaatattgattgaatccaggacgggactgataggcaaggcagaaggtagtacctgtgcctgatcaggctccgttttcttcttcttcggtcgagatacaatcgccttcctaggcttgggaggctttttctcgacaaccggtagatcaagttcttcctctccttcatcatcatcggtgtccgagaagtcaaatcgtgattgcctcgatttagttctgggtgaacgagagttctcgtcctcttcgttttgctcatcttcatcttcttcatcttccgattctgcctctccgttttctcgtttgccatccatctcgtcatcctctgactcaaaatcaggcttgagctctaacttccgtctcttctttttcctctcctcatcccttgcatctcgagcatgtgcacgagctttctcacgggcctcggagtatgctgtctgattcggtctgtcgtctttgaagccctgtagaccccaggtacttattgtccgctggccttttcgttcctcccccgagtgttttcgatcgtctgccgaaggtcttctcggctcgaatgaaggccatgggtcatctctggaggtccagccatctccaggttctcttcgagaagcatatcttgtcgtgtcggaaggatagcttcctgatgagtttcttcctcgctcgtattgtgtatcccggccgagcgcaggccgagagggtcgatatgaaatgtctctatgatggttgatcgctttgggttgcggtaagcttggcaggccaggcagatggcttggtcgcgaggaggtgtgagcatccggataagcactagatggcgggagaagagggctatgagtcgaaggagaatacggatatgaatggagtcctttgaaagggagagagattgcgcctggcggagcggtcggtagtgagccagtggtcggtggaggaaggaaaggaggtttcagtgcttcgagtcgtttttgttcggtccgctcagcttccaagcggagtctctcttttctctcggcatctcgacgttctttggcgatcttgactttggtaaagtgttcgtccacggctttgtctgccagctttccttcgccgtcgagaaccagagtaagggttccttctgaggaatggaagcccaagcgagacccattgaaccggttaaccatgctgacagccaggtcgtgtgcactgttgtcagttttcgaactggcaaacttgatccaacatattcctaattgtgtggagcatatagaaaacgaagcatgagcgcgcattcgaaacacgagcagaatgaatatatgttcaaaaagagagtaaaatagatctgagcacacagagggagaaaaggagaggacagaccgagatatgatgatgttaagggatcaactttcatactgaattcttggattcgaccataagacccaaagaaggctcggacagtgtctgatgtcgtcaaggtggaaagtccggtgataaggatagcacaagcaggcggaggcggtggtttgcctctcgaactttcgtcccactgttcggaaagatttcagaacaaaggccgtgagtgtctgagatacttcaactagtctgacgaggatagaatcaatcgactaaatgtatggactgacctcgaaatgaactggatacagcctctcacgcaatttggctgagcctttaccacgacgtaccgtggtcttgtcaaccttcagtcgaggatcagtcgggattatctttgtttctccaggcttcatctgaccctcgtaccgaagaacgacttcatttcctttcttgagtcgaacatcattactgctcgttggcggcaaggccgggtcgtaaaccgttttccaagcacgttctaattttctgggtagaggaagaggagcaggtggtggtgatggtgatggtggtcgtggtggtgaaggacggacctgttctacttgaggtcgagacaagaatggcggagaaggcgaccgtcgtttgaacgatgatgaatctgaatgtccttttgtttgaggctcggcagataaatatgatgatgatgatgacgatgatgatgacgatgacgaggttataggtctgaaagatgatatgaagcccgaaggaggcctggcgacccggtctgctgggtcaggtggtagctgcttgatcgctggtccgaatctagatacatgaggctttttggaggaggaagcagatgaagaaacgaagggagcacgacttcgactgaggtcagaagacgacggtagtggctctgattcgaccgctttggcaacaagacgcgacgacgcgtgggtcgaggatttggagggaggtaaaggagaagcttcacctgatggcgaaagaggcgcgtgtgaaggtctgtcaactggtcgaacgtagggagaggggtcgtacgaccttgagaacgaatctgacgagctggaagagctattccaagatgaatgagatcgggacgacgcgcgatcactgtgggtcaaagagaaaagtgatcagaaacaatgagtggatgttgctcatatgagcctttgaggagaaggaagaagagaaagaacagaaagaacagactgacgaggcgtaggatgactgtgacggtctcctgtcttgggacgtgtaactccttgaactcgagtaactcgatctcccactcatcctttgatgactgtagaggaggaagagagaacaagagggttggagagatctgctgaagagaccgaggaaaagatggtgggatgtgggaaggaaaagaggacacaaccgagcgggaaagagacaatcttcgagcgagggtgttttggctttgttcttttttgctttgttttgtctaccttctctgtctttcactatgttctttctgtctctcttctccttgttactgtgttctcaacgtactaacggcagagaacaatgtcttttcttcccttcatcttgccatactctgtatcaacaacagatcgatggcaaccccattggttaaactggagaaggccactcggttgtttgcttcgatattggaggtctgccctgccaaagcataaccctaacaaccatgtattcagagaactctctattcgcttactacaaacatttcctagtgtttgtgctaatccattagagtaagtaccgggacaatacttaaaactttcgtttaaccttctctcagtcttgaatcgtccaactttagttgacctcagttcgattcaaaatccactgggcttaatcaaagataatggccctcgcttctgctccttcattcgcaggaaagtggtcctcgttaaaacagcctctcacatcatgggtgtcagtcttgctttctcctctgcgttcgttccgtccgatgtatcctttcaatcatcccagggctaacagtcttgttcttcacgatcttaggtcacaacgtatacaggatcttcattatgaacaaatgacccctgtccaagcatccgtcatccctatctttatggggaataaggacgtcgtagttgaggttcgttcgtttcttctttccctcggaaacaggtcgccggatgctaattctgaggaacgaacaccgtttaggcggtcaccggctctggcaagacgctcgccttcgtgttgcctatcatcgaacgtctccttcgtcgtcaggcagaaacaccctatcagaaaggtcaactcggcgcactcatcatctcacctacaagagagcttgcctctcagatccatgctgtcttttctctgtttctcacccctcctccggctccgtcgtctagcttgacagacggaacagatagctcgtcagagccctgtccgctccctccgccgctcttactcatctcaagcaaagaaagtactccggcccaggacctcgctaggttcttggataccgaggcagtaatcgcgatcggtacacctggtcgagtagaagagttccttctaggtagacgagtgaagggcctggtcagatgttccgagttggaagtcctcgttatggacgaggccgataggtatgctatcaatcataaagatatgcgcttgaacttagtcggcctagccatttattgaccacccttatgctcttacaacacttagacttcttgacttaggattctcacccacactcaccaagatccttcaccatctgcccaagcaacgtcggaccggtctgttctccgcaaccatgaccgaaggcttgtccgagcttgtgcgtgtgggacttcgaaatcccgtccggatcgttgttaaagtggagtccagaagacgagcccttccgtccgcgtcgggtgagccgtccggtcaacagactagggagcgccgaacgccggcgagtcttaagaacatgtacctcgcttgcaagccgggtcagaagatggagaccttgatacggatcttggagaaggagcgggccaaggctatgaacggcgttggactcgaagagcctgatggtcaatcagaagagctcgttgaaggcgagggagcttgcaagtttatcgtctacatggcgacatgtgcagctgtcgattacttttatagagtcagtcgttcattttccctcgtacggatgcttcccaaaactaatcacttggaatcataacttggatatgatttacttcattgtcttttgatctctcaggttctatcgaaacatccctctctcaagaagttcactctgttctccctacatggtcatctcccgcctgcatcacgaacgacgactctagattcgttctctacccaaacctctacgccactttcgccatccgtcctgctctgcacagatgtcgctgctcgagggctcgacctgcccgacgttgatatggtcatccagtacgaccctccggttgaccccaagaacttttctcatcgagctggtcgaacggctagagcaggccgaaagggacgtgcattgattctattgggcgaaggacgggaggaggattatgtcgagttcttaaacttgcgaaaaatcccgttacagccttaccctcaatcaacaccatctcttgctgcttcctcttcttccaccaacatcccggccgagacctccccgagtctcctcgcccttcgatccatcctaatgcaagaccgagatttacacgatcgttcactcaaagcatttgtctctttcttgcgggcgtactcaaaacacgaagcagcgttcatcttccggattggagacctcgacttgggtgggcttgccacagatttcggcctgttgcgaatgccaggtggtccggaggtcaagctgtggagaaagaaagtggagagtctaaaggagaaagagccttcagacggggtggtacaccctgttgattggaaggacgcagtcgtcgacgtgagttatgtctcgacctctccgttgctctgaatgtcacatagtcaatactaactccgcattcatttgttcttcaagtgggacgcctactcctatgcatccaaacctagagaaactcagcgattgactgaactggaagaagcaaagaagaaccctccgaaaccgaaggtcgtccgtccgagctcgacaccggctgtagcttggtccaacaagctctcgtcgaagacagaaaaagaggctagaaaggaaaagaaggcattgaagcgagcgagagagaagcaagcggcagtcgaggagaaaaacagccaccaagataaagatggagagggccaagtcgacgccgaagagaaggacgatagcgacgggagtgaggaggaagtacaagactggaaggaattagttagagaaactaagcgtaggaagcaagatgagagaaaagccaaagagaaggatatgggaggaatggatttcacagatctatgatcagttgcccccagcattcgaaacacctcccgctatgtcgaatgcatacttgagtccatataaatatcagaccagaaggccacgaccattctggcagagggaatatagagaggacaagagacaatagtgatttatgattatttcaccaatgtcggtcgttactaaccaatgtcgagtttcatcatcgacgaccaaccgtgggctcatttgctcttctaattcaaccgaaaagcaagtcgctattcaagcatcaaaccatctggttcaatatcgttccacagtttctcttttattgcacgtctccctagttctattcttagatgattaaaggccttcttgatcttcagtcggccgctcgaggaggtgctctcatcttcaaaaaaggtcttcgtcttcaaggaagcgatctggcagcaacgcttaccgctgctcgaatcaccagcctcaaagctactcgaccatctacgatctacgaggaacctccttcggtctctacactgcactcttcaaatctcactccaacacatatcagatctactcttgaccaggaggtcacagcgaccccacagatatccggagcctctgccttgagcgatctctatgcgtcggaaggtagcttggaccgatcaaagatcgattcaaacagaccttcttttgcccttcctcgttcttttgggttggacagtcattcacccgtcttgtcttctaaggtttctgctcctacaacatctgtggcgaaaccgacggaatctgtggaagggacgcttcagccgccccaaaatagtgtttcctccccgctgcaaacttcggagacatcagtgtcgttgtcatcggaacccaaacttgcaacaacgtcaacagaatctgtatctcaaccgatcatatctgagaacactaccaagccaacagcttctactgtcgaggaggtgcttagttcggatgttgttctgaatatcaaccagcttcctgaagctgtgaaggaagaagtgcgagcattcttctccgcttcaccgtaattttaactcactgatgatggatgttcctttgtacttttcagcttgttccagttctcaaggcctctcgggtgccatcctcacgaattggtcgattgtttcattacggatctctggcaacttctctgacatggggagctgcttcggaagctgtccgaagaacgaccggaacatcctcgtctactcagcagtcagttttcctctcggaagcaaacatcgagcgtctagtggacaagctaggaagaatgaggggtgcggcgctcaagttgggccagtttttgagtattcaggagtcgggcaccttacctgaggcattggagcaggtcttgcgtcgggtacaggcgggtgcggattacatgcctgattggcagatgcgagtgagtcttattcaattgattccgatgactctgaagttctgggttcgcatgtgtttcatttcaacgatgaattcatctgaacctgtcggtctgtttggtggtgcagaaagtgatgtctgctgagctgggagccgattgggaagagaaattccagaccttttcacccgttcccatcgcgtctgcctctattggccaagtacacctcggtactgtctccgcgccttattcacctccttcgtctcctgaagacttcaaggtcgctgtgaagattcagtttcctggggtagcctcctccatcgcttctgatctatctaacatagggcttctcctgaagacatccgctatacttcctaagggtctgttcctcggcagcacgatgaaagtgatgaagggagagttggaggatgagtgtgattatgtccgagaggctcaatgcgtgaaaaattttggcgagctgattgagaaagatggagagaagtcactattcaaagtcccaaggatcgtggatgccttgagctcggacagagtgctgacgatggaatttatggaaggaaagccgatcagtcaggtcaaggggcttagccaagagatgagggataaggtaggtacctgttgtcatttgttacatgaccaagtgaatgtctaatctttactcgctttgtcggtgttcttttttggtaacgatagattgggtccagtatcctttcgttatgccttcgagagcttttcgagttcaggcttatgcagaccgacccgaactactccaacttcttgtggaatgaaaagacccaacaggtcagtaatttccgtgtgctcatgatgttgcccttgtcatgcgcaacgtgtgttttatgtgaatgttcattgatcttgtcgaaactatacgtgtttatccattcatctatagatcgagttgatcgactttggagcgaccagagaatactcgaaggagtttatggacaactggttctgtcttctccgcgcagctgtctcgggggacaaagcagagatggaaaaatacagcttgaggttgaaatatctgacgggagaggaggaacctgtcagtttgttcactacatctgcaagttcaccatcgtttggtgtatggctagctaacttttgcgtgctatctctaggaaatgctttcggcccatctggagtcaatgtctcttgtagcttgtatgtattgtgtttttatagaagaacacgggcaggcatacatctgacactccttattgcttggttaatctttcgatcgatcttacagctcccttccgacgcacgacttcaggaacggacctgtttgattttacccaccaaacgattgctgaacaggtatgtcttggctgtattcgcactcgaaaaaatcttttgccatcattcgcgatctatacctcactgagttttgtcttgccgtatcatgtgccgatgattcaggtcaaagctcatattcccacgatgcttcgtcatcggttgactccgcctcctccagagacgtattcgttgaatcggaagctgagtggggcgttcttgttatgtaccaagctgaaagccaaggtgccttgtgcagaactgtgggaagaagttgagcgaagctaccaaatatgaaatgatagaagcggtcgctctgaactgacataaagtcatcgagcattcacatggatatccggacatgcgtgaagtggttacgttcgatcggaccagccgttttttcctcttgtctacctggttacaaaacgaaagctcgataagctgtgcgcaaagtagtctgcggacgtggcgagagtggggaacggggtcgcgcgtagccagaagcaaggaaagcgggcaaagggaaagaaccaaacccatctcagcctgtctttctctcctctcttctccacatcgttctctccttctcccttgtccatccttccaagtgagtgtctcttcttgatggttgaaagtcgtctgagcttttcacttttcgttatggccatcaggactttctttctctctttcaagtgtctttttttcttgacaaagaaaagaaagaagagagaaaaaaaaacaaagaatcgagggaaaaggaagaaagagacagggatggaaaaaagggtttagaccgaaggcaaggccggctttagtggagtgcagattagggtcctcacactcagactcctaggctcccatacaatagtaccaacgggctcgcgtcctatattcgggcccaagaagtctcatcaaccaaagcacgagatggatctatcaaaccccatcagtcaaaaaaaaacaaaaccaactatctgcatctgttttttcccttgttgttctttatctcccttctttccttgtgtctcgtttctttccctggggatcaaggaagaatcgatacatgtccacaggattaggggttttaaccttctgtgtatcatccttgataatctactgacacaaatactgatctgtgtatatgttttttcttcttcttttcttttgtgcatctttagcctatctttctttccttcatccactttctcatcacacagtgagtataaccctcccgatcaatcatacctctctattgtaatcaatattcctcatccaggttgaagatggagtcatagattggaatacttcctgggtgaatggcttgaggtgcaggcatcgtcagatagtcgatggccatctgagggagagtagccgactgcgaggtcagacggatgaagttccattcatcaagagcctttgatccaatcagctaagggccatcccctccgtgcaacaaaaaaacgcattcatgtccttgtgccttttcactatcacccaatgagttccttacgactgggacgatccttggtcttttcgaacattgctcatgctgattctcatccgatttgtttatcaatccagatgtccgagtcccgagagtccaacgtctaccttgctaagcttgccgagcaggccgagcgatacgagggtttgttctttccttcttttcctcttggttttgtgtgtttatatctaccttgagcccctgggagctgaccgcgtgcttgtccttctgttttctcttctcctcgcagagatggtcgagcacatgaagcgagttgcttctaccgaccaggagctcactgttgaggagcgaaatctcctctccgttgccttcaagaacgttgtaagtcatatatcactacctttcataccctgaaaactctacgcatagaccgatcttgaccgttataatcttgttctattagattggtgctcgacgagcttcctggcgaattgtttccagcatcgagcagaaggaggagagcaagggaaacgacacccaggtcaccatgatccgaacgtacagggagaagatcgagactgagctcgccaagatctgtgaggacatccttgaggtatgtgactttccatcaagcttgcttcctttttcacttctctaggtactatcatatgaatcccttactaatctacacgcgctgaacatgtaggtccttgagaagcacctcattccttctgccgcctctggcgagtccaaggtcttctaccacaagatgtatgtacctttttcgaacaggttttcttttgcccgttctactggaggacttcgtcgctcatcttatcaatatctgttttgatacttaggatgggagattaccaccgataccttgccgagttcgccgctggtgacaagcgtaagacttctgctgataagtctctcgaggcttacaaggctgcttccgacgttgctatgaccgaacttcctcctacccaccccatccgactgggtcttgctcttaacttctcggtgttctactacgagatcctcaactcccgtacgtcccagaatacatgatatagaaaaatcacaagaacttgttgggcttacacgctctcacatcctctttcacctgtcccttagccgatcgagcttgccaccttgccaagcaggctttcgatgacgctatcgccgagctcgacaccctttctgaagagagctacaaggactcgactttgatcatgcagcttcttcgagacaacctcaccctttggtacgctcgatttatttgaccactgtatttagaacggcagcgcgaatgtgtggctcacgagcatatacttgtattctactcatcaatcttaacaggacctctgacatgcaggagtcggagtcaaaggctgagcagcccaaggaggaggaggctcccgccccggaggagtaattgcttttggctattgacctttacctatctattttctcttcctttgtccgcttcttcattctattcccttcatcctttcttttatccttctatatctctttccttatcattccatacgcatctctgctatctcgcttccgtttgtttctcaatcccccccctctttttttgtctctcttttccccctcttggcgactccattcggtcactacctctgccttgccggagagatagatggccatatgtcaatgagaaggagaatgagaggaaagagtgagaccggtcggcttttgtgcaatcatatgggtcttgttctttccaatgtgaggcttgacaaagagaatgtgtgacaactctgtgcggtgtgcacaccagatgactgccgtcacgccgggaagacgctgacggcagctgccactatacgcacacatacacatacacatacacacacacacacacacacacacacatacatacactccaacccgacggatgaatgaatgtctcaagcggaacaggatacatgcatgatctgcgcgtactccgagatagagacggaaaactggagaaaccgtagattgaatgttccagcacgttcgacgaaagcgaagaagtacaagatgaaaggccggggacgaaagaaaaatgcggagcacctcagaaaagatgttgatgtcagtgggggaaaaagagatttcccgttgactgacgatttttttccctctctaggaatttttctgctgcgccaagtcaattctctccttttctctgctcttcttttccttcccttttttttcccctcaaagagatcttttttcttttttttcgagttctatccttcttttctctcccatcaaccatcaaccatcaacccaattcacatccaatcccaaccaacctttcaatctaaccgtatcccacacatcatgtcttctggagccctttctgtcgtccctgtacgttcgtttctccgttgtccttccatcttgctgatccgtgcctggcagtcggacatcaacgattggaagggcatcatctgatgatgatgattgcctgataacggtgaaactgatccatctctcttctcgtatcttttccatctttgtatcattccaattcgctctacctctggtcgaaccgtcatctcggtcatcgttttcgtctctgatttgctcgctgacatcaggccggagtccttaccggtgaccagacccgaactcttttcgagcacgctcgagccaacaaggtgcgctcttgatctcctttttcgggctgcttatgaaatctacattcagctcatactcatatctgttgtgccttgaatcgtttaatcactaccattccaatctcttagtacgccatccctgccgtgaacgtcacttcctcctctgttgtacgtctgtctatgctgttgtctgcctcctatcatatccggcatgtcaagtcctttcgttctcatcttgtcttccatcttatcaaaaccatcaggtcaacgccgtccttgaggccgcccgagacagcaagtctcccatcatcctccagatgtctcagggaggagccgcttagtgagtctgttatttcttagcctcccctatatggcatacacagctgacccgagccttttctcttcctatagcttcgccggtaaggggattgacaacaaggaccagaaggcctccatcggtggagccatcgccggagcccacttcatccggttcgtcttgatgttttacatcgtgttatagtctcttgtttcggcttgtatctaacctgccttctttcgcctgccaatagagccgtcgctcccctttacggtgtccccgtcgttctccacaccgaccactgtgcccacaagctcctcccctggttcgacggaatgctcgacgctgatgaggcctacttcaaggagcatggataccccttgttctcttcccacatgctcgacttgtctgaggagtccaaggaggacaacatcgctacctgtgtcaagtacttcacccgaatggccaagatgaaccagtggctcgagatggagatcggtatcaccggtggtgaggaggatggagtcgacaactctgccgtcgataacgcttccctctacactcagcccgctgacatctacgacgtcttcaccgccctcaacgccatctcccccaacttctctatcgccgccgccttcggaaacgtccacggtgtctacaagcccggaaacgtcatcctccgacccgagattctcggtaagcaccaggagtacgccgccgagcagctcaagaacggagacgagaagcccctcttccttgtcttccacggaggatccggttccaccaaggccgagatcaaggaggccaccgagaacggtgttgtcaagatgaacgtcgataccgacacccagttcgcttacctcgagggaatcagggacttcatcctcgagaaggctgactacctcaagacccaggtcggtaaccccgagggagctgacaagcccaacaagaagctttacgatccccgaaactgggtccgacttggagaggtcaccctctccaagcgagtcaaggtcgccaacgaggatcttggaaacgtcaacaggaactaagcgtctttggtgctttgatcttgaaaaaaaccaaaccattcactttctcccccttaatcatacctggttgaaacctgtagctatatcatgacttctctcagatctttttctattctcttttttccgtgtctttgtctggaaagtttgtgaattgcatatgagggatacaagatacagaatacagatagtagagacattatcgagatagttgcatattgagcaagacacttacagactgagccatgacatgccggggttatatgtccaacttcgactccaaaatctgtaccaaacaaatcggtcagcttatcattcattcgtccatgggtttcatgatattaacacggggttttcttacccggtaccgatgatcccgccggcacccttgtagtcggcctctggcccgataatgacccagtccagtagaggagttccggctgaacataaacaagtcgggtaaaaagatcaacaacaaacaatagcaacaacaacaacagcagtatgtttccaatagcgtgactcggcaagagaagccaatcagagaatgcaaataacaaacagaaggattcagcggtaccaagacaagaacgtacttcggacggggaacagtctgtacgcgcgttctaggcccgaagggtctgtccctcctagaagaagcgtcagaccggccggtcggataggatgcggatgaagggagaggacgcctgtggaaggattctgtcgagcatcgaacgtcgaggttctctcgtcagagaatctgagcgcgaacgaatggggtccatcaaaagttactttgtaaag

SEQ ID NO: 87 - DNA, 19843 bp, Xanthophyllomyces dendrorhous
taagagagagagagagaacgggaacctatcagaatgatttattctctcctctcagttggcggaactttatttgccggttctacgtactaggagtagatcgcagtagctctgtagcgaaagagttactcaagccaatgacgacccaagagccttccatcaatggatcccctgcttgaatcttttttatcgcctgttccgcgcagatgatgaccgtatccaacctgccatacacccaagcatcgtgcgctatcctccgagctacagatgtttcgtgtttcgaagtcgagtcacaagaaggtgtgatgagaaccaacgggccctgggatgtgagaatttggatgatcggaccgtatacccttagagtataagagtcagtagcggagattaaacgccaagatgaagtcacagaagaccgatggaaaacaaggtgttcagaggcggcttcgatggatgagaagtcgatggacacataactgtcatctatttgaagacttgttgccgtcagtggcgattcttctgggaagagtcgacgagcggcttccagcgtaagtgaaagagtcaaaacgttggatgtcttgatttgagtgatattggaaccacccgagaatactcttaacttcactcgcgcaagtctacaagaagggtccccagcagatcgctttgtaagaaagaatgttggttgcagaagataagcgcgaacggttgctcacctcccggcttcattcaattgaacaaccctccaacctcctttggatcccatctcgtcggggtttgccacggttagtgtgaacccctctttttgatattcctttggaagcccagtcttgttcaagttgacctccaagaaatcttgaacgcggtttgacgacaggatgtcatcaaaccaatggccttcgtttggaacttcgtacaagctgaatagatgggcgcaatcgtgtcaaaatgagcctaaacttcatctagacgtgtcagtacagatcaactatatgcgcggtttacctgacgtgatcaagacttcctgtccactggccaatgagtgatctcatctcacgtccgtgccatacaggaacctagattggcggaaggcaaagtaggatatcgcataaatgtgaattgtataaatgaggggtcattatctccttctctccaggccttcatctcaggctgcttcaaactcacgttatcatcgtccctcccatgtacaagtaacacgggtaaccaagctgcattacttgcatgaatgtcgttatcccacatagacagcccattcatcaaaactcccgccagcgccggatccgcccagtgcatagatgtccattgtgaatatcctacgtatgcttgtatcttgaggtaagccgcggcgctgacaactccttggaacatgtctggaaaccgctgacaaaggtacatcgcgccttgaccaccattggaatggccgatgaggagcgtcccaggatgaggagaccaatccgatacgcgatcgggactgccgagattgatcacagctgagagtgattgacgagcttgaagaacattcctgagggatggcccatgataatcgtatccccatgatctagtcaaggaaatgcaagtacagaggaaaggccgagaataagaacttctcggcagacgaaaggggcagaaatgagagaaaacaaacgtttttccagtagcgaacacaatccagcttgacttttgtcttcttatactctctgtccagaatgaccactcagcttcaacgcctgcaccgtgagtcgccaacaaaactgctgtctggttcccgctttgaagcggaggaagcgccattgcatattgagctgttccgtccacgtctcgaaaggtgtatcggatggcggggtatgtctcacgaagtgaggggagagaccaatgagagcggtggttgaccgggatacgttttgttataggacgatgcgaccgattcgaaaactccaggcgaatactcaaatatgtaatagtcgcaggaagaggtgacgtttggaagatgataataggaataggccgaatctggtaagcttcgatatcgacactcgatacggctagagagacatgcagtccctattgcaaatgatatcaatgaatatagtgcgaatgacaggcagggtctttgagtatcttcactgggaatgacctaccttgatgcgctcgataagagtcgccgctatcacctgcacttgcttttcctcagccttcagtgacaaccctgcaatatttccccagatccagccttgaatgacatctcccaatcctatatcaccctccatcatctctgcatcttcagaaagcgcatcggtttcgaatatggtttggacattcgatgtgggaacgaattctgacttaggtatcgtctcatagccaaatcggaactgaatggtaggaggttccccccaaggatcgccgaacattcctatagcgtacagaaaataaataaataaatacatgaatagaacatcagcttagagtatgggttcatacgctatatatcgttgatcgaacggcgcagataacttacggatctcgtacaaagctttaactaggacccagtattctccactctcgatctcctccgtccagccaagttcttgacttgggaagtgctttctaggcgttgaggtggaatatgtatacaaatcaccagagtgccactcaacgtgatctgaccgctttgttggatctttgtgtatcagcgcgaacgaatgagcttgggtgagatcaaagttcaccgtacgtatttggttcaacagagaagagggagagactgttgaaggtaatatcagggaggttcgtagctatacgagacaaggaaaggatgatccttcatgatcaatgaagagactggttacaaatgtagaaaaccacttgctcaccaatgtcatgaactgtacgcccgcccaaccttctgtccccctaagattggtccaatcaaccctgttccatgttactttcacccatccatccgcatcctcttgaaacaatgtccagtccgctttaccatctatcccgtacgcgcttggccagtctccagagccaaatttgagatcggcaaaaaaagcttcgtgcgtctggttcggaggaacgaatgaagaaagtggagaaccaagataaggaagctcccgagtaccgagtgagaaaggacccagtgcctgtatcgtagatatgtgaggcaagccaataagaaatgaacacaaatatgtggaacagatgagatcaagatagactacgggtcgtaagaaaaatggagtctgacctcccatgtcctagccgctgtatcagtgataagcgatcgcgccaaagggatgagactgatcgcgacactcatgtgtcggaacaatatggaagaaaccttcatctcattcagtagagggaagatggcatgaaatgaagatttgaatgtggaagagatgtaagtagatggtaagtgtaatggtatgagcgagcgattggaattatcagatggacaacacgacttcaccttccttccacaactctctacaccgacacacactgttttatatgaagcctggcgatttagcctatgtttctggtccgcctcctttcgtcagaactgagacttgttatcaatgccttaaaaagccttccttgctatccgcttcgaggcttcgagcctgttggcattgtggcaattcatactgttcgatccattgttccaacaaggtcctctcaccggtcttgaagccgggctctagggtcattgaaggttatcagaccgaggcagtgtgtaatttctgctatacgtttgttaagagttagtcgactcttccattcagatctgtaggcacccagtgtagccttcggtgtcgattgctctaaacttacctttaacttgcatcctcattactcatctcagtgtcctcggcttcacccgatgatcttcagagatgctcgatctcgcagctcaaaaaatatctgctggtgtataatattcctctaccgtatgtatccatcatgccctgtctcgttgatcattcatcatgtcctcttcagagttgatatattatgatcaatgctggtagtcctgcggttcatgaaaaatccgaactagtggatcttattcatcattccacaggtatggacggacatcagcctcctgctcgagaggtaggtatactgttgtcttctatatttgatcgttaaatagcctcattctctgtagcagccggactcatttcttctcgttcgtctctctctaccttttgtctgatggtaaacgactggatatcgtaacacaggcctacttccgacgaaactccgtcccaaaaccgtcagcgaccgctcgcccatcggcgttcgatagactcgcacactcattcgatcaagctttctccatcggggagtcatctgggtcaggcacttcaacagacagccaacaatcggcgttttcttccgcttctggatcttctcgagattccgcacccatccatcctcccactgcttccagtcaccggccgtccccctccgctcattcctattccaacagcagggcgcccaacgctccatctgcgccctcttatcctgtccatgctcgaccaactgcaactacgcaccctacatcctccgctgtaccggtagttccaccctcaaggcccaccagagatgctaagctcctcttcgctaacctcatagctctagagtcacctgccgaaaccgctcaactttatagtgtaaaggagctcaagactatcctgaccttgaaccatgtgcgatgtacgaacatcttggaaaaaagcgaattgatctcaaaagtatgcgatcttgtgagagatgaacggatgagactccaacgagagtcggagagggagaacgaagaggctagcgcacaagccaatcataacagtaacctcgaaactcaggaccaagccagtggggacgtatgggagcagattccagatcacatcctatccgaacatccttcgatttcttctgttccggctctgtccaactctggtgcgatgcgttctagtcaaaagggcccaactgaatgtgtgatatgttttgatcagtatgttttgactccttctctactctcgggataactgtctctatcatgtgagtagaaagatcatcgttgacctggccatatcttccctttgcattgcttttacatcaccagtgatgctatcctggcaagtgttgattgtggacacctcgcactgtgcacaggttgtgcagccgaggtcatgaagactagtaaagaatgtccgctttgccggtccgtctcgcttcagaatttcttcgcggagttagcgttccttctgctaatcctaacactttgctctttcagattgaccatcagacataacggattgatacgcatattcatctaaaaacacatacaaccaaagtaatgtgtcttagattgtatcattctcttcgtctctcgggaggcttgtaccttgagctttgatgatcatgatcattacagagtaaaagaccgtgaagaatcatctattcttgtgtttgaataagttttgtatatgatacactactttctgaccagttgagatagtacgattagtgttgggaaatatgtagtattgtgaagattaaagatattgggtatgagagacatgatgtctaaaattagtctacataggttataaagattagaaagattgaacgaaaattagataaattaggacctgaagctggcttcttcgagtggaactactcggtcatgacgttggctcatgaacgattgcaagcgaagattgcgagaggcaacagactcatctgaggaatgcactacagcatccacaatagtgccgctcccatacctaagagactgtaccatcctttgttcgatgataattcccgggagccgtgagaagatccggttacacccgccgaggtctggttcgcagacaaagtgaacacgttcacataggaaatctcgaagaacatgtcttgatagttggccgagttcaggatatatgaagagtctgatttggaaggtacgcacggtacatagattctcagcaaatgccacaacctaatctgatacagacaaaagtacggaaagaaaagaaacttacaacatgtatctggcgtttgcgggactgtacatccagtctgtccaagaattgtgctatttcccgctcgatcctaataagacaatttttgcagccaagacatcaatcagtagagatttgatttaaggtgaaatgagagatctcgcaaaatcagacaagacatacaccacaaagcgagatcttgagaacaggttagacgaaaattgataacgaatcagccgcattcaagaaaagtcttcttttctaatgcatggaaagtgatgctcacatcgatataagttctttgctgactgtgatactcaaacattcgattggagtatataagtagattagatacttcacgctcgtgtaaaaatgacggggcgagaaacatgactcatacctgataaagctattgatgggagaacatccatcttgagaccaagatacagtgggtgttcctaaagcggaagtgtcaatactcgacgtattaaccccaaaggacgacggaacggaggagcggttgtaaaaccatatgctgatattgtaccgcaaaacaacatatagttcagtgacgttacaaacgaaatatcacacaccggtgcctgcaattatagagagactctcacctaactccagtgtcctccagcgccatcacccaggcgcctcctccgttggtgttgaatccatctccgaagctgagagtgtcattctgatccacggaacatccgataacagacgttgaacagtctttactgttgatcacacttttcgatgaagcaaccgagactttcttcggagagcagctatgggagcatatggtgtcagagtgagaaaccacatgatgattagcactcgaagcactttgtcgtaagaatggttgatggctggctggcttctccttaccctgactttgtgtgtaacgccatctcatttctgtcaagaagacaagcaaccgagaacatcaaagaacaccgcagaattttatgcccaacaagacgatcaataaactggtctggtctgattgatagtgactgatatcctggcatatgatgggataggacaaatcaactcacgagctcatcctgtttattcctgccagaacgctgacctctccgttggtctcatcgtcggcgactgttccaaacccaggggctaccgaacatccgaaaggcagcctgacagcatcaaacacccagagcgttccaacgttataggtgtttacggaggttaaccgagtagaggctcgacttgcaggcgtggtgatgttctcggagtctacctgataggtatatgacatgaagaagtgttcaatgaatgtttgccaaggtcgatagcggcgcgacggtacgtacttggataaccgcgttcgaggcagaattgacagatgccaagagaggtgtgtatgattgattgacatattgaaccttcattcatcgaggcaaaccagtgtcactctatcagttccaaaagcacgacgtgtgaaacaccatctgtaaaagatgtacataccgaatttatcctgtggatcagaaaatgattaattgttgatatggctttgttgaatcaacgcgtgtcgatgaaagatgatttcagaagccaacactcactcatttgtattgaacgcgaacccgctgaaaaagccctggccagagtgactctcgctgatagaatacacactggcctcaacaacggatgtgaggagtaccagaatggcgtaacgataggaacacataactacgatgggctgagattgaatgaatgtttcgaaagttggtgtgttttatgttcttatcgatcaacataaagcgacgcgacggtgtgacaagatgactaagcaccatatcttccgtaatcttctctagcgttgatagaagctcgacggaggcaaaaagccgactggataagaataagcatgacccaatcgttatctacgaaatcccaaagtcgccgagacgcgacgcgacgcgacgagagagccacgcaatcttcataagaatagatacgtgagtgcagaggcagatgaagcctagaatatggaccccactgtcgatttctgcccggtttacaccgattgagcccgttcaaacaggccgaaaagatcgagagcgttcgaggttagcgtttgtctatttctcctcggcggcttcaattcgggacaatctatcttggcacacttttcattccttttccgcttttttgcttttttccaaagctcttctcacgaaatgtgttgccctcgaaaacataaatcaaagtgcagtcaaagacaaaccagaagaaaaggcagagcagtttgttgataaagccagaagaagcaagaagcatgacgaatgtgtatatgttgtgtgtatctcttacaaaaactgtcgacctcgatgaagatttaggaagaacgtcggaagttttcacatatatcaaccgtggtcgatacctcgattttcagcaccctgtcttgacgttctctttcgatctctctgtagcgacccttcctaacaaacactccgctcagagtcaaatgacaacaggatgttgtttttgtgcaactggaggccagcttcgtataccaagccggtcagatgatatttcgaaacgtcggaccgtcctgccgatataaggcttgagttagggttacgcctgaaagggcccctcaacaattcctttatcacaaggcagattggtcagccgcctatcgactttccatccatccaaatctcccgaatcgccaacagtgtcgaagctctcgattttgcgtcctattctgaacattacccgtcctcgtctccggattgatattcttcttcggttcgttgaaagcatcttaatgcccgctgtcgctaccgctagctcgtcggccaccgcccaggcggctgctgcagctcaaccatttcaatgcattgtctgcctcaaacgcttcactcgatctgttagttccttatctctagatttttcgagctcctgaggagtgactcaactctcagtttcgtcttttcttgagtacaggagaacctcaagcgacatgctgctcttcacctctcgtcaacggagacatttccatgccaatggtgttcggtgagctttggacgtgctgacttgcgaacccgccactacaagacaaagcacaccgagcgttttgaggccactcgagcgttagctgggcccagtaaaccaaaggccagcagaaagccatccagaaacaagagcttgtccaacgctgccccgacatctatagtttccaattctcctcccgcaaccttagggcaatcacctgaccaattaaaactgccaatcaacaaccctgctttcccaaatataaatgggcctgatggatcctgggatttcgagatgctgggggaatcgattgccaagacaggtatcagtctgcctgataatcatatatggacatcggtaggctccacatgattatatcagtagagtaagtttgcacggcgtggtaactcatcttggtttgctatttttccctctcatctatcataggatttcaactccaacccttttgccactgatccagctggcacgagtttatttggctctctccccagtgattccgggtctacaaaacgagactggtcagcgacttcaccaggtgatggatcgctcttcgctcgctcctcaacctcaccgggaaaagctgcttctatctacgatgactttgttccaacatcggttcagatttcaaaaggtgtcggccttttcttcaagcacgttgcagacttcctccccttccttcatcagccaacttttgatcctgctcaggccagtccatacctcgtccttggcttactctgtttaggctatcagtatggtgatgacccagctgcggacaacctcgaaggatcaggtcaagacctctcatctaggtgcttcgcccatggtcgtcgacttgtccagcaatgcgccgaggagccttctgactctgctcagagcttggagatcgtgcaggcatacctattgttccaggtgtactcaatgatgtatctcgtcggaagctcggatgggttggatatgcattcaaagatcgtgaatgtgagtgattccgtctgtgttcaactcatagttatgcttcggtcactgatgcctactataacttttatctggaacagatctcgcgatcaagcggactcatgcagccacttccgacgagttcgagactgatgccagaccttgagagtttatggaaggagtttatcaaggcggaatcacacaagcggtaagtgtctccctttaagttggctccgaataggaaactaatcaaacctttcatccttttggccgttagcactatgctcacactgcatcatatggatgcgctatggtaccaactcctctctgttcctcgactaatctcgcatccggaaatcaagcatagcatgccatgtcatgaatctgtgtggtcaatcgctaccgcttccgactgggcacaccggacgcttgtcatgaaaccttctgcgcctattcctatacgcttctcagacgccatcaaaaaggtgctttgtgcggcagaaacgggagaatcatgtcctgcagaattctacactgtgggcgtccttcatttccttacgagttccttacgcgaggtctctggatactcagcaatgacaggtcaggtcagccaggaacgattcaaggcaggtccttatctcaaactatgtattcttcatcctatcttcataccagaagggattcatgcttatccctccctcctcctttgcagacactttctacttcactctcggctgctgggccttcatttcgatccaatctccagactgcgtctgcctctcaacggctagtcctagaggcaacctgggagatggcaatgttcgagatggtgtcctggtcgtcggcgcatatgtcaggagttgtggaaagcagtttggatgctgctctggcaactgcgtaagtagtcttgattttgcaaatacatcaaataatgacacgggtctgactcggctctctgtcaccctctttttcttctccgcttctagctcttgtcttgcaaattctagcgggtttcttattgagcctgacagcgtccgatcacttcaagtacatgccaactggttccttctttacctcgatcgtacacttatcgtcgaccaggaaccaccttttgtaacattttactgcttcagagcttggctcctcgccttgcagcttcttcgtaatggtacaccagacgctatgtctatcatcggaattgcagacggagatatggagagtgcactgctctgggcaggccgagtgttcgaaaggaggaagaggtggaaggttggcaagttgattctacagaatttgtcatccctcgaggagctcgccatgtcgttctaggtcgcgaacgaagtcttgggtcattctctcctagccttctttcgcttgtatatcattatttatcagctttatccaatagacgagcattggcgtatttctttccttgagattgtatggttcttatctgacgagcgaacgattcggacaccccgattgaaggagattaatgtcaatggcaagtaaaagaaaacatcttcatcgaaatatacaaccgagaaccagaaattatgttacaactataagagactagcacagaaaaaagacgtatgagaatgaagactggctggcatccataacaagagttgaaacatcctttttgaaccctcggacccctctaagtgtggcatatcaatcaatttaaacagggagcaagaccttgacaccgaagtactctcggtgctgcatgagtttaccatcgatcataacctgatcagcgccgatagcgtttcggacctgatcggtcggatcagtcgcctctgcgatctgaatctctcgccactgctgattagtgggaacctattacataggaaagactgtcagagacgatgtgacttgcccaaaaaaaaaggatagggaaaaaatgggtatgaaagggaacaatatacatacaggcacgccggcgtccataagcttcttaaactctttgtatacaccctgctcttcgatgcatccttcacgctggataaggggcgaatctgtgtagcaaacaagtaggattagaacggtgatctcaatatagaggcatcaagcgtacataccagcagcaggcgtcattcgcatatctcccaccgaagagttgaaaaggacaagcgaaaggcgctccgagttgagctgatccgccgggggcttgtatactcggtgtcgggtagccttgaagtgcccaccagagacgatctcaagagtctgtaagagtcaagaaacgaatcagtgtctaagtctgttatctgtagcacaagatgatgatagctgacctctccaatgttgagcaccaatgctccagccttgtaaggcacgtaatgccattcctcatcctgtccccagatttgcaagcaggagataggaacggagaagagctatatagatatattactgattaggtcaagacacaggatcgtttgagaatcaagactaatcaagccaagtacataccatagtcaagagaccaaagtcagtgtgaccgtgcattcggagaccttttgaagcctcctgagtagactgaggagcaggtcggaacaaggcgtgtcggaaatatccttcgtcagtggcagagccgtctacatgagactgcacgttgtcccaaaggtagtcgtcgggaagttcaagaactcgagagaggagagtaagcaatcgtcggttgacggatccaacaagatactgtatgtaaaatgcggcattcatctgtcagatactcctaatcatcctcggcacatcaatgatttcagactcacgttgcagaaagactcaatctcgtccatgaaagggtgaagacacgaagggacctggttgatatccttccactctctgtttgataaggaaaaaagaaagataaagaacttgtcagttcaaaaataatctagacgaacaccttcgactgcaacggctaccacgtacctggtgtaccagttgaactgctcaatgaagtctgctggtccacggtgcctcttaaaaccgtaagggtgcttgtatcccgaccagactcccttagcggggtcaaagagaagtcgatccttgtcctcctcactgatatggtcgtaaaggtactgggcgagcgagaattgtcggttaagctatcgagagggtaagaaagtgcatattgttaagtctacgtgcgcagtattggtttgatcaattctcttatatgaaaatgaccaagatctcacctgctcatacgagattccgtagttctcgaggaagataaatccatcctctcggatagatcgcttcacatcctcaacaagagaggcaacgacagcggggtcgtcagaatccatcttgctaaggtcgatcgatgtaagctccgcaaagttatgagtctccttggtgataggaggagggatccaagacgggacgtgaggcttgccctcaaggctaggtgaaggagggttgaaaggagcagaaggtgccatagttgaagttatgtggaggggtagagtgattgaagttgtgttggagaattgggaaaggtgaggataggtgactttgcaagaagacgattgaggctcccttataatatgttaagtttggtcaaagcaggaggagccctcacttacatctagccaatctaaagatcgccagaagtcagagaggaggagcaatacttccggagcatcttctagaggacagccggctctgtgcaagtacagtcagatgtagaatccggcccggagatggttgatgattagattgtcgcggctagccgaaaatgagattgtagggaggagctccttctagtgatttgatcaattcctcggctcctcctcctccgcctgcttatcacatctccctcctcctcctcacatcgtctttagatggttttgtccgcagcgagtttgaccagggttgttgaccacaggactataagggagatgctggttggacagaaatcttgacaactttcgttcatcttctgtacatcacaacactctctttccaccgtatcaaactctcaccatctcaactcaatctcaagtctcaatcatgtctcgcgagctcatctcttccgacaagttccctaccaagccccataactgtatgttcttctcactttgcagaagactttgcctaagccttataggcggggaaaaaacctcggctaatgctttttttctttctcaatgtgtttttcttgtaggtcctgccgtcaaggttcccggacttgtcttctgcgccggacagactgcaaccggagagattggccaggctactgttagtctctctgacttttactttttgtcttcttcgaatcaaagtctgatgttctttctttttttttgtttaatttccgcgttcaaaacgtagaggaccgtcttgcagaacctgaaagaggttcttgagcttgctggttcttccttggagaaggtcgtcaagtacaacgtctaccttgccgacatgaaggactttgctgccatgaatgccgtctacattgacgtgagtattctagactttgcctgtggtcatgaatttaccgctgagctaacactttcttttctttttatgacaccagttccttccccagcccatgcccgcccgatcttgtctccaggctgtcgctcctggcgccggaacggttatcgagatcgagtgcatcgcccaagcttaaaattcaaatcattccactgtacaaaatgtcatgcatgtcttctttagagccctgatttttttggtcttggtatggagctgtgggtgctatcgcataagtttcgtcaaagacttgtcgcaggagacaagattgacaacggacatcagaatttccaaaacggtgcttttaccgctatatataaaatcaacttgtatgcactaatgcctgttacaatcatcaacaagaactggcttggcacacggcatgtaataagtcttcgttattgatggtagacgagtgccatctcgtctaacagaggcgtaggtttcgatgatgagtaggtggcgaccatcaaacgaggatacaggacaaaatcatggttcttcaagaagaattggaacatccgcagagaggcacgccagacatggtttgagaacagcagggctaagtttctgctgtatacccaaactcagcgtccaaatgtgcgtgcaagccaaaagagatgagtcagtgtcatcttaatgaacttgcacgcgaagaatgaatctagacaagcttcaaactgtttttctgacaatccacggaatatgtgttttgctagaagatatgctgagtcgtgtctagtcgtaacagtacattctatacattctacaagaagcttcatcgagcctttttaagacgatcgtacaacctcaatctcctgctggtaccacaagctgatggccttggtgtcaccagtgatggccacaaagtcgaaggttcccttggccttgttggccaaagctccgttgttcaccaatcggcctgaccactttccagctgccttagctgccttggcgatcttgtcgatggcagcaacaaattcgggctcatcgcctcgggcggggacgtaaccaagaagcgactgtgcgagatcgttaggtccaatgaaaacaagatctaaacagagtgaagcgatagcagggtcaggttcgaggtcgatatgcatacttcgaggacatgcgcgacttaccgacaccgtcaactgcgcaaatctcctctacgttctcaactccagccttggtctcaatctggacgatggtgagcaaggtctggttggccgagagcatgtactcaggggtagtcaggccgtgggcgatggaagggaaagcggatccctgacctcgaagaccctgaggagggaacttggagtaccgcacaacctgctcggcttcagcagccgtgttgatctgaggaatcatgacaccgctgaatgcgaagaagaggaagagaagaggtaagtccgaatgctcttgaatgtgaagatatacaacaatgaagcaattgagcctgtgagttgaaaactcactgggcaccggtatcgagagccctcttgaggatgtctccggtagttcctcgaactcgaatgataggactgacaccttgggcggcgatggcagcgacagagttgtgcatggcatcgtcgccgatgtttccgtgctcgcaatcaacgatgacagcctgatggatgtgtatagtcagcaaggttagaaaacaaaagactggaacacgcagaccaagacaattatcggcactcacgtcaagaccagtaagggagacgatctgagcatgtcgaaccgagggaatggccatgaaggtggcaagagggaactcgccggccttgagcttgttcaagagcctgagtcgagggttggagacggtagtagtgtgagcggtagggaaggtagtcatgatgatgatgagatgtgagaagtactgggaaagtagagttggtagagagagaagactaagatgttgttggtgaagggaaaaccaaaaacgaaaagtcaacaacgcacaagagctttatgtcttcacgcattggagggtgcagccaggaggtggatctatacaaatgacgacaggtacatcgagatcaaattaaccggttggataagccgtgtgatgccggtgatgttagatgagcagccgaaaccagagtggaaagtaaagcggagtgataaccagggaggagtgaagcgaccggaggcgcaggcgaaagaggagtgaggtaaagaggagcagtctctccgcgagaactgactgccgcggtgatctaactaaagtctgatatctcagctgtaatctggttgttatgattgatctctaatctacaatctaagatccgtgatctttgatcggtatctagatcccggcctaatctcttgtgttgttaacccgaggctgagacttacccgccgactaaagccgggaaaacaccggtcccggcccagtatcagaaataagcacacgaactcgcctgctccgcacttttgatactcccgtaggctcctccctcctcccttgagtccagtcatgcaagcatcgaggtcgattttcactcagggttctgtggccaccaccctatcaagcgacggagagataatcagcagtgccaggcgaatcatatcactctcctcatccctcctcatcctcctcaattctctctgaccctcctccgtagattgagattgagataagcccgtcctccgattggtgaggtcgacgaaaattggttatgaacccctcggattctcagcaattctttcttatcaccatccctcgtccttcaattccatctctcatacctacctatccacttccactttcatcatgaacaacatgccggaactcaagaacgaggtcccttctgggcaacccacaagatacgaagaagacatcgaaaacaagggtagcaaaggctctgtcgatgtcgacgttctctcagtgagagaatctagattaccagagtcccttcgagatatcccacaggatgagttggacttgatgaagcgcaaactagttcgaaagatggattgggtcatcttgtcagtcttaactctttctttccgtcctatatcgttcccgttgactgacgaccgagtcttgtcttcctactttcagccctatgtgagacttcaacatctactgtttgactctttttcttttctctcctgcatgtactgacgctttctcaatacagtattggagttctttacattctcaactatattggtgagtagcttcccctttgacaacaagctttctgaagagtcttctgaccttgctttcggccttcaccttcgtagatcgacagaatctttccgccgccaaggtccagggtatcatggcagatctcggcctcacgactgaacaattcgccacagctgtctctatccttttcgtcggttaccttcccttccaaattccctccaacttgcttatcaccaagatctcccgacccggactgtgtatgttaactctcccctttcgaacagaaagtccaactgtgtttctgacttcgcttcttctccacgaatagatatttgcggttgcacttgtatttggggagctatctccgccgccaccggttccgtcaacggctactctgagctcgtggctatcagagcctgccttggtattgttgaggtaagcttctttcttatcgtctttattatcagcttttttgcagctgctgatcatccacccctcttttatatcaggctgtcttcttccctggtttgttctctcgaccttatgcgcaagattgaaaatggttctaacatgcttttctctatcaacctcctctcaataggtgctatctactatctctcagcttggtatcctcgtgctgaactcggaaagcgtattgcaggtctttacatcgctcaacaattcggtaatgctttcggaggtctcttcgccgctggtgttctcaagatggatggagctgctggtgtacgagatgatcttcccttttcatgcaatattgagaacaatcatcgctgaccaaacgatttactctttcattttttcagatcgctgggtggcgatggctcttcattttgttcgtttcttgtttttgactcttaggtgaatataacacgtacttatcatctccttcttttaaccacttgcagggagggtagcgcaaccgtcttgtgcggtgctatcttcgctttcctcatgcctgagtaccctcacaacgccaagattttgtctcctgtggagagagatcttgcagtctggcgtatcgagtccgagtcgggagcggctgagggcacggagaaagaatccgtcctccagggcttcaagttggcgtacgtatcttctcaatcactactcttttcttcaactacatgctgatacttcctttgaaccaatagactcatggatggaaaactctggctcttgatttggatgaacatgatgtctcaagtaagcttgaagaaccacaacttatatgcaactacacatattgacaataaggttctctttgtcacaaacagtgccagggatctatcgccaacttcttcccaactgttgttcaaggtcttgggtacggacgaatcttgactcttgttctcactgcccctccgtaggtcccttcctcgtgtttgtcgattttgaatcttgactcacacgcttctttcctacagttacatctttgctggattcatgtacttcggaatctcttactactcagacgttagtagaaaacttcttccatccttcttcttgactaccatggctaatgctgaagtttttcacctatacatatagcgaaaagacactgtctacaggccgattttggtccttattgcgatcggtaagtagattatccatacatctttcactgtctcgaaaccaaccgtttcttaaccccttctctatccattcagcctgctgcatgtacatcattgccctcagcacgaccaacattggagcccgatactttgccctcatgtgccttcctttctcgtctgttggacctcagattttgtcagtctcaaacacgtttcttctcttccaagcatttgaaggaagctgacgcttacgtctgattttgcgctcataggatgtacaaggtcatcaatactcatcttgctagacctaccgctaagcgagctgcttcttccgcccttgtcaacgccatcggtggtaccgccaacatcgctatgagttacgcatacatcggatcgccccgattcaccatcgccttcggaactgtgcgttcaattttctttactatgcctctcgttttatctatctcttcttgttcatcttactgacctagcgttctctcgtctttttttttttttttttt

SEQ ID NO: 88 - DNA, 1950 bp, Xanthophyllomyces dendrorhous
tttttttttttttttttacctcagctcctcggatgtgccgtcatgtttgctttcacactcactgtctaccgatggcatgtgctcaacgagaacaagaagctcgactctggcgaccctgatcagattgctcaagtcgtcaagcgaggtgttactgaggagatggttgccctcggatggaggtacgagctgttctagaccaccaagcgggtccggctatctcagtgcgcatgttaggtggaacgatccccgactttaaatgggggtcatactatagattctttggtttctcttttctatttttgaaaaagttgaagacggtcttgataaagaccatttctgggttctatttctatcggttgtttctttttatcatttcactttgtaacccctttggtagttcatccgttgtatgttcgtacatgttacagttattcaatgacttctctcatttgccgaacatatatcacgcatttagtagtgaaacagaaatgtatctcgagaagtttgcaaccaaactatcatgccttgtttttcatgcaattttctcttttagagtcctatcacttggtcttgtgtcttgtatctataagtttatagatgattgcatccacttcttacttatctgatcgcaacccattttggagtttctcaaaagcctcctatgctagagtgataccaataatttctgctcacttctaaaaagggaatgatcatatgcatatgactgaagatatgtattgagtatttcgcagtccgcagaccagagggctaaggacgagtggagccaagaataaaatatccagtctggttcagtatcagtgtctgtcaagggatctccgcccttgaagatggagaatgggtgttcttgtgtttgacttgggttttatgttatcaggatgagcttgaaggctcagaatcgcggtggattatggaagcgttgaagatagaggcactggcatagtatgagatgggaaggaaggttttcaaaacaaggagacagattccaaacttgaggaaaaagagcaaaggaaagaaaggagaagaactatggggaaaaggagagtcacaaagtacttgtatttcctcatgcctcgagcatggaagtaggacttgcaaggtgcatacaggtacagaaagcgagaaggtggaagatacatgtagccgatattgaacatatcagcaaaccctgtataccgcccggttgagtctctgacaccaagctgaatgcaatatgacagttgccgagcctttccgacttcacagtctggtacactaagtatcgttccatactttactccgacagattaagagtctgaatctcttcgagaaattaacatgtctgattgagccccctccccaacgaaacacgttaatttttagaagagattcagaccctcagtctgtcggagtaaagtacggaccgatacagtgcacaggttgtagacaagcattgcagtatatgtagtcaagttcaagtgaaacgaaaaaagaacgctatcgacataccccagcatatcagaatctgcttttgttgacaaccaagacgaaaggaggtgaagaaagaggaatatgcaatgggaatggcgagacttttatacgcaaaacactgattagtgaagccgaattatggcgaaaaagccgaaaaggtaaacataccgatacaaagatatgaattagtagagcacggtcgtctaatcatgacggcgaaggaggttaaacacttcgggctgtgttgccgagacaacgctgaccgaaggcagcacgtgagatacggcgatcggcgaaagacggtattggatatagcaatctagacaccaaccatcgagtgttgcgcgttggttgactttctatctcttcggtttctcgttcaacatgttatttcatttctattttctatatcatctttatttcacttctctctcgttttatttccgttctactttctttcta

SEQ ID NO: 89 - DNA, 360 bp, Xanthophyllomyces dendrorhous
ttgcttccatctcgtttctctttcgtttgcatcttggtgatcttgtatatacagtagctactttgtttccttttcctttcttctttctggttctctcaatcaacttactcactgtgtgtgtgtgtattcttgttgagagaatcaggggatcagagaaccagtttgagagaactagtaatcgggtctatttattgaggaaacctttctagctcaacgagagaaacaccattgaggcattcggaaactggaagtacattgttgtctgtgtgactccaccattagaatatcacaaagtgctccttaattttattagtttgtaaaccaggccgtgaagtagtttctaataaaattaaggagcac

SEQ ID NO: 90 - DNA, 498 bp, Xanthophyllomyces dendrorhous
ttgacagattgataagatctgggctagattgttatgttcgctcaaccagccaacaacgataaacaaaattgagctggtttcatttgcagggcttgtaaacctcagttcactgcattcaaactatcttcgttgctgaattgttctgaagtcctttgatggtacactgccgttgtctctcctacatactaatcttcgcacgtacatacaattgtttagtcgtatacagagtgagcccttagtgatggagtcaatcttcattacgacgtagtataatttgtttgatacgtatagcgttttcgcagatgaattgtcacaggctgccatcgtgcgattttaagagtcaaaggcgataatgactgcgttaatgtaaagcagtgcaattttcatatgggctttgttcgtgattcaacaagctgtgtgatttcgatgaatgtttcttgaaaacgccatagtcctaccgtgatatgagcaacagccgatgtataaacaaactttttg

SEQ ID NO: 91 - DNA, 417 bp, Xanthophyllomyces dendrorhous
atgtataaacaaactttttgttctttatgctgatacgtgcaaacagcttgcaaagtaaaatttggagaaacttataaaactaatcaattggaaggagatcgaaacctgatgatcacgaacttctcgtgcgccaacacatttttagaaaaacccagcgcacgctattcagtcatgctgatatcagtatatgcgataagacattcattccttattgctgctgtaaacagaagctgaacacaaacgatgacaaacctgagtacctctggcgcctgactttattgatggtaatcacataaatgtgccctctttcaccctcgactgatgctgtctcagtcaacgtcttggcagctatcttcttccatcgtggctgtttctctcagtgcttttttagcttgtttttttatctttcttctcatt

SEQ ID NO: 92 - DNA, 6985 bp, Xanthophyllomyces dendrorhous
acaggatatgagataacgatatgggacgatagagcacagctgtgcggtcatgatggtgcaggtctgagtgcactccgggaaggatggccggagttattccggccgaaagcgatcatgtgaacggcgacattcggtgagaaacggaccatcggcaagctgtgcaaaacacatggacttgacgatgaacaggaaagaaagaaatgtggtcggcaaagtatggtcacgtgacggactaggcagtgagttgggcagtgagccgggcagtgtggccaggcccgccacatgagacgtgacctggatgcggtgtcgttacacaaggctgtgtaattccaacaacatatgtgtgagggagcccaacatgcttagatgagaagaaagataagaataaagaaactaaaacgatactaagagaaacagccaggatggaagaagatatctgccaagatgtccactgagatagaatcagtcgaagatgaaacagaaggattgtaggaaataaacctaacatactgaattcgaacgaataattccaacatctatgaccatcttgttcccatctcatttccatcttggtgatctcgtatataccatacccagtttatttttctttttccttctcttttctgatcctctcaatcaacttattctcactttgtgtgttaacatttgtttgagaaaatcagctatttcaataattcaatcggggaataaagaataaaccagtctgagtgaaacaaaaactataaactcatcttgagttaagaatgatgttttattttgatccagcacatggaaacaatactctcaagtgctcttgagatttttacgaccgcgtgggattgatttacaaaattgacaccttccactcagctttgattcatcttgctcgacattatagcgcacatcttatttcattatggtcggtactcatgcatcttattcacttcttcgtctttcatgattcttcagtgtatttttccatctttttagtgtcattttcttgactacgttttcttgcttgtatcttcatcggtatttcggaatttattctacccgacgtttcttcatgatgttgacacgcgtgccatactgggtatctcaagtagagatacttctcaagactttgaaatatcattcctcctacatccgtcatgtctctcctttcaacagcttacatacacaccacttgagcttcaatttttttttgtctgagtcaattcatgttcagtgatatgtcgatagcttgggcgttgtccgcattcgaactttcatcacacctcgccgggtgaaacgcaccgaaagtcgtcatttttttgtgcattttaaggtgaagacattttgagattttcttcatcatggaagtgataggacatctagaatttatttcaaggataaatattgacgtatttcttcatgtgtgcttatgtttgagcaggaaaagactggaaaatatgtgagatatgtaacgggccactaattgaagtttttgaacacagctgacgagtggttccagattcgatcaaaactgaagatgtttttcgtctgatcgtgttcaattgatgagatactattcaaatttttaagaaagcaaatccaactcaagccaagacacaatgattcaattgaacatactttagcgcctagaagtagtttgtctcatcttacgtttgaacattgaaaaatgagacaaactggagtggttttaatacatgatgaacgaactttatcagatgcataaatacatacatgatcgaatagatagccatacatctcagttgtcaaatacaacatacatgcatattacttaccacagatgaagaagtccatatgttgatcaccaacgttctcacacgtgcgaatttggcttgaatgacttaagctgtgaatggctgatcgagtttgtgaaaacactgtgatcatgagtagaactcgttgaggtgttttctactttaagttcactcaacaactacacgtcggccgttattgtgactcaagctggcccacttgacgattgacaatgcaaaagattcccacaagctacgccaagcattgaaaaactacattgtctagctcatctgaccgcaagtaaatgagagtgattcaataaacaacttcaaagctcatgctcagccattttcttttctttacattggactaatcgtgtttcagattttgatatcaaagttagaatgcgagaaatatttaatcagcatttgtggtgaagcaatgatgatagctagtaaattctttaattgaagtcatatgcttatcgatgtaacaacaatactcgtagaacgcagtcaatactgaaggacgtcgttaccagctctgatgaagatgaggagacataataaatcatcaagtcgcattgatctacgtttcaggcgatcacaaaccagcacgcaacatacgaaagacatggtgtcagaaatcaaggtggaggcatgagacattaggtgaatgtttcgatgatcgttttgtatgccgagagattataactgatatgaattaattttcctatggaataagatactgtactcatatgccttaccattctcaaataagcacctgcttagctcgtcacctgattgcctgggtaaggttcaaactcataaactgataaattcaagtggatatcgacacgtctttcaaacgtttggaaaaaattagcaaagcactcacttgcaacagttgtgcatacgacattttcataaaggtataaccttggcagtgctgtaacttatgtttgcggctggggcgcctatatagtacggaaacatggctatgtagaactaggagctattggaacggctgtttattgcttgactcctctatctttgattgaaaacaaccgcgaccgaacaatctgccacaactgaaagcttggcacccacttgtcgcatgatctcagatatctcgccattattttggcatatgcaaatgtcacctttccaactgaaactgagtttgactattgaattattttacataccttgatagaagattaacaatatgtgactgtccttttcactcagatactaacaaacaatccgacccctacatcattgtctggaaactgaatcttttcccccagatttcgcctttacttcgatttcgagtttaagctaaagcttaaatttgaaaagtttatcgttgagtcaagtgagtgtatcatgggatttttgacagagaaatcatcaagtaacttgtgatgtgtgcaattttccggtgttttcaacaggaagtctttgtaataatgataaaatgttgagcttgggcaatactctatctcatgcgattatcgtgtcatatagggaatcgccaggtcgtacttgcacggataacatatcacaagatcgatgacttgacatatccttctattctctttatggacgtatagaaagcaaattgcagcacaaacttttgctgcacatggttcaaaaagaagaatggcgaactacaaagctagaaaaaaagatgtgttcgaccctcaatactttgtttatcataatcaggttgtgtctacttcgatatgagcttaaagattgatcctatcttttgtttatagacaacataccttcaaagacatagtacatgttcgtatagcatttcaaatatggttgttgaattcatattttatttggtgggttccagatgcatacctcgtaatgaaacctgttgttacttaagcaagttcaaccactacgattttaaattcgtattgtaacaacaccttggtctcccgctcaatggaaaagtacacctcagttccaatcagcagctgagattataatgtgttaccaaacgtacacaaatagacaaacctggcaattttgacgaagatataaggtgttcagagtttgaatgccaccaactatattggcaaccagcagcctttatttgtctcaaacagtatcaaagacaaacttttttacctcctctatgatggaaacctcatagtggcactactcaatatcaaggtggaaactattcatgaatcaacacgagaggaaatggtagcaaactaaaagagtttgcaatagattgcgtctttcgtatcgtttttgccatttatgaggtactttcgttttgactgcgaacgtgtctatgacatacacgactatttgttattctgtacttaataataccctttaaaaagatctgatggtcatcacggttgtatgttgatattgacaattcgatgacgaaatatttttaacatttcagcttagaattatatatagaatctcatcagttgacaaacgagaatcttggctaaagtttccttcttcggtaccggacctgccaccaatgcacatcagacacctggttcttttactttttcctgtccctgcaagtatgaccgtgaactctcaagggcttgttgtacgcagtccaacctggtgtttgaaaagcaacccgattcgtttaatgtatatattccgtatattatagaatcaaattcgtatcgcaacggctttcagaaactaatgttatgaaatgatgccttcttcaaaaccaaacataaaccgtcgattttagatccatgccggtcgtttgtcagcttctacggctcacacctccctctacgattgccgatacttcgtgtgtcattgcttcttgactgtttttacaatgcacgcagctcattacgcccatttcaaaaaaggtaaaacaccaataatggtacggtatcaagttacctatcattcaggcgcaaatcttcattaaatgatcacagtgaaccatccaaaatttacctatcagtaacaatataaaaataacagttccatagctcaaaacctgcatatgtccgtgttgacgagcttttccgaccttttccaaaatagttgacaagggtgagcttcatctccatcactgatttctgaagtgttatatcactctaactccataatacgcgcaaatctcacattatgaataaaagagtgacatcaatacctgtaattggtctgggcaatgagaacactttataatacatattggcatcaggtatgacaatcactagttcctttcagttgggcacaagtcatacacaaccatcaatcaataaacttttttatatagactaccaaaataatttgcaaaagctctacccacaatgagttgtttatatccaagtaagctcgagtcttaatctgtaaagaagattgttggatacattttttggatgagcttttgtgttttatcgatgatatgttatgttcattctgtatgatgatggtatattcagagaatgtaaggttgaacgtaataagttgttgatcgtcaatcagtcgacaaagaaataatttcaaactgcaggtctagtgaatcagaagatttgcgctgagcatacttcaagcctagaggtcagagcatatgatgaactggcagaaaacatcagttcattcaatcatcaaagtagaagacagatttgagagagaagaataaatttccacgagtgagaaagggagttgatcattcagttcggtatcaaatcattgccaaatacttcttcagactcaaaaaatgagaagcaattatcaaaagcaagtgaacggagaacattgaatggatggtccgatgtcatgtcataacatataacaagtaatccaatttgatgtaacactgctaaacataaaagtgcgaagctgtcagatttttgatccaagctggtatataatatcatgacatattcaactttgtattcgttctcctttgccaactaagcgctttgaaatatgttgatacaagcaatccattaatttcagctcaagcaaaacagtatggaagagtacatatctcatgtgagaaggtctttgacatctacagtttacccacacccttatatagcattgtctacatggtttatatcgctcaagatttcattttcatcataaacatcaattggaaggtgcgaagatgaaagtcgattgaatctgatgatgaaatcgatgtttctcaaacacatacaaaagacttgaactgatgcttcaatcttattgagaatgttcaaaaggattcgacccaggctagcttagcggacatattgcaatatatatcatcaaattttgaattcaacagaaataacgacacttgcccatatccatggagtgagacatatcatcgaacaattcaaccttgatgactgttaggttgtataattcataaattgctttctaatctgtgcagcgacttcgatttcacaattctttgtctcgaacatttgagacgatgtctgtcaacaaatttttctgagcaaaaacccactactatccatagatgatatattctatttgcaagatgactcagcatccagcacgttgcaacttactcaataaaaccagttcgcaaatcaatacaacggatactgaagggtttcactgttggccatatacccatctttatcgaggcatgtcagactcttaacgaagaagcatgagggatggtgaagagcgatgcaatatctttctcaaagtgaaaacttgtgactaagaagaatcacacttgacagcattgaaagtaaagacaggataccgagtacgaagctctgagatagcatgactattatttattgattgaacatgctagatgaatgcgactttctttcgcatcgtattcctccccatcggacgggaaatttcaactgtttggtggtagagctatgtgcctcgcgggcagtgtatttgaatagtaccgttcgagaagggatacatggaacgtcggatggatatgcatggtcgatgggagagccagtcgaaatgcggaattgccgacggctcgaatgatcttgaaaggaccaagtagcttgaaatcgagtttgtcactcggacggtcaggttttacattcacccgcttgagaagcactagctcgcctggcttgaatggaggtgctggtgttctatgttcgttcgcatacttttcctggagatcttgtgcgatcgacatgcccgaacgacagaacgctagcgtcttttgcacatgc

SEQ ID NO: 93 - DNA, 676 bp, Xanthophyllomyces dendrorhous
acagcggcaagtcgacgatgtggtcaagtgagatcaaagaccaaggtcggtctggaacaggcagtgactgcagaagaccatacggccgatgccggcgaggcttcgatcgctggcagatatcactgttgagaatacttgaatatggtgcattggtttctgcttgtcatctatgtacctcagccttagctagcgcactctgccagctggcattcttctttttttcaagagattcacagtttgttcttttaagagtctccacagcaatctgtatgaaatgataccaaaacacaacactcagtatcacagattgcgtatctggtgaagactgagggaaaaggaatgagagatggagaaaagagggtttatatagacgagagaaagtgaggcatataagtcaagtaatctagaaagagagggactgagttggcccgagctggactgagttggcccgagtcagatggaccatgaaaagacacaaaaggaaggagaatagaagacacaaaagagaatcaaaccaactacgctgagcaatcaaagaggttggtatgaccagaagtgttagtaggattggattgtatataatatacaaagatagggaacaatgtagtagagtgctgtagtagtagaacgctgtacttttaacacatgtttcaacatgttctgcaagatagaacag

SEQ ID NO: 94 - DNA, 451 bp, Xanthophyllomyces dendrorhous
atatattctaactcagcacacaaacagtcttttgtgatcacttatcatgatataaaataacaaacctgcaagatagaacaaatacattctaactccagaacacaagtaagctatcgatgaacacgatacaaaacaagagagaaagaaaacagaaaaatagatatggaccaacctcagcacacaaacagtctttgtgaatactgaggaagggaaaaagaaaaagaaaaagaaaggaaacgaaagcgtcgagcacagatatatgtgagagaacccaacgtgcttagatgagaagaaggataagaagaaagaaatacaatagggaacacttggtgggaaaatcgaaggctgggatgtatcttgatcctctcgattgtttctttgagacgatcgattcttcttaaataaacctaattataattctcattataattctctaattctctcattctct

SEQ ID NO: 95 - DNA, 442 bp, Xanthophyllomyces dendrorhous
ttcacgtagccaacggccagccgatgaaagtcgtcggtcgaggccagatcagcttgctcagcaagccagcgacaggtgacgaacagtgcggattcacactgaccgatgtgttccatgtgccggggatgtcgtccgacatgcttgtatctctcgtctctcagccagctttgccggatcaaaggcatcactttcagcggcgacatggatcggatcgtgttcagagacaagaacggcatctttctcaccgcttcaccacacttgcaaagcctgtggtcgctcgatgtgacggctcggccgccggcattggctgcttcggtggtgccctgcaagccggagatcgagatcgatctcgttcacagacggatgggacatctttcgagatcagctatgcatgaccttttcgcttattctcgtgtgttcaccaaacagataagcaagagtg

SEQ ID NO: 96 - DNA, 45847 bp, Xanthophyllomyces dendrorhous
  misc_feature (883)..(892): n is a, c, g, or t
  misc_feature (1395)..(1404): n is a, c, g, or t
gagcgtcctggagaatgaagccgacgacgtactcgagtgtcattaccatcgctttgccctctgtgtctttcggtgcgtttgcgatgatgcttcttctgagctgtttgccttttgcagttctgggaagggcccgaagaagagtaaagctccacgactggtcatttgtattgcattcacatttcactctaagatttcttatatcattcactacgtccacaaactgatccagctgtgcacgaaggtcatgagtataatcaatctctatagggtccaagcgctcatacaatagaaactcgcccgagaccccttccagtcgatgaacagacctcagaacgtccaggcactcggccgatgtccggcatggcttcagccacttagcctccgcgatgtcgatcttggtgtggatccagcccatggttgtgtcgtcgtcttggtcccatgcatcctgcgctctcggatggctggcagatgaccgtggcctctcaccagtgacgatcgtccagagcttcatgtctcgaagagcaaaccggagtcggctctcccagacaccgtagtcgttggcaggatggttcggagggtggaaagtgttggaattattcgttcgaattcattatgtcggaatcatttcttagacttgttctctttcacctccaacccattctgtctcagtagacatcttggcagatttcttcttccatcctggctgtttctcttagtgcctttttagcttctttctattggatatagcagtctcgaaatcaaccaccgagtgtttcgagttggttgactctctatctcttcggtttctcgttcaacatgttatttcatttctattttctatatcatctttatttcacttctctctcgttttatttccattctnnnnnnnnnnacatcgacagtgacatcgatagatactttgacaagagcatatgcattccctgtgttggctcacgtcagcacaagactccctttcccacgtcgcagaccgtgatcgatcgtcctctgcagctcgtacatactgacatacaagggccgatgcctgtcgagtcgaacggcggcgcaagatacatgctcaccatgatagacgagcatacagactatcactgggcatgggccatcaataaaagcaaatacagtttcgtattgctgtagattagaaatacaaaacaattccaaattacagggaacaagtaagctatcgatgaacaatcagagactaagatattatgagaataactagtgaagcaacctcaacgacacagaaacggttctggtaaatgctgaggaaggagaaaaacaaaagaaaagaaagaaggagaaggaaagaagtatgccagctggcagagtgcgctagctaaggcttgttggaattagcagtctcgaaatcaaccnnnnnnnnnncatctcgtttctctttcgtttgcatcttggtgatctcgtatatacagtagctagtttcttttcttttctttcttctcctttctggttctctcaatgaacttgctcactgtgtgtgtgtacaattgtttgagagaatgagagaattagagaattataatgagaattataattaggtttatttaagaagaatcgatcgtctcaaagaaacaatcgagaggatcaggatagatattaatttgagagggccagagaccagaaaatatagtctgagagaagaaccggactctcgttcaaatgacttcaccgataatatatcccaaagagctccctattgtattaagaacgaaaagtccatttccccttttatttcagcgattatcttcaccaacatgtctgggttgagattgatgatggttcaaatttaatgtaaaatcaacacagatcgtatagtatagtggttagtacttccgcttgtggttcttcaattgaaacgcaaagtcgcggacgacgggtgttcaattcaccctacggtcaaattttacttttcttcaggaaattgcgcattttgaaggaacggcttggctcaaaacatgcgtaggcacacatgactatgtataaccagtaacatatgttgagtaaacttgccataatatcgagactacggccctcgcatgagattaatcacaaaaataattgggggtacgccaactatcatagaaacattgagagcatagaaaaaattggcgtagatgtcaaggtcaaaactccgaaatcatgttctgacgtatcgatgtcgaaagaaacatattctcaagaacttcatggtgttatgttttcgaaaggtgagagagcaatttttggcttagcgaccaaaacatcgttgacaaagtcagggtcagtgaaaatagtaatgagaaggaagaaaaaaagaaaagacgggaagaaagaatgagcaaagagatgagttgttcacgaagagacacaaaacgagaggtagtcaccaaaacgaagacagatgggggtatgcagctagaatgaaaagaagctgtaccaagaaatccccgccggaacacacgacgaaatccaaacgtcttgtgatgggtaatctgtcgatgtcgacctactcaatcggataactcatctgctcggtcagccgctctttgatgagatgaatgatgagtggagacaagagttaatacgatttggtcagaaaaacaagaaagagatgtaccagacgacagcggttatgcaagtcctaaggttgtggtacatgaagagaacagaaacagtggtatgcagatgtagcatcgatcggatatcgttgtcggatgcgttcgttatgaaggcgaaacaatatgcgatgaacaacttttcacaacgcccgattctacgttttggttgacgcagaggatacgagtagcttcgagcattaaccaccacgaagcaactaatatacatcagcggtgaccatcatgaaaaaagggggctgttccaatcttcgacttggcctttacgttgatgataggatatctgatcgtctagaagaagaaaagtattgaggcgatgatggtaagtgggttttatatcgatagaagcactattggctataacgctttgcacaaagacgacaagtagatttatagatgtcgatattcgtacatctagtgaagctacgagaatgttggacttctaaaaggctgtcgatcactggaccattcttccaacagtatatcgacttaaccgtcgctacattgccttgctattaccctatcaatattccatgcatctgttcgaggttccgtgctgaacactccatctcaggctctcaagagttccttgagagcatttggacaatgttcatcacaacacttgagatggttgcacaaacaagaagaaaatcaataatatgtagaatacttgaaccggaccagaattcaaccaccacgaaatggttggtctatgtgctgctcgctcgcatccttaaatgctaccaatcagctcgagtatcaacagcattgagggaaactgaggtgtttccagcgtcaatcaagacaaatcactgatataaaaaaataccgacagaaataaaggatgaactatctcacaaaattgagggtgagagatgctggagtcaggaacggcggacgatcctgatgagtgggaagcacagcagatgatagacattgatagggcaaagttccagataccagtcacttctctcgaacaacatgagaaatacaccgccaatttagatgatgatgctcaaatcgaaaattagagaagaatgattgttctttgatgtcatcagcaaaaatctgtgagtgagggtttgacacgcagcttacagaagaagagaccatgtgaatataaatcgagacacagagaacattttcttgtatataaattggagatcgttttagcgttcgaaagttccgaaccaagaggacaaccagattttgatctggaatcgtcgaccgaaattttttgaagtcttgacgcatcaatgatggaaaatgctcagatttgattgcacattctgacgattggtcgattgtttctaaagatgaggaatccattagcctctctcttctgtctattgcgcttgaataaatacctttgagccaaaagcccatccaggttgcggcgaatgacaatcttggaacagacagatttcgattggccttgaaatagttcagtaatgactgataacgaaatcagagctctttgttccggcttgttaaggaaggtcactcagacgcggttccgatcttctcgatatctagttctctaatccctccgaacagatataaaccctgtcaaaaggtgtaagtgagttgattggaagaatcggaaagagcacagggcgaaacactagctattgtttgtacgagatcacgaagatgagaagagatggaagtgatagagaaggaacggatcgattatctccttggtcacttagataacgaaaacgtagattttatgttcggattattaaattccatacctgttatacattcgccacgcttgtggtcttggttgccaaggttatgtaaacaataggctatgtattatacctcttgccttgcaaagccatccatccatctaactagttgttccactctcgtacccatttctcaaaatgttccttgccccccttctgcttgcggcttcgatatcccttgccgtcatgcctgtggccaaggccgcttccggaaaggatgacacgagtacgtatagctctgatttcgaattttcatattcatcggttgtacaccggtgtcccaattgattttttgccctggtgtggccttgtatatcaaacaggtatccttcaatacattttcagcttggaaaagtacgcacatgtcttctacgagattacagacaactctctggaggattttaaaagaacatatggtatctgacgtttttttttcgtatcgaatgcagcttccagaacgcgttttactctcaggctctcgcaaacgtcagcgcttctcaatttgatgcttcagggtatgatgactgggttcgatcgagagttgttcagagtaagaccattactcttctgcttgacttgttatatcatcagctcatgaactcgccttggatgttacttaaaagtcggtcagcaacaagccactcatatctctcagcttcagacactattgggtgatgcgtccctttccccctgtacatactccttcccctctttggatcccacatctctcctccagttcgcgtccgacatggagaacatccttttcgcctgtacactgggctcgtttgttgatctgcaggggaagaacgccagagcaatcgttgcaagcctggttggaaatgaggcaagacatgctgcctggcttgattcggccgccctaaagagatcgccatggagtggaggaaaggatactattataagagatctttcggtcggaacgagctggatcaacccctatatcatcgaatgtccatcgagtaagttaacctttcttctgaacgaccgtcgtggatggatcaagacgcctaaagtctagatgctgattttcgatgacttgttcaactccatagccaatccgtccatcgctgcaacgacttacccttcggctaccttgcagtccacagccactgctttttcaaatcttactatctcctacacctcttccaaccaggcggagtcttgtatgtttcgtccacgcttgacatttatcttgaatattggcatatcaacgcgtgctgttcgctttgctgaatcttttttttgtatccgatttgtagtgatcatctaccaaggaacctcatccacccttctctctataacctcgggatcgggcactggcacagtgactttacctgcagatctgacgggaaggtcttatggacttgtcgtcaagactagtacgtgttccgttcccttggtctttttcaccaaagtccttcgttcacgctcttttcgcttactaacatgtttttccatgacatctcatcgctcatcctcaggtgctggctcaaacatcactgattcggatgtggtggctggtccaatcattttgaacctaggggtttcttccgacagcactgacgcttgatctgtatacttttcagccagtttgcctttaatctatcatactaatctgcttttagctacccaaatgcttcaatgacttctttcattcgctcatagtgttacaaatttcgatttttgatttttctatcttcaccccagcttatcattgtttttatgtctctccttttgcaggcccgttgaaaatatatcatcagtttctaattatcgctgtgacctctcgcaaatatgctactgcccctctatcatttaggtatcacaatgttctcaaatactgagtttgcgtatgtcatttgagaaggaagcgacataacccatataagactgaggtagagtagatgaatgaggagagaggagtgaggagtgacaatcgatccgaatcaagatcaaggaaaacatagacggattttattcaatatgggaaagagaagaacaaccaaaaaagaaaaccgaacttgacccataaaactatacaaaccgccagaaaatagtacagagaatcaaacatgaagaagagaaagagtataggacaattagggatgaatatcaattggtctgagacatgcgttctctcgtcttctgagcgaaggcggcggcctcgtcccgtgtgaaaccatataccgagcctttagtagtggcgtctggctcggctatcgcaaacttatgtgatttcgaaacagagatgaatgacaggcgaatgaaggtttgagatttgatcaatctataagtttcagtcgaggacgcgcagttagggtttggaaggtctatacgaactggattgaagtctttcttagagtccaggctggcaaatgtgtgattcacgaatcgatgagtggcctcatctgctcggatggctcgcagtgtgtccaaaaaggtagcatcgggaggaagtcgcctgatgaaggtgatatttgtgagcatattgtcagtaacaatttacatgtcaagacaaatgaaactgtgcgactgaagtcaagcagaccagtaagatatagcaatctcgggagcgggaagcttttcccattcaggtacatagccgttctcgatatcactgataattcttgtgctgatgaaatacgaaaccaatcccaatcgaatgattaacaaactaaaagactactcgagcatgattgcaacgatcgatcttactaagtaacgacagcttcttcctccaggcaggcaacgaatcgatgagccaccggcggggaaattaaataagttatgaagaacaggttataaaaaaccctgcaaagcatatatgaagaccctctcagcacatggtccgtgatcgtctagagagagaaattaatattaataatgataaaaaaggctgacccttgagctcccagtatcaaagctcggaaccagagaggtggattagccatgctcatgaacgtcagaaggtggagacgttcgttttcagcttcagcaagaagcgtgtgaatccaaccaccatcccgtcgcactgaacgaatcaagatcgaatgcgtaaggactatgcttatcaacagatgatgccaaaacgatgatcaatcgagaagaaagaatgaaacgaactgagtcggagagactgaagatggcgcaagagaccgccaaccattccaggaactaggttgagtataaatatcagtatcgaagaaaaagtgggtattatcaagaatggttgtgttggtggatgaacgaactagcagctgttgtttctagaaagatgaacctctgtgaattttcagaaaaagtaacaaattagacgaaatggacgtgtgcacttgactagatgagcaatatgttgccatgaatactgacgacaagagtaagtaatactaaccgtcatccattgatcaggcgagagaagacagcccatttggcgcaattgagtgacgctgagttctttgtggtttgcgggaaagggaacatgtttgtagttgctgacaaggtcgaatccccatcggagcatcttgacaagcttggtggagacttggtcggacgtgttggtggggggacgatgaacgacctgaacagcatctaactcagtctgtcagaaagggagaaggaccggtgagctgtagctagcgcaggaataattgaagcgaagcgttcagagacgtactcgagtatagacgggattatgcatcacccaagatccgttagtgggaacagtcaaatcttgtatgacggaagctaagggatccgtatgagctaccgtcgttgcatctatggacagtaagcatgtttgatgagataaagaattgtgaataagaactaatccatattttgatacgaatatgatagaggacagaagaacggaccatgctgatgcatgccctcaccgccgatgacgccttgaaggtgcctttgtttgtcggtggtgagaggaacattgtccgcaagatgatgcgttgattgttgaccattagatgttgaaaggcgggtgttcgacgttgaatatgacctggagcagctccttgagattgttgaggagaagaagtgaactgttagaggtgtgagataggatggccgaacggtacgcgaaagtgaccgagttgatgcctggacaagacatctagcaagagacattgttggtagttgggcaatgtatatggcaggtattgtgatatagccagtatggagagaagcgtgcaatggtttgatgcaatggtcgagcaaagagtagatatgtatgtaggcaggatcagaattaagagctgttggtctcgaactatttataagtcagccaaatgataagtcatgttagtgtcagaaacctcagatcaacaggcagtacagtcagcagattcaattagacattgtgttgaattcagtaaacgcattagtagagcatgaacggaaactcgaagaagaggtgggaacggaaatctaaacggactgccgtgttgatgggtttggcgagttatccgtcgaccgagtcaagacagcaagtgaggaagagacagtcaagtcaggccaagcagtgaagccagcagggttagtaaccgaccatcgccaatgggcttccgtccgtccgcttggctttatcgtccagagattcatgcggggatgtctcgtctttcggagtaatgaacgccgtttcttctgtgtctttctgagccattttactacttgtgttcggcatacatatcatcgtagctgaatatcgcagctgaacatccaagcttgatggtcacctcggaaggtcaaccagttcgttgtcgggtgttgaacgggttatatctgcgcagcgtgcggcagtgtggcgtgtgtaaccatccatgtggtggagcatccacccacgcctgtttcctcgtgacagcggctagtccccagctggggctacaggacgactcgaaaacaaagcaactcatcttttttcgggcccaaacattgcaacgtcgccacggttttctctagtcagatatctgctcggtcgttgtcgtttcttgtctctttatttgttcttgtcctatgtctggtcaatcagcagcttcgagcccataccttcctaaccttcttcggaatggcaagtacatcgtgtttggactattgggcgtccgccattggggcgtcggagacagcctaagaagagctcttctcgaatccaacgccggtggtttgggcatgtgagtacactcctttacgtttctcttcctctcttgttattgcacatctcctggcggaaagataaagacgatccttagaagcatccatcatcactttgatcgcgagatactcaagcaaaagctcaatatgtcatgcttgccttgaccgtgtgttgtgattgaatccaccttctttagccgagcgttgcaactctccttcctattttcggccgtgaccgtcagcttgtttttgtatctggtcgtatacctgcctcggatcaagggagtcgtgcccaatgtatgtttagaaccatcgtctttactctcgctgattgcttctggttccatctcttcaccttgtcctttctcatttgacctgttgaattcccttctatctcatccaatctattcacagtactcgcgttggcaagcttcaagctcgttatccaccgtggtgccgctgctgacggtatccattatctctggctttgttcttctgatcgtcggtttgactaatgagcggtcgggtcggggtgaaaccggaggaaggctcgttagtgctatcgggggaggtcagttgctggtatccatctgacttgatgacgtcttgtacttactcactgcttactgctgcaacgcttgttttgttgatatctttcttgttcgtcactgttgattatcccagctctttctatctacgcaaccacattcggtgtcatcggcttgatccccagtccgaaacccgttcgatcccctcgagttgactgatcttcctcggtggttcgctacgtttttgtctttcctatcacttcctctctttcgaccatgatccctacctcacatcaaatttgtatctcttacttctgtctatcatttgttcttcactccgtccctccgcatcctggtgttcacctatgagtcaagattcgatatagatagacaatagttgagctttgtgatgaaacatagataacagaacgtataccacaggaccaacagacacgatcatccattgttagactcgcgaagatcaagatattttgatagattaggtctgcggacgaaaagcttctggtgtaggagagcagaaagcccacacgtatacgtatttacgacgcggagcgccaagatcgtggcaacacttctcctaacggtcctctctaaagaaacgagacacaatttgagtttcgatagccaccaagaaatggaatgagaggagtcaccgattagaaacgagcgacctcgacaaacatcagagagagatcccaagagttgaacgacatacatgcgtctcgaattttgcactctgatatacaaccaatctaccacctctcttacattcgttctgtttgaaagagggaaattttcgaaccaacgtgataacaaagtatttgacatatcaagtatcagttcactcatttgaggagcccagacgtatcgaacacaaaatacaatagaaggactgacccattcaatgcgctcgcacccaatacctccaaactacccgctctgccctccagtcctacgacctgtcgttcgtgcaaccctccacctaacgcgtccgctcctgtctctagtgtctcgttatcagctcttgccgaagctgccgttatggaagcttgtagacgagcttgagaccaccgttcgtaagactcgcgaatatctgtcgaactaagcgatcctggagcgtcctgtttattggcgagtaatagtaagggaagattcattgtttgaggagattccaacacagattctatgaagtcaagataaggatcaaagggacaagatgcattcagcttcctgttaggatattcaagagaccaagcatccgtagggatctgtaaatctgtgaaaagatacaaaccgaaaacttcccagccttcttctaatcgtgcttcgtccgcggcatctaccacgtacacgacggcatggcattcttcgtagtattttgaccagattgaccggatgtctcgctgacctccaaggtcccagaattgaagaattgtcgacgggagtgagatctttcccactaaaaaaatgcatcgcaaatgggagcccaagcacatccaaattcaatcactcagttctgagtgtaaagacttttgtttgttcctggcaaaggaaagagagacagacctccttgaccaacagtaggcgctatcttgctcacatctggactaggagtatttgggttatagtgatgctggctccacccgataaagccggcaaagttggaagtgattaggtgccaaagaaaccaggttgattaccaaaagaagtatgataatcacagacgtaccttgatctgctcaagcagtgtcgtctttcccgcattatcgagtccgattataatgacagagtaggtctcctttcgagtaagatgggtataaagccccgataagagatggtacatcgttcaaacgctgagtattgtacaagcagaagcagcgtatccttagtttggcaggagacaacgggaagatgaacgaatagaacgagttgatccaacccgggcggcgtgataattaaatatgcattgcacgtttaaactgtaatctcccatgcagactaatttatttaccgccgatcagtgtttgtttacacctctcttgtctgcaacttgcttgattgcttgcttgtcaaacgaacttcgtattgaccgtccttggctggtccttcttccctcccttccttcttttcttcaattgccgcatccagtcttacactctctcattaatcatcagtcgtggcctccttcgtttgagatgcccccttctcttttcctccttggcgcgttcgtcctcttatttggatcccaatcgttggctagcaccagcacgacaccaactggcaacacaacatgcgttgttgactctccacgagtcgaatggttcaataacgagctggccgaaaccccttgtaagtgaccatacgaaaaactgtctacctttcgtctcatgatagtatttcgacgttttacacactaaatactattggaacggcatacctgaatggcaccttcaatctcttcaaaaatcctaggtcgtatgtttgaaaagctgtacagaaactgcgatccgactttcaagatgttttcaactcatataggaaactatacgtacttcgctcaggtgggtcgttgagccgctatttttgagcaaagctcactggatctttactcaattttaccacactcttcattcgcggtggatttgagtaccctttagccggatgtagatgcttcgttcgtcgcacaagtcttttttccatcgtcatggaatcatcgaaaaaaccctcactgatatagtgcatcccgattcatcttcaaactgttaccgatggataaactcgcgtgtgtgtaatcagggatgaatgtgcttgcaactcagtcagtccaactctcactgttactgaacacgttttcaccggactgagagttgatcatcatacttcgcctttttttttgggagggatccgttaggtttcgttcgcgcttttccaagcatgtcgcgcgtaagttacagctctcttcgtattcgttcccctcctttctttgaatgctcacttaattccaacgacatggttgatcttttgatcatcagttgtcaatggggtcgaacaaattctggctcggtcgccgctcagaactacagctcgtggcttggttcatgctccgccgtctcatcaatcactataaccaacggttctcttccttcgacgatggcagctcaaaccataccaccttatgcgtttgctacaatcgatgaagtcacggatttgtggtcttacgcgtcctcttatgtgaatgcgactgccgagaagagctttgttgccgcgccagtaatcacaaacacaccaagcatcgggacgatcgtaggagccgttgtatgtttcgcctctgatatccgatcaagtttgagatactgctgttggggcaagaagttgcagaaactgaccgaggtgtaagacattgactcttaggtcggatccatcgcgggacttatcattctgtgcgttctgtacgtaaagtgcatacggtccagacctcctcggttcgttcttttgaatttcctcaatgtccttcgaatcgttatcttcttctgtagtcttttcctctttaatcaaccataggaagtcttgtccatctcgttgtacgataaacaggccaaagaaagctcctcggaataccttcaagccgctcaaagcatcagcctcagcattttacctcgctgaagcatctaccaaagcaaaccagcctgcttccgaggaggaacagcagcaccgacggagcgttcgagcaagcgtaataaacctctttagtggaggggttgatagccgaaaccaactgcacaggaaagatcaggagatggtatgtagaccgcttgtcttgtccttggtgtacaccgaagccagcgcgtaactgatcttcttcatcatgaaaaccttgcatgcaccaaagtactccatgtctccctcgacgcataatttccacccatcattccaaccctctcctctctcctcctcagctctctcttactcgtcaccaatcgttactaacccattcgcggatgcggtcgaagaggtcgctcctccgaataatgcgtacctgccgaattcgtctgagacctcatatcagcaagggtctcacacccgccagcgatcggtatctaagaaagcatttgaaacatcaacctccaaggacgctggtgtcggagattcatacatgcatactaggcaacggtcgacccaaattcatgttctaggtgaagctgatgaggaggacgaggatgaacacttttcccatgagcagagagaaaatcaccaggaacagagagaacacgtagagagttacacaactggcgttcatgacggacatggaagagcgagaagtttcggaggtggaggagttaacggcgatggaatggtttgtctctgtttttctgttttttatctctcgtgtccctgagaattgagcttatatcacactccttctctttgtcatcgtgatctcctctttcctttatcggttttgaatctcaaagtataatgtatccgtctagactgaccttttgtcccagtttcctgatcttgagttcaagcagctcgaaagtcaaaacctttctactatgaagtccagcgtgcttcgtatcaattctgtcttcttcctactcaatcgttcttgtctatttataccaaaagacacacgtctaccatctgtacagttatgttatcatatcggtctgttcttgcctctctcgtagagttttctttaactactgaattgttctagaattcactttcataatgtgagagggaaatgctctataattgctataataaactaacacatatcttgcaaacacgacgggttttctactgaagtcggctgagagaaccgacaacgaagctacctccactcccagcgacaaggccactgacaagtgagaaaacggcaattgttgaggcaagctcttgctccgaaaccttgagctgaggattcaacgatggagacgaagccaggatcatcacatttgatctgttcgaaggtttcagaaaggtcaataagaaagccagcactaaattgtgttaggaaggagagacgaacgtaatccagccattggataggcccaacaagaccagtcctgtcaagaacactccgtcgccccagggatgggttcctacaggtacttggtttccaaggggattgacgttgcagcccaggaagagaggaataaagatgaccgcacgaagaagagaggcgaccaatagttgaatgtgagatcgaatgatacagaaggatacagccaaccgccctatacaatctccaactgtgtttcgattgaggaaatttgaaatcgtgtggcagaagggatccgacgactgagttcgagcttctttgacggttcagaaaagaaaaagaattggacacgagacagacgaacaattgaagaggaaaaagcctattggaacccagacatcgaatgatttgccccatccggtccccacaggccgaaccgtgcttgtcactgcagggaacacactgagtgtgacagcgaacacaccaaagacagcaacattgagcatccagttggtcttgaacgtttcaaaagctgacgatttaggacgactagtgggaagaggaagcgagggagataacgatggcgaggagagagtattttgatgttgaaaggttgtggtcaagtgcttctggacaaaaagcgcgcctgttgatacggtgaaaaccagaaaagcaaccatcgtcagggtatcatagcatacatggcaactcgtgaatgagatcagaagctgtacttactaatcaagagaaggataccaacaaagacaaagacaacagtggaatgcttcatggaacttccttcatccgttcggttgccttttgggccgaggaacgatgtaacaacttgtacgaaggacaccgtgattgcgatcatgccgttacctaattgcgttgcaccaatctcttttggtccaaagaggctgtagagaaaaaagaaacagatagacatgagcgtggtcgattctaggctaatgagttgatcacgaagcttgtaaaaacatgaaacaatacggacctggaataagacattacgttggtttggagataggacactagaatcatggatcccactgtccaaattcctagtccagacagaataccccagccggtgcctccaggacgtacaagcaagacggccaggaggaagagtacatgtaagagtagaagcccaactaagctgatctggatggcgcgtgcttgagtgcgcgcttgatctttcggagggagaagtgtaatcgatggtgagggcagagaggtggttgaggcggtagccgcccgataagtcaaccagccgagggcgaagaggtttgtcagagtagacactaggctaagagttggtatgagtgaggtaagcaaaggggacgatggagagaggagggagattgcgtatgggaaactagaaataagaatcgaccatggaagcaagattgacgatcctaagatggcaaagggaatcgattgagaaggcagagaggtcaagacagaaggcgagagagaatcgttatcctctgaggaaagggagctgtagtgagtagaggaggagacgactcccgatgtcgaggccatggctttgctcaatataatgagatggaacgaggtggttagaagacgaaagcaatatgtttgaggacgcgttgggattcgatggactggctgaatttacttcacatccatccgttgaccaatgtcttggtcggaagcgttgagagcgtacgctctcgtcaagaatccatcggttgatattccaaagaatgtctacatatcatccaccgagagattgttcgtgtgattcaacacaccatgcaaagcacataggtcgaaagaactgacatgacagtcttggccctcgattgtcacacagcattgtcatcaaggatgggtatccaaaatcaaccttccactatcttattttgcccaggataccgttctccgcccatgtttcaacatccgaggtcacattaggagctgaggagttaaattctctccgatcaacacttcaactagacaaagaaattgtgttggatctactggacggaatggaagatgttgttcgagacttggaagcctcgatccagacagacatgaggaggaccaaaggccatgagtgggacattctggctggcttccatgcggtgccatcaatgaagtgtgtccctttcttcacttccatgaacgatttactctagttttatactcatgtatgaatcggcactgaatcgaacagacatctgcatctacatgtgttttctaaagatctatgctcggacatgctaaaaaataaaaagcactactggtcgttccatccggaaggagggttcttcctgaatttagaaaccgttcgaggttgggttgaaggtagtttgtatcatctttcaagcgcaacactgatgcacaaatccactgacagtcatcattgcttgatctggctgcatctttagaacaagacaaggaggtgaggcacatgccattgtaaagctttgtaaacttatcgattcgagtgctgagacaatatctctttattcctggactgctccaggttatggcacttcctgcttccaagtacgagcctattctgaaacaaccgctcagaagcttttggacgggtgaagagttcaagacgattccgaagctcaaggctcacttggaaagtaaattaaaagcgatcaagggagaaaaacggacggatacatgacccttcgtcgtgactcttgtggttcccagtcttgagatttcctgttcaacatattgtatatttaagcctgccagttctttcatgcctgctttcatcttaactagatagctcgtttggatcatccttgaccttttgcctgttttgttccgcttctaatggaggtgattgaattaacgctacacacgcgtcataccaaagattcacgggtgaagcctagcacagctctttacaaccctaactgcaaatgagttgaacctctcacctaatctttggaagccgtatgccatcagttgtttttctatgcgatctctaccttgcaccttcctgtgaatacagcgtgacgatgagctacgagcttctctcttctgacccggcgaaacattcatcagaccttcaacagctcgaatttgagccctctgatcctcctgggcgggctttacaccgaagatctaactcgaccctaaacgctttctcattcgacccaggtttcttgcctctgagtctgagtgctagcacagaggagagcaatcttgaaaggggaacaaaccaaagacaccttggattcttcagtggtacgtgtatataataagagctgaaacttcactcctggtctgtggctgacaagtcatgaattgcgttcatacgatctcatattgatgtgacgctcgggatatgttcatctgtcgaaacatcttaggtgtcgctttggtcgttggtcttcaggtcgggtcagggatattctcctcccctgtaagtagaaccgcctaatacactagctgtgatggaagaaaggggtggggggattttgatcgataaaatcgttttctgcggaattagggagtgatcgtccacagagtagatagcgcaggcgccagtctagttgtttgggtcgttgctggtctcctcgcttggaccggggccagttcttttgcagagattggatcagccatagttcgtcataattctttgttttactctcttaatgtattatcagaatggcgtcaagcttatctgtctggggattaatttatattgtcatggtagcctgtcaatggaggtgagtcgttgtacccttcatacgtgcagttccaaattcttgacttcaatcgaaaacgatatattcacagccctggtagttagatttgatcagtagactgatcaggatttcttctcttcccttctcttgaacaacctgattaggtgctcaagcgtatctagcatgtgtgtcatctatcatacaaaactatggtcaatccgtattgactttttcgtccgcgacattcctttgaacccatccgtcatccctttttcgtcagatgcatacggaccgatgatgtcgtatctgtactcttggacagccttgagtttgctaaaaccaggcagtgcagcaattatcgctctcatctttgggtaagctcctcttcccttcctgtccttttcttgaattcttatgctgatactcaacctaattttgaatgacgtacagagagtatatttgcagactattgttccatgtttcagtagttaatacatcttcgagtacgacgaaagctacgtctcaagaagatgtgcctgatattccggaatgggccgtcaaagcggcagccattggtgcattagcactggtcactatagtcaatatctcaaatgccaaagcaggatcgaacgtgcagatcgtgttgacggcaataaaagttagtggatttgttgagtatatgtagagatcatgggacgtgttccattctgaccttcttaatggccttgatcgcacaaaaatcaccttcaacacgcgcgcacaatcttcttccttagatatgcaccctactctttgttcttctcctaggatttctagtcttactctccccttcatcagaatcccacttgacggtatcgactttcttcatgggcacatctactaacatgggtgactgggcaatcgctatatattcgtctttgtggggttatgatggctgggaccagttaaactttgtcgctggtgagatggtggatccggcgcgggacttacctagagttattcatagctcaatggcgcttgtaataggactgtttactgtgcgtctgccctcacactttgtgatgtgttttcacgtaaaagaacgtacagaagcattgaaggactgaccccctgtctggatggtttcaaatcaaaaggcagcaaacgtctcttacttggtgacgttatccaaggaggtcgtagcatccagtaatactgtggctcttgtaagccttttgtatcttgttgattcctactgctcttcaatcagccgtctcatcatgtctttcacgccttaaatacaggattttggattagctaccctcggaccggctggggcaactgttttttctgtccgttttgtctcgttttcagccagaattctttaatatctacgataagtaacctaacgactggaaaaagtatttgccaaacaggttttggtggcaatctctacaataggagccttgaacggctcgtccttcacgtctgctcgactggttcaaggtatttttctatcataagaaacagcatcaagcgttgagatgccaaattcgttaaacatagaatactgatcacctgttcttgaaacactcactcctatgtttcttcagaggccgctcgggaaaaattcttaccaggtttcttcggaagcagtcatccaactcgaaatactcctgtcaatgccctacgtacgtttatctggtccattctacggacatctacacttacacaataatgtatatttactgacacgggcatctcctcaactagaaactttagtttttcaatccgggttaacggcgttattcgtgttgtttggaggaggctttcgaacattagttaatctattcagcgtagcgcaatggctgttttattttcttacaggtttgttactatcttcaattgccctcatctctctaaaggttgcatatcatgaatgaaagctccactgacatcgaccaagttgctcagttcttggcttgatcatcttgagatatacagagccccatctcgaacgaccctataggacttacatcacgactcctcttctagtatgtctttgtttcagtatatttttgtcccgtctgttgaaaacttccctcgaaatcagcccttgcagcaaatatcatcaggtccaaattaactaggtattatcttaaacattcttttgaccgggtgacatagttctgtacggtcgctctgtttctattacttatgccgatcgtggcggctcccaaagaagctatcggcgcattttgtttgtctcctcgtttcattttacatacactctatcataaaaaacgttgcctcaattgtttctcctcacttttcaacaggcttcatctcacttggctttccgatatatcttcttacacaaccatcgacaaatcatcccggagtatcccggacggacgcactcgtcgaacgtttacgaggtttctggcgaccgaaacatcgaggagttcagccagttagatcgataagggaagagcgtgaggaacaaacgggaatgttggagttgtctggaggcccaagatgatgtttgagctcaagcactacttagataggatttcatacagttttgagttccattgagtgtttatttaaattgcgctgagggcaaaggccggatctctcgggcacctatgtcatctgtgttgtacacatgatgcatatattatattaatcgaactctttatctccgaacacgcctaggccgacgaggaaaatatggcaactacagatatttcaaaaatgaagacctgatatacatctgatgaccgagcgaggcagatgatgcaatcaacatgttgatgctcacacctttgtccggagatagagtctggagatgttgtctacataattagacatagttatagaggataagaaggagaaaaaagagtaggagaaagagaaagaaaaataactaagctgcgtcctcaataacgaaagtaaagttcaaaactacgttctaggcaacgacgagatcttttccagctcctcgacggattcgaacgatgtcctctcgggaaagatgcgccttatcacactgtggtgatcaaaagaatcaagatgttcagtaccggtctatcggatcatcgtatatggagagtgagacgagcatcgatgagagcaaaggacaaagtaacgcaccatgcctcggaagatagaatccgttcggtcgaacaaagtaagtggagcatcgaattctgctacttgtccttggtccatctttcatatcaacattcaaaagaagaaggtcagtcattggtctgcttcagtacaagtctagaatgagaatgagcacgcacaacaatgactcgatcgcttcatgattagatatatcgaggggaaatattagcagctatatgcgttactggttcttactgactagtttatgttcgacgtactagaaagcaattgtagccaatcgatgggcgatggacaacagagaagattgcgagaactcggattgaattgctcgttgaacggtctggtcagtctcagcatcaactacggaaatgaaacacgactcagctgattaactctcgacaacagatatctcgttaaagaaaaaaaaacacaccggaagacgtcgattcatccaatacgatgactttagcgttcttgacaagcgcacgagacaaagcgatcaattgtcgttcgcctgtgaaagccaaaataatgcgttgagatcccgaagcaagaggaggtttttagacgtcgcgaatgtacttaccgcctgaaaagttggatccctcgctgatgatggcatggtttcttttagtatgtagcttttgagtaaccatgtggagtggaaatcaactcactcattgactacggaatccaatttaaacttagagaagcgttcaacgacctcatcagaaacgtcattaggagccgtaagtcctgccttcttcaaagccatgttgagaactggatcctcaattgtttcagttggatccagattctgtgtgaccaaaggatggtacataagtcagaagatacatataattaaatcaagtataaaaagcgcaaagagacaattcaacatacctgacgaacagtccccgcgtagagcaaagcatctgtaagaatgagagtttcagtcagacatatcagtatgaagacatgtggatgatgtaccataaacgcgcgtgaaaacattacatgccttgaggaacgacagctaagccttgccgaagagcgtcaagtccaatttcgctaatatctcgaccatcgacctcaatgctacctccagagagctcgacgatacggaatagagcttgcacgatggaacttttaccagcacctatcaaatgcgaacacgaatttagagtaaacaaactatccactttcgaggtgaaaggcagatgattggagctcttaccagttcgcccaacctggagcataatgccaagagaagtcgtcagtgtatgcctcggaaatcgataggtttcaactatacggatgatactgacaattccaaccttctcgccaggtcgagttttgaaggaaacccccttaagtatttctggaagtccctctcgatatcctgattttcgatcggatttgattaagcatcttcagaaatttcaataacgccatcaagaatagctacgtactcattcggacgttcttgaattcaacaactccttgctctggccaggccttgggaggatcattggaggtctgcacagctccttctgggctgaggtgggcataatgagacactctttcggcagtattcatatcctgctcgacagtggcaaagatggtgacaagttgagaaaacacctgcgtgactgagagagaataggtaagaacaactccaagtttggaagggctgatagtctacgccatgaacaatttggagaataatcggaaatcgttagaacgcattcattcgagattattgacagaaaggaataggcctacctctcggaagccgacaccgaagagcccgattcctagaacgaggatatttcctaggaagtccagtcttacaccgagccaccgttgcagtgtgatcgtcatgaagtttgctcgattttggtctgttttggtcagatatcaatacagaactgactcagatgaggagcctcattgcagttgacgatgatagagtgtatactaacagtcaatcgcctcttctgtcttcttagtaaacactttctgttgtctgtaagcccggacactagccagacctccgagcatttcaccataacttgtataaacgtgactacgcaagttagaatctagtcgcttcacctgtaaaatgccagtcatttgtagtgagtaacacaagacagacgaggaaagcttgaccagttattaaaatactgacctctcgagaacttcttcgatagaaatcagcgaagatgtagtagagtacagccataggtgcaaagatgatgccaagataagggaacgtgtagaacaccagtccaattgttccgaagacagagaataccaaattgagaagctgattcaactgctgaggcagctgattatcaagggtcgtgactagaagagacaagcaaccagactcagcattggtcggggcagtaagaaaaccttagagtgtacgtactatctttagagagccgattgacgattcgaccctgatgccaatacgagacatagatcgatcaacttcagccatcacagacgtcagtggagtccaggtttcgacttacgattggcgtggtatcaaagaatgaaattcgactccgcatcctatatacggtgaattatgagaaaatcagtcttgtcgtaaaaccaggtcaaagtagattcagaatagactcacactccatgaagggcctcattgaagagattatacgaagcagtgattcctcgaagatacagcaagaaggtgccggcgaacatcaaaatccccgaggccaaaccaaaagatgcgtatacagcctgttgagaaagacaatgagaataatcgaggtatcttcagttcaagttgaagcgttgatcgaaatctatctgaacataccatataatctccctcactaaatcccccgatactctgcgcggaccagaacccaagaaagatattgtttccaactagagaatcaccaaatgctcagataaaatcagcctcacaccgttagcagtggatcattgaattacccgagaacgaacctgtagcgacttgcgccatagcgaagaaggacaacaagattggtgcccaccaaacggatcccatcgactcagcgtaatgctaaacacaggacatcaagatcacccatgcacatcacatcgaactattctattagcttcattaaaaatgacagaaagtattcagcaagttgacgaaccttgtacacttggccagataccgctcctactgctcgatcttcatcttgcatcagagcaactccaggggctgctggtgctcggacctttcgttctcgttcggccttgataacaggaatctccgacgcgtcattctcatcggttccgttctccttggcaatagatccgaagtcagcaatgagcttgctgaaggcttctcccgattgcaagaggtcctatcagacagaaaagaaatgaaagaaaagggaatagttgtttgaaatttagaatttggtatcatattggtttgacggcaatatagctatatgaaagaacatgactgacattgtaggttccttgctcaacgatttgccccgcatccatgaaaatgatatgatcggcgtgaggcaagacatctagatgatgggtcaccaagctggaagaatgtaaaaattcaagttcaatatatgccatgttttttttctaaaatccaacgagggacagtactcacattcgagttttgtccgacagaggaccgtccaaaaggcagtcatttaagatatgttttgatactagaacaagctcaacaataacatgtcagctaaggaataaagcgttcagagatgccatgattgactgaccgtgcgcgtcgacagccgagagctaaaaggaaaccgtgcatgagatcagtcagaaagttgttgattattttatataacttttttatttaattttttatttgaatgaaaccttacaggatcgtctagctgcagagattgagagagtaatcataaacagtcagctctggacaacggttccaagttcatgacagtcatcaaatcaacttaccaaaacaacttcagctccgaaataaaccgttctagcaagacagactcgggctttttgaccacctagaaccatatgcaatgagcgataaccaaatcttaccaagctttgtcagctcaccgcgacaaaccgaatttttgacccaagaagaattgacgaaaggaagaaaggggaaacgataacagacccgaaagattgatgcctttctctccaatctcggtgttcagaccactaggtaagacctgaatatccgattccaggcagcacgcatgaatgacgtcctcaaacttctcttcctcgtagtcttttccgaagagaatattgtcttggagtgatgcattctgaatgtaagttgtcatatgaaacatattgatttagcaaaagaaacacgataagaaaaagacgcctaactgtggcctggcatgcacgaatcttacctgaacccacggagcttgacttgcgtaagcaactgaaccaccaaacaaaacgtttccttctatctttttcatctcgccaatcagtgcttgaagcagagaagactgttgtcccgacaaaagcgcagaaagagcgatgtccacaaagtaaagaatttgtgaatgacctttcaaaaccctagatgataagatgacacttcgacatacctttccacttccaacacttccaacgatacaaaccaaatctcctgaacgaattttgatatcaatatccaccagctcgaacggaggtttctcttcgttgattttgtccagtaccggcaaatcctctagagcagaactgccgttctgcttcttcagcttggcctcctttttcgccttcttggcatttgctttcttctccttttccccagcaaaattcctaccacctctaccaccgctattcatgactgctccttgagggccagaagtctcccagcggaaccttccataagcccgaacggcatctggagcatcagaatctacttgaagatcatcagatagctcttcggctagcatagtggtagcgattcgcttgagagcgaccatggcatcggtacaaatctgcacattcaaagagagaacagaacgaagaaggaagatatgtcaacagtcgttcaagttaaagagacagaggagaggacatacagtaaatgccatcttatatcgatcatgtttgagagttagacatcgttaaacataagattgtcaacttttgagagattgacggaataaaaacgtacaggaagcatcatcaatggttgtcgaataacattgaacagttgaagagagctataaacaaaaagggtaaaagaacgatcaagtgtgattcaacggacaagtcctgcgttggccacaaaccaatagggaataacgcacgaaaagataacagcagcattcaactcatgacctgaaagattataagtgatgaaggtcaatacagcagcggccacaggaacaaaggacatgcttgcctaaattactccataatcacatatgttcgccgataagaaaaatcagctcatccgacgtgaagcaggatataaaggaaagagaggaaagtagtgggggagctagacgaacagacattcccgctcttgtccgcgcgattgttttgagtttggccatttcttggccccgaagttctagcactcgtcctttaaagaaggcttcgtaagcgtataacttgacaacccggattccgttgagaactgataaataacaacatgaaagagtgtcagacaacggtcttcaatcatgtatagagctgagaacatgacctcaaccaaccctcggacaggagtctgacacgctgatcgacgatcttgagctgtccttgtcgagtcgagaacatggtcttgacaaagaacgtttgaataggtgtgttcaaaaccagaatctgtgaagtagtggagaatcatagaaggagacaaacttgctcagtaagaatacaaacccagataatcaaaactgattgtgtcaacgacatgaacgacaacgtacagcaactcctactaaagcggaatatcctagattgactatcaagaggatgacaccaatgacgatttgaatcgggaagacctaaagatcaaagacagtcatgagctgctcttgtgccaggaagcttctctcatgcggccgacttacccaaagtgcgtgaacaagaaacgaagcccactccataaaacttgtatcactgcatacgaacgtgttccacataataagatatttagttttgatcaaccgtcgcttgattgaagatttatttctgtaaaagacgaacctggcaacgagcgtgattagatgtccattagaatgtttggctctagaagcacccgaaagtctcagagacttccgagagatgttggcgatgagagaacttcttgcttctgagaaaaagaggatcaaaatgggtcaacactcataccatcatgaaaaaggaaagactacttctccctcattgagtagaagagaagaaggaaaaagacgaacgaagtcccaggacttgaccccgctgcatatattgattttctgtgcgtttgaaggaaataggtatagcgtatgagaaactcatgcgcttgtttatgggcgatttcctcttggtcacggaatagtacgaggtaagaacatacggcaaagactagcaacctcttgcatgacgaacaaggcaatggtaagaccgataccatgcccgattgcacggggagcgacgagagatgctttggtggcctcggaagccttggcccattcatagctggaggtgatataactcaacagttgtttggtcactagcggtgatgtcgtctgtagtaaggctgagataatgaagaataccgcagctaacgtagatcggggaagaagatgggttagctagagttttatcgaggcaagggtactcgaccgaaatgtcgatactaacaaagccaaaagtcccaactaaaagttttgagcagcgctcgaatcatgctttggtcgtaaacctttccatctagtcctttaaccttgccgccctccttattccccgtcagcttcttttcctttttagatgtctttttattggtggaagctgttgctgggctgggaagggtggcaggtgttgacggcttgtccgcattcttttccttattgtctgactcgacaagcgttgttataggggactgtttctgaggagctttgtatccctttggtcgaaggaatcgaggccggctttctattgggactcgatcatagaagttctgatcaagaggagaagaccgaaaggaagatataagcatgtggatagatattcgcatgtccgaacagaatacatcaacttacgttctccagcgcacttcccgtattggtactcagacgagtctcatccagcttccagagatcttgatgagagatattttgggatacggagcaacgatgacagatacaaacaagcagtgcaggtcagcatgtgcacagtacaatcaagccacccgatcgatgtggtctaagcaatctccagattgataagtttcgcctctgttcgaaacgcgtgtgcgtcctcggcttgatccgagataacgtacaacgtcgtaaacaccacatgtaggccaaatttaacgatgatctctttcgttaccagagatcctgtgggaacaagtactcatgaagtatacccttcaacagaggatgatcgaatgaggtagagaagcacagagaattggggaaatctcgaatggaagcgacacagaataaacatagaagaaacgtattccttacctccagcctccaaaggtcgggtgtagccaatcttgagaatcgggaaacaccaactgaacagccatcgagatacaatatttgccgtgacatctggcatcaccttagcctccacctttgggtcaggcaatgaggctggctttggcttgagaaatttcatatgtggatgtgtgaatatgtgtgtcgtatattcaagaagagtgttgaatgtggaatcggcaggtttcgattggttcgtggcgatgtccgatgagatcgataatgacgcgtcaaacgagaaaaccctgaaagaatatcctttgggcttccttatgagttgatagatgaagactggattgcaagaagtaacacaccctcccgagatctatttaacacaccgaacaagaggaaaggccggacaaggtatggatcaaatcgaccacctggttcggtcatggccgaagacctggatcgctcggtcatacgattcggccatagaccgggctgagaattcgattcggccatagatcacggacgtagtagaatctatcgtctggactagatggagactacttcagattcagtcaagtcaagtcaacctccttgatctgttctttctttaattgccctttcttcatggctcggttccgatatctcagtcattagatgtctcatttaactttcagaccggtcttagctgatgttcatatattttacattgtcaaaccggttgatttcatattgtcaatatagtgaatactcgagtcatctgcggacgagtcataaaagagatcataacaaagggcagtgaccgtcagttggtatacaggtcggcactggcacagcaacgaacggtcgaagagtggaagaagacacagactttatcggtatggttcgtgagtatgatatggtcctcgtccaacatcactccgtcacacctcgagccaaggtttccactgacgacggcctcgttgaaggctaggccactggcaacatcatcagcaaacaccgcgtgcgaaccttctccgcattctgtcagcccaaatgttgcatcagtcacaaaagggctcggctcgatcggtctgttcttaaattctcccgattccaaatcttcatgacttggttctgcctcgatctcagtctggaaccccacacgagcagggttgaaatcaagcaactggacttcgtaagtggctgctgggagaaagccatgcgccagtcgagcaggactccgcacgaagattgcccgataaccatgaacaaaggtaacctggtgaattggaaagtaaagacatctcaatactcagtctcgtcccgatacatatacggaagcgatgaggagagagaaaagtaagacctacccagtgacgacgaagggtcacctcgataatccgacattgatccagcccccattcactccattggataggatctgggcgtttattcacatgtgaacatttcaacctagaaacgggttaatatcgaccgatcatcagtcgcagagctttcgggatatagtatacgttattcagccagttgagatgattgaacgactcggactgacagatcgttcacaaacatctctttgagtgtatatatctgaaagcctcgtctggcagcaatcatgtccaccacaagtacacctttagacgggtcggtagaaaagtatctcccttttcgccaaccagacggaccatgaagaattgaaccacttgacgatggtggatcaggtcggatgtccattgagactggaatcgcatcctcgtcgtttgcgagctcgggcaagttgtagacagataccagttgaggtggcaacagacctgaccgaaaccgataggtagttaacgttggactttgggagtgcatcggtagggatgagatcaagtatccatcaggcgtcaggagggtgaatgagatgattatcctcgacattggcacttgactttgctgtataagtccgaaaggccatccgtgtacgatcaaaggacgatcagaataccgacaggataattctattccaataaatgttgatatctgaaattagtcaaacgtggacgtacacaaagaatttctcctgtgaggatatcccatgccaaaatcaagtcttcctcgccctcctgagcatcgatcagaacaactgccaatgtagattccatgatctggatcagaaaccttgctggagagatcatttccctatcaatttccgtattcatccattccggttgagcagagcgaatttcaaatacgttgcgtgcgagaccagttttcggagttccgtccattgataatagatgaacctcgtatgtcaacaaggtgcttgatatagatgtatgacgccgctctttgtttaaagggagagaaaatggtaagtcatgcgcaaggaaagcgcagatcttaaattcatggtttgagagaactcactttgaggacgtggtcgacggatgactgcgatcagatcttgcgcagggtcgagtgtcagatcgaggtagggccctatattgaaatctacagtttgcttagtagcaggtttcggctgagaaatcgatgggaaaggatgaaaatcaagacatgttggttttggtgtttgcaacgtatccgaatagttggctcctcggacaaataacccgttctgaagctcgtatattgagctataggaagagcaaccaagcaacaggagaagaccgatatcaatactcagtttcagcgtaccagtataaacttggagaaggatgcctcgaacctgtcgcctttgacttctatctcagaccaggatccgtctctgagttcccagtttcgctccctttgtcgaagtcgctctagcttgatcgcggttggtgttccgtcgttcgacggaccggtacaatcgattacgccatgtttccaacattcgatcgagtactgaagctgctggttctcgcttatcgcagtgttaaagagtttgcaaacaagtcgtagcggaatcagggtttgagccggaatatacgtgaggacctgtgtgcgtcacgagaacaaagcaaatatggttagacgtgcttataacgttcgaagcttagaaagtaagaatgccttcatatataatctgtatcatactcaagatgaaggtatcaacacaaacctttgtgacaatctcaggtggtagatccagcagctctagcatttcaaacatgattgagggaaacctaatgacaactatcacaacagggcaatgccagaatgagaagtgaaggatgacgagaatgatgatgatgccgctactgcttctattggaatgtgttgaagaatggtgaggaagatcgaaccaactcttgtaaccacggttactctcaattctcgactgacgaataacgactaatagccatcggccaccacactttctattgtgaagcactcacactcatacacccacacgatccttttctctctcctcgtttatccttctctcgtttgaattcgtcaatagaagagattcaaaaagatgcttggaagagtttcagtagcctgcaggagtgagttttcatgactttaaagagcttgttttcatatgtgcattctaactgttcatctgctcgcctgtcctctccaattctacttctccttcgtctcttctttctgactgctttcgattctccttttttaatctctttcttctctggatgtatcgctcgcggaaccttaacgatttgctgccatccttgttcatcttttggattccacaggatctggccgatcgctcttcaacatagctcatccgtctcctgccttccatgtccatgcatgccaaacccctttttctcgattcgcatcttccacttcgcccgttgatgtcgcgtcatcaacttctctcaatgtccctttgccttcctcacctccaaaatcccgaaccgtagacgaaaccgaatgtgtttctgcatcccttcatcctgcctccgccgagactaagccagagccaaacacccgaatcttgaaatctccaccggtgatatcgaaccgaaggctaaaagccttaaagtaccgtcttaaaattccagagccactcatttttctcaatctgactggtttcagacgggtcgtcattcctcaagcagtcgccgttcgagaccaactagctaagaaggcaaaaaaaggttcaatcgacccagcggaattcatagacgagatgaacaaacttgagaccgaaaggattctcaagatccctcaagacatacacgactccatccggtcgaagcggaagttttggaagtttatcagattgccttctttcggccctagatcatttaggaagctcatcagtgctgccagagctgcaacttccttttttatggtgactggtgaccgaccaaacctcgtcaaggccaaaagggaactcaggtttctcgaggaacactacatgttatactttccggatattgccatccgtacgaactctttgggagacgcgttcagcacgtttggcaagaaaaaggtcgactccaaacgtttagtgcaaatcatggagactggcggagtagaagccatgattgcctacaggaaggatcttgatagtgggaacgatacgtccccggtggtcaagacggaggtgccgaccaaaacaaattcacctctcaacaaaaagagagcaaagagcccgaccgagtcgatcccgactcaacgggaaactgttggtgacaggagtcagaaaatgattgagcaggctaaagatggtgtgatggacgttgtgggtagagttcaggaaagtgtcagtcaagcaatcgaatcggtccctacatatacttctgcctcgtcggccgaggtttcgaaaaacatggttggagcctcgtccgataaagacacaccgacgtcaacaaaagagcagggcagtagtgaacagaccaagcagtctcggtcagacccatagacaccctcatgatgtatgatatttgagccttgacatattgatgtctcatcaagtctacctggatcaggccatcagttctagacgacgagtgtccctcaatgcttttattaggacagatggtggactggtatatttggcaacataatcaaaatatatacaaaagggatacatcgagagctgaatgaatgggataacaattgcaggaggagcagagatcgatgaataaaaggttcgagaaaaaaaaaacagaaatacggaacaacactatagtatgactgaacgtcaaaaatcaacaagagaaaacaggactactaagaggagagtttttggtagaaaggccttaacaacctgaagaagcaagaaagaaagtgaatgcaaggactaaagaagaacacagagcaccaatctgtgaatagcatgaggaatagagatgttgaatctatggacagacgacaaagaaagaaggtaagagtggagagttgagtaagaacaaaaatgatgcacataaacaaaaagagagggaattcaagaaccagaccaattttcattttgaatgcaaggtcgtgaatgaaagagtgaattcttcatctcgcaggtaatctccccagccacaccttacttcttgtttttggtcgccttcttgccttttgagttctttccgttctttttcttcttcttcttactgccggagcctgaccctgagcctgaaatagacccgttgggtgatggcgcttgtccggtcgcctcatgaagcgcaggcgaggtcaagccttggatcgattcatcttgtagcccaggcggaatgcggcccgtggatgacgcggaagatgatttcctagtcagtagagcaaaccgtttggcgatggggcttccaggagtgcttccgctaccagcctcctcaccttgagctgtatctgatccgctcagttcgatcgcatctagctcttggggaagggagaggggtgatctggatgggctcgcgttggctgatccgcccgggctggaaccagatttagtcttgttaatcaatgaaattcggcgaacaaatttgttggattcatttgaaacccggcggcctacgtcggcgagcatcgtgcctttcttcttagatttttccttgcctccgccattgggagagaaatcggttgaatcagtagagagctgaggagaatcttcgaactgttgtgatggtaagtcggatgagactggcgaggtagaagtgggaaactcaagatcagatttgacagatgggccaactgtggataccgaggtgaaattttggttagtctcagattcagaggaggtagcgagttcattcgattgggcgtagtgagcagccgcgtcagactcaccacttgaatccttgggtaaagatgaagccacagttgatttggatgcaaacctctcctgaggtgcagtagtgtctgtggtgtccattgaatcggacacattttcaatctcctcacccgcttgagggccaggtggagcaggatgggtcacggcttcggcgtatgagaacggtcgagacgaaggcgatgcagtagtttcctcgattgtagaggttgtttgagcggagtcgttggtcaccttggaggcaatcgattgtttcgatagggcttgctcgtcaatttcgacggcggttgatataggttgtgtagtcacattcgacttgtcgctctctgcgtctgtaccagcaaggtcgttggccgaagtttcagcagacttctttcgttcaaggtccaaagtagatctttgatcatgaacatcgaagaacaacgcccttagtaaagcaaaacgatacccagattggcgagcgtgataaacaagaccaaacttactcggactcaggaacatctgtaaatgttccgtacgaggttccttcttcctgtacaccccgctcctcaacgccgttgtgatcccttccttgatttagcagaggcgcattttcttcatttgaagcatgtgcagacacattcgttgtagaacgtctgacagcaggcacgaagtcttgagcggggttgtgcagagcccaaaggataagaattaagagtagtagtcgaacagaatagatggacaggagaaggaaaaagggtagcggaaacgttgtttgaggatctttggtgtcttggactgaaaaggaaatgttgacaaagtacaaggatcaatgtgtgctcgatgtaaaccggctttatttaatgaggatatccttcgcttggaaggtggcctcatccgacatatgatggactcctcagatttataattttccgattagaacttcaaaggaaggagacaagagagagtctacttaccaaactgggagattctctctgaccctataagaaccgtgcctataagaccaacccaacacaatgcctttgcccaaacaaactcgccagcggtcttgttctgcctgatccaaactaaactagcggccgtgccccaaacaacaagatttgatgatgaaaaccatacagccagcacaggaggttggccatggtagtagatcaagtaaagactcaaggagagaacaaaagtcaaggtgaggagggccaggagaacagaagtaagtctcgagcgaactcggaacactggaatgatgacaggaacctggatatgttccgttcgatattatagataggccaagggagcagcgagacaaaggcgaccagataagtttgagattaacgtgagtacaggaatgacaggccaagttcaggaaacacccacaatcccagttgattcgtcagaagatgaactgtttgccctgtcactccgttcgatgaaggccgagaggagaaggataagaagaaaggcgggaaacacagtctgaaggacaaccaggaactcttgagagaggtgggtcatgtttggcgtcaagcgtcgttctctttgactaagataatcagacagcaaggatcgactaaagattgagggacaaagaaatggaagagtgtactggaattgtggatgatgatggtcgaggatgggttggagagatggtcggacggtaggacgacttgaaatttctttcagcctcgttcgtcagcatacacacttccatctacgccgactcattctatactcatcacatctatctctgctatcgctttcactgtccttcggaaaattgggctattctcaacaaaaattcatatttcgactgtaagtatatcaatagcctcagcacctttgatcgctgtcatatcaaaatcgcatggatttgtcgtcatccacgccggttctacctccgccgatctggccatatccggtcaccattcaaaagcttctactgcaaccaggtgatgctgtcaaacgaggtgatgtacttgtccgtagtccatccttccttcctgactttgaagcctgggctcttgaaggattgacattgcgacttctcttggggtccgaacactccctacgtgtccttacgaccatccaccagcttcattacacctttccagatccggagatcacgacggacaaacggacgtcttcgttcatttctcctcacacaggtatcgtagctgcgtactctgttcgaccaggtgaagttctccatcgaggagaacgacccgacggtctcatctggattacagaaaattgcacccatcctgttcagctcggtggcctttgcgcggtgtgcggcttggaccttacaggcacggatcatctggtggatggtccgtcggatacgagtcgggccaatattcagatggagcactcaaccacatcgcttactgtgacacgacaggtttgaattttttactccttaatttgaccaattgtgttcatccgtgaactatctcactaacagccatctcatcgacgcgtacaatctctctggacacgcgtcttcgcgcgagtacaggaagcatccagagtttctaacctctctaacgaagcgctgctccaatccagacgactctctttgattgtggatctagatcaaacggttgttcatgctacggttgatccaacggtgggcgaatggatgtcggagtgcggcctgtttggcggagactcagacggggtcaagaatggaaagggtaagaatcgatcgcgaaacccgaatggcaacgcgctgagggatgtgcagcgattcaaactggaagatgaaacggctggcagaagaggcagaagagaagaggatgattgttggtattacatcaagccaaggtatctctgcatcttttcttgtattgggtcgtgatctattgctttccttgcatgaacctatttgactgacccgtaacgtgttgagagtaggcctggactcaaggaatttcttcggtcgctgtctgagctttacgaaatgcatgtatatacaatgggtactcggtcctatgcagaggctgtctgtcgggtgattgatcctggagggaagatctttgggggtcgtatactgagtcgggacgaaagcggtagtgagttgtttcgtttctgttcatctattcttgagtggaaatgtgctcgctcacacattcctggctgctgactggatataaatctcattccaggtttaacggccaaaagcatcgagaggctattcccagcagataccagtatggtcgtcatcatagacgatcgatcagatgtttgggagggaagcaaacgcaatctggtcaaagttgttccttgtaagtagtcgtattttgtcaatagaccattcaaccgtccaaccagcttgctcatacctactgtgttcgattaccaatgcgtgtttgatcgatacaatatagatgacttttttattggcattggagatattaactcctcatttctccccaaaattgcgccttctcttccctcgccttctctagcttcgtcatctgttgtctctccatcacaattaatcaattctcaaatcggggcgagccttcttaaagaggcaactgaggttcaacatcaggttttggaggatcaactggaagaacgaccgcttcaaaaactgcaggacgagatcaggcaatccgaagatcgatcaccggtgccatccagagcatcatccattgacggaacagccgacagtgatactcagctcgatgaggaagaacagactggtgaagaagagcacaaagcattattgagagatgacgacacggagttgaaccgtatcgaacaagtatgccccatttatattgtcaagcttagtcaagtagatcagtagggcaaggactgatgtacttctccttttatggacattgcagatccttagagaggtccatcacagatactactctgccatagacgccaaagagaagatcaaaccagacgtcaaggtaagcgatattcctatgataacgaagacacgaaagagtctgacgttagcttgtcctctctataaaatctgaaataccaagccaatcctggactacatcaagcgcagagttcttcgaggctgtcgaatagtgttttcaggagtaataccattaggaacgaaacctgaattgtttgagtcccgctcgtcaatgttctgtcttagagcggtgtatcatgtctgattgtatcactgaccggggaatcaatgggtttgcttattattgtttttataacgaaatagattttcactatggagacttgccgttcaacatggggcggtttgtgagaagaatctgtctactggctcgacccacttgatagcacgagctgtttgtctctatttcttcttagtttattgaatgctttattcatattcacatggcgctgactttcatttgtctatctttcttgaaacctcacagtccggaactcagaaagttcatgaagcatcgcgtatggatgggggaggaactagtagaatccatattgtcacaccctattggttgattgactcaatagcgcagtggacacatcttccggagtggatgtatctcctgattccgccatcgccttcaaaacagaatacgcaagaggaaaccacgacgcctccaggaagtcctgtgcgagatctcaatgagggatctgactcagtagcggacacgggggaggaggagagtgagggagttgaaggggaagagatcccgatgttggaggttgtcgagtttgatagggacgcggccgaccgtgagctcgaagcgtttctagagggaagtgatgacgatgaagagcaagatgatgatgtagaggaagaggaagaggacggcgcgattgatcctcaggatgtcatcggcggtgaagaaggggcagtctcaaagcagaacgacgaatttcgatcacctttagctgaggtttcgacgcctggaccatccatatcaaaagccaagagacctcgtccgagtacaccctccgactcgagccccggcctgcctctattgacaagctctgacgcggactttgaaaagtcaattgattttgcatcacggtcgaataagtcggtattcagtcctgtgaagcgtgcgcgggtgatagaatcgggagaaactcatgtgggtaaagagaacagctcaaaccaggaggacaacattcaagaagaggggcaggagcaggatctagaccatagtgataacgacgacgatgtcgatatcgaagatgataacgcgtcggacggtgatttggacgaggaagacgaagaatgggcgaaagagtttgccggtagtcttcttagcgaattcaaacaaggcggcggagatttatcggatgatggagaaaatcggggccaaggtgatggataatcatgaagtatttttttcttgtgattcatattcatcatcatcattcattcagatatccgttgaagtcgccgtgatggccggacaattggcggacccggtatgcttaatttatccgatggctgtgttcagcccgatcggctcgcctgtgcttcagtcgagttttctgacgatatttgacacattgtctgcgacgagaccggattgcttttgatctgactgactaacttgttactgagctgcttggcaaactttgaaaaggcttggatgatggcctttcgacaagtcgttgaagggaacacccgttgtttgatttttgataacctcgaaccagacgtctcaatctctttccttctctttcgtttgacgtttatccatttctcctcggaccgactgacctgatcagtatagcaatggtgattcggaatatcattcaaagcgctccctatgacccgccggttagtatcccggttagcccggctcctccacccacactccatgaggttctctcctcattttcagcttgcaatgatagagatagggacatgttgatccagctaatagttgagaagagccaacaggttcgttcaatttcaacagatagcgaaagagtctcatttcatgttgtctaatattgtccttgctttatttatatgcacacgggctctcttcttggactatctttacaggaccaactcattactcggaatcaaagagctcagtatgaacaactcgtacaatccaatttgattcttagggagaacctactagatgcaaaggcagcctgcgaagcgaacgatcgtttcgtcccctttgccaacgtttctgtccatcaaccaacaactgagccggtacgatcaacattcattctcaagacaaccgtgcagatggatgtaccatccatttcctcctcttgcgcttccacctcattcttctcaagtcatctcgcgcaactgctgttggatactccttcatccgcctcaccacgcgcgccactccgagatgctgcgccccagcttttccctgtgccgtccgtcaaccccgaaaaaccatatgttcctcgtcggctgaattggggcaatctaattagcgagcctgcgactacatgtgccgcgcaggatacaagtttgccaagggataatgaggcaggagagaaggtgaaaggatcttctattcagcaccgacatcaagtctcgttccttgtagagaagtaaaaatcagtagttgatctactgcaaacggacaacccttagatgatctgatagagagaaaccctgatttatctatctgcccaggcggctctaccctctttgttccattcctgtattgtgttgtatcacttgttctaattatgtatacccatgttcttatgtcattcttttgcaaatagaggatttcgtcccaggctgagcagaggttccgtacctaagggtcggctggaagaggcttaggctcgggttttcgccttcacctttctttttttttctctcgcaggtgctgcacttcacttccatctgtgacagacttcgagatgctgactgactgtactgtaagtgttttctttctgtgtcgtctattgtctgtagttctttctcttccttcccacccgtgtccaaaacgttagagctctcaattatacctccaaagggtgtctctgtcaaatcgcgggaaaatcgacatcttcttttttctttctaaaaaaaaggaaaaggaggcagtcttcacctatcgatcgcctgtttggtctcttgctcacctcgaaaggggtttgagcgtttctttctttatgcgaataagggaagaggagactagatggatgtgtcggcaggagagggcgtgaagctttcttttgtctgccttcccgattccctctatacgggcggaggaggcctttctagcttagacatctctcttctacctcgttccctcttgtttttttgtccgtcttttgccgtggtgctttgtgttcaagaagcaagaaccaaccagttgaccatgcattgttttggttttttatccaccttctgacacaggaccggctcatagcctgaaacaacattgatctcacttttttcagattttcttttcatcgttgttcatatatacacttctcctttccattccaatcttcacccgttttaaaatccagttacctcacctgacaaaggattaacccatgaggctatcgggacagtcgacgggcagaatagttcatgaacaaaagaaaaccatttgttagttttggccagtcctgtgcttgctctttcctcggagggagtcggtacgatgatggagtgtcagaacccttcccggtttcctaaatttcctcagttcttttttctttttttcttttatcgtagataattgagtaattggtgatatgataatatgatatgtcgagtaagaagaactggatcagcaatatgtgcccattcgaaaagtgacgcgagaatcgctctggggaaataccttatgtccgtcttccccatcatcatcatcatcagcatcatcatcatcgtcaattaacactttgccactccaatctttgagcttgatcttggatcttgttcgtgacaatcaccttactcaatcgcgcaagccatctttgttctgcattcaattaccatcatgtccaacccatcttctttccttttcgtttgtctagggtaagcgtctagatccattcttagaagatgtcttttctaggcctcggacctagctatcagatgctgagcataatattgattcatctttgtcccaacgcttcgtgctcaaccccagaaacatatgcaggagccgtatgttctttatctctttggcgattgcttaaagcgttgaaagctaactccaccatggtaatgctcaaactcgccgttgtacaccgtccatctttcatcgtttctcggcttgacttagctatggccgaagcggtctttgcccacgaagcctctcaacgaggtttcgatgtaaaggttgattctgccggttagtctgatagtgtcattcggttttctcgaacgagctactggctcacaacccggctcggcccatcatggtgcctcgtgccctcgacggacataggcacagcagcgtatcatgtcggagagaccccagacgctcgaacagtgtcgacctgcaaggctcacgccgtccccatcaactctagagccaggcaggtcagatcgagcgacttcaaacatttcgactacattttcgcgatggacaagaacaaccttgaaggactgcagagggaagcaggcaaggtgaaggatgggaaagccaaaggtgagaatacatcttgatgttaccagtttatcttgttctatcttcgagcagcattgttttagaaggtggtagaatgcctcggcggccgtggcctggatagtactaatagctaccgtacctgttgaatgaaacctactggatagtcatgcttttctctgcatatggagacaagaagcctatagctggttcgttcatcttccactcgggtgcttcacgagtggcctaattgactgataaatatttacatatcctacgccgacatcaaaccgtctagatccttactatggcggacaagatggatttgaagcgtcctacgagcagtgtactcgatattcgagggagatcttagacaaggtaatgggtcccagcgcataaagaataccattaaacgtagaagctcaggtgaagccaattgtaataggaagctcgatagaaggtcaacagaagctcgatagatgattccgtgcaggacgctcatccgttggtttctctcatacgcttcctggtggccgaacactatgtcggctgtcaccaaagagtggcgagacggatgttcgttgtgaggtgtatagaacccaaatcatcgccgcagacccaagtatgtgtcatcaaagtacagcatacatacagcaactgagcagacaagcccaagacgaaaagaatgtaggcaaaggaagaagcaaaatcgaaagaagcaggctacaaagacagcaaaataaattgagtacagagaacaagagaagaaacccaagtggtcagaagggatatatgatgaggatgagctctgacagaactcggtgagccgcgaccggtgatacagaagaagatagacttggcgagagaaggaggatgaagggcggcccgctcggctcatgatatcaccccgtcgcttagaagcctcgcaatgttttctttctcagtcccaaatattttcttcgatcctggcggcatcgatggagcgatctcgttgttttggcctggtccaagctgtatgttgtgcgttcccatagggatcaatgtgaacggggtagccaccttctgggcagctccctttgttgcccgcttgggcgtctcctgcttggatccagacgtaggccggtgcaactgccgagacggtgccatcggagacatccagaaaggtccgtcgacaggcacaggcggaagaagagactggaccgtctggcggtcggacggagagaaaggcggatgggagaacctgtcgccaggctggttgactggcccatggtcgggagtggaagccacgatcacct

SEQ ID NO: 97 - DNA, 17275 bp, Xanthophyllomyces dendrorhous
gatatcgcccgcctccatctcgctgactgccaggctgacgaccctcgaccgtttctgccggtgatcatccaggccggttgcatccatgcgggctgtggagaaaggcatggagaaggccgcggaagaggggatgggagtcgggagtgcaggatcagacaaaccggacgaagtgggagttgaagcttgcctgtcaggataagacctaccaccggtcaaggtagaagacacaggcgcagacatgtcgaccgtgtttctagcacgtttgcccagaacctgctcaacctgctccgactgcctctctaggtcaagcgacaagtcagagaccttcattgcttccggctgagaagcgcacgtctgggactgacacagccgagcctctagcctgtcctcgactgtcttgagtcgactggcaaaagactgttcgatcagctttaggcgggactcgatcagcttcaggcgggactcaaccatctggtcgaccatcgcttcgatgtcctccttcttgacagacagccgttcggcccggctggacatccgcccaaagaccatgatctccgcgccaatgaactcgacggtggcatcggtgcacgccagagcgtcgtagacagatcgcttgttgggctcggtctcttctcgtgtgggcaggtcatcaaccctggctgtgagttcggcaagagcatctcgtagctcggctaacgccgtacaaggacggcaatatcagtctcaggaaagagtagagaaacgaaagcaggacaaaaatcgacgataaggaccaactttcaagagagccctcgggcgctatctcagcatctatctgtgaagcattagacaagctattctcctcagagggaagacttgcagacgattgcaggcctgatgtgctgaccgagggctcaacatccgtatagtgttggagtatacggtcgatgaggttctttgtcttctggtttgctcctttgatgccgagggtctacgtgccaccggaccggagggatgaggcataccagatggtaaaacggaggcacgtgttgagtacaagtgtgagacagagagaaagcgcgcgcgcacaggagcagagacagaccttgcatagtttttgtacgtcagcccgctttagtttgtgtaattcagtagaggtaggtgtcatggtaatcattccatggatggttggtgctggaatgggtgtggaagattaagacgaggaaatggcgaagcgagctgaagcgagatgggtcggtgattaggtgagtgttgttggtgtcggttataaaaagagcaacattgtctgctcagccattcgctcatactttatatagtacggacgggaagtgaaaggaagcagaagtgaaagcgggaaggataaagaaatgtcatccaggtatggtgaggatgttgagcggagaaatcaggcgcgtctgccgtcgggttctgatgaagatgacgtggccaaattgggcacgcgtcaaggcggggggctcgttcggctcacgacttatgctagttgtcgcaaccctaggcctcaactcacaataactcagttgccaatgctcttatgctttcttgtcctgcccttgttcctgtgaacctcctcagtctctgctcatcacgtgctcactcgttatcttataggattcaattttaaaagcagaaccaaggagaatacaatttctgttatgtagccatgtaggagaaaagcgccgtgactgaatgggtcagggtggcctgcagtacgacgaacagctcggcaaacgtccgggaaaagataacttccaaaatgaagaaccaaacttgtgggatatcgtgtgatctttctacctgcgcctacaacagctcaccaagctgcgtcagatgatagcctccaatcttaacgaactggagaagggacaagacacggatgggcagaggagccgatttagagcgccaagcgctctcttgtgaagtactatgctttacattaaactctgatggataagaaattattatcaactctatcatgaaaaggagactaaggcttagtttctggcgagacgaaaatcatgaagagtcgtcattttagaacgcttcacatactagagggaggaaaaaatatagagtagataaagatatatctagaacagcgatgaagcaggctcgcaaagaaaatttattcatataagaatagagacgcaagggcatgaagtgtgaggacagatataagccagttgacaagatagagcaaagatagaatgaatacagatcagataagacgaatgattcagccgagagaccttgcacgttgaaggcctgtacacgaaaagggggtgatcgaatgagaatgagcaggaaggcaaccggattggaaaggtcgctctaggtctagaagaaatatgctgaaggatgtgagaaagaaagtaagaaagagatagagtcgggtcgtgccctacaagcggaagaagagtacaaatataggcccagatagaaaggaaggaagaataaagtagaataaggtgggattgattcttgaagatcaggacagagaacagagagagatgttgtgaagcgccccaaaggagaaagaaaagaagatgagacagaaggaaggaggagatgcttcaaagagcctcctctctttcttctttaaggacttcgagtcgaccttcggccgagcatcttctcttgcgttttcggtcggtctgccaatcgtccctgtctgaagagttacggtcgatagggcgaccgccagaagtcaacagagtaaatgaacggctgtccggtctttcgtcgacatgctcgtgtagaacgggcagtatcgagattgacatcgatcttgccttcggtctattcttattcggatgaagcacggtcgacgaagtcgtctctacgtgtttgacaaggcagaatagaataagaagtggagatgagtgagatgaacatgaagaatagagagaggagaattcaacataccctgtggaaacgatgtcgctgggacaacatgggaggagataggatcaacagaggcgaccgacattgggctggtcgagcgagcgcggggagcggtatgagacggaccgaacgtggacgggtcgtccgagccagtcaccggaagagggcccgggagatagggcgagtgaaggatggtaggtgggtatgaggtggaaggcgagccagagggaccggatgacagagacaagacggaggaagaggaggacgggtttgtagacgaagtagacgaaaaggacgaccgggatgatctcggtgggctgtttgacggcgacgtaggctcgtatcccattcgatcctgagtgcgtgagtgaaccaaggcaaggtaagaaagacgacgcaagagaaaaggagctattcaacataagaaacagacgaaccaatcgtctgagtaggtcaccgagggaaatctctattgacggcctgctcgaatgatccgatttgggtcgtgagcgatgttttctgtgagtatgagcgctgctcgagtcaacttgatgtttgtagagaaatccttgtcggtcgtcatcctcgctactctgttcggcttcttcgtcgctcgaactaaacggatcgacaaatcggactactctagagggtaagataggaataactatcggccgggcgtctgaaagaaggtccgacttgaacgagtctccacggcagacagagattggcatattatatgtgctgatgagagagttttctgagaagggaatgggatgggaaggaaggcaagtgggagaagagagagactctccagccggctgtctattgatgataaagggatggcgaaaggagcgagggccacaggtatgataaagaatagcagagaactaagtcgaacgaccaaaacgatcgactttggggtgagaaagagatagtgggacgactggaatgaaaccgaaaacgatacgatggggaacttgaggaaagactggggcgaggtcaagaccaataataccaatggtggtgatgaggatactaatgatgatgagaaggatgagaatattctggtcaaaggagaacagacgaaagaagaacatagaactaaaagaaaattacacgcggtcaaatgatcagctgaaaaagtgaggggtaatctttgcagagggacagggcaggtgcatattaaacaagaggaacgcaatagcaagcgagccttggaacgcttatcgttttatcgttcgttccgtcgcacgcccagagctcagtccggtcgatgcactggttggcgtgcatgcctggacgttggtatgtgccctggctggcccttgaagaaagctctcaagggcacacagcgtgcaatcagaggcttgggcctggtcgattgatatattgttccgcaggatggcgtctggctgttggcatctgacgtttgatccctgggccgctagcccaaccggtgtccctggggatgcaaatcccgagcccctgaccccgctgcccggatctaatcatagaggccgcagggctgaagagagatcgtcttatgcctgagagcatgtgacgtgttccaagaaagtgaaggtaagaaaagataaaataaaaaaaatgataaaaattttagaaatcatagacgataaactatatctatattcgctcttgcatttagatcacctcccaggcccagcccagcctccgattttatctgcagatcatccctttacttatgtacctatatagttttctcttaatttttgttcctctaatttcatagcgtaaatgcttcccggagcgcgatcaccgccatcacataatgacatacattcggaagagatttactgcgcacatcacatttcctgcgcactcgtcatccgatcaacccatcagataagattgtcttctgtgcccttaattgccctactgacgtgttaccatattaccctgttaccctgtcgcccggctcctccatcgtctttcgctagtgatacaatctaatagtcttttcaatctcctagtgatttagtagtcacatcaccggcctatgctgatcatgtctatcatgctttcttgccaaccggctctactcctgcccggcctccccacgctctattttccactcggcctgcccactctgtctgccagccaagctatcgtcgttcatgtcagcctcctttgcaacccgatcggcctcttcctgcttccttttcgaccagtccagtaaccaggatctttctgccgcatcctctcgttctaaacgcgctctccaatcgtcatcgccctccaccgttgcccctcctggatgtcgttgttgacgacgacgttcggtcgtgattctgatcactcgacagagatcgcgctcgagaattttgtccctaccaagcggtagccgtccagaaggcatgtatcccaacgtcacatccgcgcatccgtcagtgctgaatccaaagacatatgtcatatgcttcttccagttggtggtgtacaacaagtgcgagttccaagtgccttcacacggatccaaatgaacccagcgctaaaatcgcagagacaccagagcgaaaaatgaagcatcgtttcagcgagtgactgaccgcaaatacaacaaagcatctccatcgctagaggatcttgtcgagatagctcaaactttctaccaatgttatactcctcaacctatcacataaagaaagaacgtacccctatagattcagaatgatattcgttccagacatgatcttccaggttccacacgtaccgcgctcgaaacccggcggcccggaggaagagtgtgaatagattggcaaactctccacatcggcctttccttgtcttcattaacatccggcaatcactatgaccaaatcacaagcagacaaacagttcagacaagaattgaatcgctctcggtgcgcgcacacgcaaacgcttacgtttaggcatttcactcacttgtaccgaggaaatcgttcgatcctcccacatttctggcatttccacaactccactctgcccgccccgccttccacctgctccattagagagacttctccctgaccgatgcattccatcttgaccttactgctaccggctccgccactgccatcactatcagttcccctctcacacaactgacatcttatggggtccacccagttcatatagctttgcttaaaccagctaaccaaaagttcggccaagtgatcttgagagtgtcgacctgaggatcgggcgagcatggtcgctcttgaacgtaattcgtccaacggcatctgtgtccgtgctaatctctatagacgattcattgttcatcataaattcatattagacaaaagaacaaacgcaacacttacctgcagatccgcatcctcataaacatccattccattgtccaaacgtcggatcacaccgacgatcatcgactcgtccgcccttcttggtttccaggagagtgtgtttgccaggagcacagatgatcggaagagctcgctcagattaggttctcgaggcgtcccgtgggtgatgtgatgtgttctcaggtaggacacataagccggaatgaatgtcattgtttttctctttgtgatgtatgtttgtaggttgatgtttgaacgagataaccaattggccgtataatatccgaatcaactccttaatatatataaccgcctccaacattttctcgccttcttttctttcaccacccaaccctcctggtcgtctttccgttcttgcttctattgctcgcttcttcgtcgttccgaaccatcacagagatggacgtccaggaacagaaaacgtcgcccaaacgacccattaatccccctagaccgctcgtcctgcggtcgccaacacagattccttcgccctcgccctcgccctcgccgtcaacatcatcgtcatcatccggtctctcgtcccctccgagctcgatcggttcggccgaccacccggattctttcgagtcctacaccagacatccacccgtcatccgtgcttcagatgtccttcctatatctcctctgcctacacccaccttcaaaaacgagacaacatcggccttacagaaaagatgtccttcgtgtgttcacgaaccaagcaggaacagtccggagggcatcatgatttgttgttcaaattgtacgctatttacccggccttgctccaatctgttctatcgatcgtcgtcattcgtcttcccttcacttctgctctcatctttcttttgtctcgccttttcttttagtttcctttctttttcacttcttgtctgtcgatcaaccgagttgaccagccacctttcttcacgttccgcaggtctcgagttctaccactgggcttgtatcacagcacagcatcccgaatgtcttgatccatcccagcaagtcgatcaacattcgaataagccagtcaccgcagcgccctctggcacgaatcagagttcaagaacgcagattgacaggcccgaacggtggttctgtccgaaagcaagctggttcgtcctcagtgtctcttccgttccttcctggcccagacgcacagggttgcacagtcgtcgatagaagtgcgaaatgtgtcaagagagcctgacggaagtctgacaggccgtgcgtatccgtcctagttcatcgatagacacacccgatagaccagtgctcgaaaaagcttcctgcctggacaattcatatctctcgccctggccgttttcgaaacctctgcttcgaccggcttcccagcttctaccccgactgtcgtcttccgacagcagaccttccagaccgggcgtctcgccacccgagacgaccaaacgacccgtcccgccgcggtcgtcgagttggatcccacggttcgcctcgttcgagtcagtcggactcatccatcaggacgggttcaacaccatggacccatccgagctaggctcgacatggaggtcttttctccagggtcacccgccaggcgatgtcttgtttgagcgaccgaccgtcgtgcgcgctcagagagagctcggaaagcagggagaagagagcatcagtttaattggcggaaggatgccaaaaccaggtttaacgttgtttgatatctgtcagctcaacggtgcgtgaatcctcttcacactgaggctaatttcccttccttccgacacgaaactgaaatggcatcgttctatacctccccctcttcacttgcgtggtctgtctcttcaggtgatcaaactcagctcgaagtgatcgatgtcgagaccgccgaattatcatcctcaccgccaaactcgacgaaaccctggacgctcctcagttggcgaaattactttgagctttcacctctggagaaggaatccgtgggcttattcaacgtactgagctatgaagtctcagattcacccttaggtaaacttgtcaacccaccagaaatcgtcaggttcgtgtttaatctcccgagggggtttctatttttctgcttctcgtcctggtgaggtagatactcaaagaatgagtgaggggtctgtttctacattctctcacgtcaaacaggatgttagactgggcgaacgttgtctggccaaagatacgcaagacgaacgatcagaaaccaagggtacaggtgtactgtttgatgtctcccgccggttgctttaccgtaagtcttttctccccttcttcttctttgctcgtcgatcatttgaataagtcgattaatgcatcgtcctactcgtccgccctgtcttccttatagaactggcacgttgatatggcagggagtagcgtatattatcatatcctccgaggatcaaaaacgttctatctaagtgagcacttccctcgttgtattgttccctcctcttggtaggagaagccactactgacgctcatattccaaaattgtcatcatcagttgaaccgacggttggcaacctgaatgcatatcaatcgtgggcgggagcggaaccgacagacgaatggtttggacatggagtcgacagagttcgtaaagtcacgatctcttctggggatacactgtgagtttttctttcccttctttttctttcatgaacgaagatgaaactcattcgccatgcgctcttgtatttctttcacgctgggtgtgaccgtcgaaagactgattccgtccggatggattcatgccgtggtatgtccgatgagctttttgtatatcatcccaatataggtttccccccgccaacctgaaattgtgatttctttttatatcagcatacgacggaagacacgatcgcgttcggtgggaactatctgcattcttatgatatcggcatgcgtatgtaccccttttccatgctttgtcctgggagaagaaatctcgtggagaaaagtcactgtgtgaattgttgtctgagcgatctttctatctttcttgcatcttttcttgtgtccgtttcgttcaaccgggggttctagaattcaaaatcaaaaagatcgaacaagacttggggattcaagcaaatcatacttatcctcaatttcacaagttggtctatccttattctgccctcctttctttctgaatccgagtcttaaatcaatcaatcctgatcacgccgtttcgaaataaaactacatatataatctttggttcgtttgtgcaatcgcgcgaaacagactttgctggtacgccgcgaactactactgtacgatccttcgcgatcgaacccgtctgtccaatcgatccaaacctgggccatctccatctagcactcgttacaacccccactcccacttcctgtctccctctccctctcactcatcgtcctcgttctcattccttgacacacccaatttcacccctcggttattaagaaatttaagcgagctggcgtccactttactgctattcataagagaacgtttgaaacgtcatcatctaggatcacccgccggaaacggaggcctagaccaaaagacagaccagtcacaaggcggtggaggcgaggagaccgagtcaattccatggttccgaacgcctgacccgttcggactgatactcgaattcgcaggcagaatcgactttcagtttgagcttgagcaggctcggggatggcgatcccatcttgccaacgatgggtccgggcccgaggatcacagggacgaatgtaagaatggcgaagaactcgatctggacgggaggaggaggaggaaaccagaggaaagcaagattgacggatcggatcgaccggtgaaggccgcgcgaaagggacgtcagactgagagagcagagagcgagccggcgagacccagaaggaagcctggaccaaaatcaaagtccaagaagaagccgggaccagagccaaagatgaaggctgaggataaccccagtaccggaacaggttccaaatcggtggttcgtcgaagagtcggccggccgagaaaaaatcctctggtcccagaaccaacggtcgtactagaccgggaatcgaatactgaatgtataacaaaattgggaccaggaccaggaccgaaatgaacaaaacttggatttggcaggaaaggatacagcagggatgtatttcaaattcaaaatgtacgattactatataatctcctgtttctgatgaggaagagaaaggcaacgtgcatctctttcatcctcttagcaacctggggagagaaagtctgttgctctatgagaacccatcgacttccctactctctgggcgcgtcaaatccacctttcgaacagatcctcaataataagaccactgaaaagtcatagggactaggtctggagaagacgctgaagatgtgtgcttcacagaagacgtatgtgtgacttgtcaatccgcgtgccatcaccacgccaagctttgtaaatcgaagctctctctcaaaacgtttcgataatctcttttggatcaatcgtgcccgaatttctgtgatctcatgtttctgcgtgtccctctcttcatctcgatcatgaagtctctgttcttctcagtcaaattgtctgaagccgtacgtatgggctgacatgaagcaagcgaacttcgatacagagtttgcccttcgagagggaaacgacgcgtttggtagtctgtttctttttttactcgaccatgacgcgttataccctgacttgagaaaccttctccaatccgatgctctccaagaacgcagcgcgctatatctcatctctttcaaatgatctcactttggtaaactggcctttcacaggttctcgtccaccctcatgatcataagtcaacagggaaactgttcgtgaccctctcttgtttccttcttctcgatccaccgttgagatggggttcagacgagattgctttcgtcgaaatggatggagataatcctacacgaaggctgaaacaatcatagcggcgttttccaataacgaagtttgcttcagttgttttttttgctcttcaaatgatgatttatgagtagacttcgggaaggtggagattagaacatgaaaggggagagaggggaggttggaatatcgatgggacggaagaagaaggagaaaagaatatgagagaaaaaaaaatagaaaagagggactgaccaagtcaagcttcaacgctctgtaaagatcctttatcgatcccaactggaccatacagaaatatcttctcttgagacagaaagccgatggttcggctgacggcaaattccacattgtgtatattgggatagggacaggtgcgtatgagaatattgattggaggtatgtgtagtctagatgctgatttgatatgatcttttttcagtttcgaaatttggtcaagaaggacaatggtgagtcatttgttggtgacaaagacattataggcagggtggaaggatgaaaacgatacgaaagaagagagcaggaaagctaccttgatatgacagccatgggagccaattggtaacgtattgatgggatccgtcgtcggtaattttgtagcagtcggtatcttctcgaattctacatcatcttgctatgtgtgatttgatacaaagaaagaaaagaaagaagcagcaagatggaacgttagcatgtctctcttttctgagcgcgagagtggaaacaacttctggaacactcaaaaaggaccaaacgaacgaaatacagttcatatgtcgaaagactgatgtttttggtgcgattggctttgagcaacttgtttgttttctacccggtttcgaatgaatttaaaattcataatcagaagaaaaagaataatgtcgggttcaacaccaagaaagagggaggatgatgagaaaccaggaaagtaaacgaccaacactattagaaaagccgacgtggtcctcggcgaggtgagctgagatgatctcgaaatgaggctgtccaagatttattagacatgtcagcttgtcgaaagtagattgaaagaaacagaccaatacagcaacgacaagacgagacgaaggattgagcgcacccagtgaacgccgacagccatagccagattcatgagactacttaactcgacctgaaagacaaatcggcccagatcgaacatttcatccggtgcttgttgactcagtagacagacggattttgtgcggatatccaactcggaaaaagtatgatcaatgtattccctagtgagcggaccgtttgctacgatctgcgtgagagaaggatgatatcggggtaagtttgaattgaaggggtcttgcttgaatgaaaaagtgtgtaccttcaagtaaggcgttcgttcgagagcttccggaaacttcacgagcagctgtccaggttttgtcttatcagtgcaaacccaaaaattgcaatgagaagaaattgtcatgaagaaagcatgcaggggaagggagaaaaggaaggatgaacatccaaattcaactttgcgctataggaaagaaggagagtcacgacgacgatagcgaaaggaatgacaaacttacgccgatatttgttctcaatggttcaccagggaggacagagggtttcacatatacgtatggcctgtgatttaaagcattcagagcccggtctttgtacgcttgagcctgtagggaaggtcaggcattcagttcatcattgacgatgtaagggcatgtagatcttatgaacacacggaaagagaggctcacagcttctagaaagaatttgtccaagaaggcaaagttcccagtctggtcctttggtttatctggcgacagattttcagcgactctcaaagtggacgcaggcaaggcttctgttgaggatacaggtaaggacgaggacggagagggtttggcgagtggtttggtcggatttcgaaggcgtgtacgatggggacctttgagattgagagtatctgacaccgtgttgagctcccggagagagacacaactccttctggacgagctggctgaggaacgagcgatggcgagagtagagaacatggtggttcaagggatgaaccgttgagtcgtgttgtcccaaaatacgaggacgaggggatgatgcgtttctcttacgtaatcaacctttatctaggtgtcagacgttgtagcataatccaacaaatgtgaacggacgtcaagaaaagcaagcagtgacagaagagaaaagacatcggcatttacaagcaggctcgaagaaaatagggatgtacaacgaacagaggaagaagaaagaaagttaatgggtacatatgaaagagcagaatggtcgagaatacattacaaggctttagaagagatggacggaaagagtgataaaagaaacaagagaaatccctagtacgcctccaggaaacaggtagaggggaacagggaaagatgcattgaaggaatagaaagagtaaggacgatctctacaggtctcgcttaccgtccctaccaccggggggtacataaggtgggcagaggatcttgtcgaactttgggtagggcagcttggcagagtcgctaacgaacttttcgataaagatctgtaagttccgtcgcctgaaagcgtcaagctccgcttctctcttgtttgcttccttagaccggagcgactggagtttccgttcttccttcgacggcctgggagcgatttttttgaggcctttgcgggagggataaagtgagcctggccatccgtgatgaacggtaggtgatttagtgatagtctctggagacaagctcaaaacaggactgcccgctgacgaccctaatgaggagtaccatctgcaagccatgctcattgaaggtctgtacaaacacggatgcatgtgggtgtgagtatgataaacaaacaagacagagaaggatacacacaaggcagaagggcgaaagattaatataaaaaagcactgctcatacctgatggaccgagagatcactctgctagtttgctgagctcgttgcataggagtcaatgtggaaagaattgagggaacagctggaagatcagtgatagaatgggagatgattggtgagaaagagatgagagattagagactgcttgatgaagagagcaggcgaaggggttgctgacaaagcaaatagacacttgactaaattaggaacgttcgtcgaacacagggtttggctacatgaaccaaagcggtgcacaatatcacaaagcggtgcgataacaaggctcatcctcccacagcacgtgaaccgtaaccctcccgtgtgtggtctcagtgtttccccgggggagctttcgttcaatcaccctcacttatcaccttgaccatcctcgtcttcatccctcttctacctcgcttctctctgggttgatctcttctaggttctgtcttcgctctctctttaataccgagatcattccgtggaggacaatcccgcgtccactcaaaatggctccaagaaagatgctgctgctcgtcctgctgtcctcgggcatgacctcacttctcttgttctcgttctttcaaccaccaccgctccctctcccagagttcatgtccatgaatgcaagcccttggctcgagtttggaccagatgaacagtgtgtaagtctctttgtgtttcgttttcccgtctctttcctcgtttttggtccatacttgcccatgttctctccctcgtcccgctcggtcgcgtccgtgtttatgagcctatctctctgtttccttctgttctcatcacgatttttactgatcgtgtcctctatgatctgacaatcatcttctacttttgctctgaccgtgattgactctctctgtcgctccttttcctcggtatattctcctattctcatccgcagctgtttgtgtctccattatcggaattgactagcgcagaacggcaagccgcagagtctttgttgccatcaatcgattcagcctttgaatcacccaatggccttctctccttccgaccaacggctggtaacgcttcggtcgtcggtgaaccttcagctgataaaactgtgcatccggtattaggtctcctggcacagggcgaacgcagatggaaaaacatgatcgataaacagagtagaacgcttggagaggctgtcgaagaatacaagaagcggatgggaagacaaccccccaaaggcttcgatcactgggttagtctatcgtccttgttctccttttctgtttgattgtccttttcttggtatattgatcgctgctccttggatccgacatctcatctgcctcctggtaactagtgggcgtttgcaaccgccaaccaggtacttttcccagacgaggtaaacagattatcttttttttcctttactcttctcaattgatctcctctcttactgatctaccgattgtctcatctttctactcctgttcttgtctttttaaaagtacgacccaatcatgaattccctccttcccttttatgcgcttcctccggacgagatcgctcagcgcgtcactgaagcagaatccatcccagagaccttcactctcattgtcaaagaaggcggtaaagtcgtccttcaatggaacgaccaatattccagagacatttggtggtcagtttcactttctttctccgtttcttcttagccttccgtctgatctctctgacggatagaatctcaaacgtctgtctcccaggaatgcaaggacaagagcagatcatcagataaacctcatggagcctttcctggataaattgggcgagatgcggtacgtctgttgtttcctcattctgctttgttccgcttcgcccttccttggacgactaaccacgtttcttgatcaacagagtcacgttctcgatacacgatcaaccgttcatggttcttccttatgagcgtcgtcaggagctcgaaggcttggcaaaagggcgtgttggttcatgtgtgtgcttcttttactctcggttcttgccttcatgaaccatctcgtctcatcatacaaggggcctgcttccgtttgctcagatacttcccatctcatcgacgaagatattcatacggccgactggatcaatgcctgccctccagactcaccagcaagaaccggcaccgaggcattgttcatcggcgaagagaacggcaaggagaaagattcagttcgattcgtcgtaaatcatgagagcgcgatgaacccttgttcaaatccctcggtaggttcaatcttgtttcccaccttcttcttcttctcttgtgcaaatctcttgatctgacatacaatgcctctctctctctgaacagcttcttcaatcgcacattcactttttgacccctcagacagagtccacaaagccaaaaccacattctcggttactccctattctcagtctctctcgaacagaggtcaacgcagatattccggtcgctcctgttgggatcgtcagtggtggtttgaccagacaggacgtcggaaaggagatggatggtggctggcctgctcaaagcccaaagctttattgggtgtgttcgactttaccttccctctaacaatgtgacgcatagcaacgtcaattctaattgtattccaacccgaatttccctcttgtcagcgaggcgctccgacagcaaatccaaaagtcccgatatctccatcgatattcgccaactcgcatcgaacaagacttgcttcactcgcacaaggaaactctagtcgctcggaagaggagcacatgttgatggttccttccggagcgagagatggttcagtcgaggtgcagtctatcaaaggagatatcctagctcaaaagtttttggatgtacagttgcaaggatcttggacttgcgagggtatgccctgcttcttctttcttctttccctattcttcagttcaaagttggagctaagagaaagttactatcaaattctgaaaattctgaaaatcttgggaaacagatgagaacgatgagcaatgcaacaaacttaagtaagcactcttctttaaggtgtaccgtc

SEQ ID NO: 98 - DNA, 16874 bp, Xanthophyllomyces dendrorhous
aaaaaaaaaaaaaaaagggatgagttctctggaaagccttacgacccgtacgaacgttcaaatgagtttaaatacgtccttgatctcgatggaaactcttggtccaagcgattccctaagctcatggccgccagaaagtatgtccctgttgttttctttttgttactcttcactatagatcgcgcgttcagattggacggtttactaaaaaaaaattgctgatgttttcctatctaatcactttgcttaaatcagcttgattatcaaggccggtgtatttccagaatggaatatggcgactttacccccttggttcgcatacgtacccgccaacgtacgtccaattttcttctcgctttcttctgttcctcctccgttcgcgtccaagatagttgaaagctgaaatacatcgatgtcggtttgaactggttgttcaggttgatttctcggatctgtacaccatcctagcgttgtacgtccccctcttctctccaccctcactcttcgactttcactctcacttctttccggggttctacatctttcgtgattgaaaattcgctaactttctcgtcattatggatgatagcttcagaggatcaccgtcgagtacgaaagggatgcatgacagagtagctcatcggattgcatcaaatggccaatgttgggtggaacgaacgtggaggatacaggatatgcaggcttatgctttcaggcttttgttggagtttgagagagctgtcagtccagatcgggataccggaaagatggttcgttctctgtattcctttcatgatgtatccgttcgcgtggtggatacctgttgactctgctcttctatggcgatcgatgatggtccacaggactttcactacacacctcgctcatcagggaagaaagttccggtgcctgaggagtgaggggtgatttaaacactcatttaacatctgtgattttagaccagagtccggtcacctcctctggtcctcacccattctttatatttatccagttataaatttgtatgattatttggtgttggtgtattgtcgagtgagagatgtcaggcaggggttaatgatgagaagccagtcgaaggaacggagagttgtagaaagttccgtctaatctcatcactttctttgacaactcgtttcctagacctttcgttcttttctttttcttgtacatattcgtcttctactttcatgttcctgttcttgatccgctcttagatacctctcgcagttctatttctttcttcattcttttcatcatttctatttctgcttctcatctttctttgctcttcatgtcgtctcatttacttttcactcctttcccctcccccctcttctttctttcgagcatttagttattcaaattcgcatggggttttgaaccttttctcacttgccccgctcgccttggcttgctcacgctcacgcgcacattcacgttgagaacaagtcgattgcccacattcattttgacctaaaaacgcttgacacgaatcctagtctgataaagtcattgaacatgatccctctttaccctttcgtgttctctttttatttattacatgaagtcgagaaccccttcaagcaagcttcttgatggccctctcgagtacctcgagatctcgcttgatactacctccgatggccttaacttctaccaacgagtcagctccttcaaggacgaactccttcctaacgtgtcctacctcttctgacactctctccacctgcgctttgctcaaacctgtctctgcagaagccaccgcagacgacgatgaccgcttgagaatctctattgctgttctcaagaactgggcgatcggttcgactcgggtctcgagcgagaccgatcgggactgaccgctcagcccggtggtgggctctaacaaagctcttctggttgccccgtcaaggttctcgcaaacagaggagacgacatcgagcacggttttcttggcgaggatgtagtctggttgagttttgaccagatcaagtagtgcttccaagtatacgatggctggtcctaacggtttgaaatccgcttcgctcccagatcgagatcggagagcaaacatcgctcggtaaagttgtcgagcgacggcaaacttgatgactttttggaagagcgtagtgtttggaccggaaacgttgaaaggcgctcgtctagcggtcacagttcggacaacgaggtcgaaagactctttgaacaagaccggccggttgatcttcaaggcgatctgtcggaaccggtcggccaggtagagcatctccagttgttggtaaaacatttggtccttgtggaactcgaccgtcttttcgaccgcgtgcaagaggttggatggctcggcgatctcgtttgtggtggtggcattggacaaacctgtaggacgagtcgagtcgaacatgtccgattcttttttgagtgttgctcgtcgtttcttgatcgtcccgttcatccagcttaggaacgatcgatgatcgttctccagagtgagcatcttgttcttccgagcttccgacacatcctgttgactctcctcgagtgacatctcgagttccttcagttgtttcatcgatgacctcaactctgcctccaacatttgggtctcttcaacagctgaggaaactccatcagcaatcaacaccttcaaccgatcggcaatctcgttcgctcgttcttgaatcggtcgaatctgagcagacgaagcctgtttcatagctgccaattcggcatcaaagtgtcggttccaggatttcttgttgtagtcgatgttgtactcgttcgaaaagtacactggatcgaacgcaggtatcgtcttgagttgcttcaagatcaatcggtatactctcatcgcatccttcaacgtgccttctgtatttgaacgaatcgccttggtcgaagtcgaccgatggatcatattgggaaacactttatcgtccccatcggtttgaatctgcttggcgatcgcgatcagtgagtcgtcttttgtgccgacggtctcgttctcgtaccttccgatgaatgtcctcaaaacgttcatgaccgcttcgtcgtcaagttcaaacttgttcttcaccattcggtcaaaatatgcctggaatcctcccgccggcaggttcgtgttgttgagtttgaattcggcgtaccgagggatcgagcgagacgaccgacccgtagactgaagttgttgagcagtctcccacggaagagcaagaggcatctgacggggcgcgggcacatttcgagaaggaggaaacggaagagagttcgttatcgaccgggagtgtgatcgaactgaaatgttcggtcgggcgtgtgtagccaggactgccatatgaatcgtgtacggaaattgaacgtgcaagaggagaataaagagaggacgaatgtatacgaccaggaggaagaaagaggtcggtcaggatccgaaacgaacccaaaaaaaaaagaaaaaaaccacccgatgcgttctggaattatgaacttacgtctggacgacattctttctaacgagataagcttctaacaggcagataaaaccttcggccaagaactaccaggattgatggaacgtatgaggatagaacgaaagagtgacgagcgagaagagagaaggagtaaaagtcaatcgtgtgcgtacggaaacgaaggagcgaagggccgtctgagcgtgacaacgaaaaagactatgaaaatgttgaggatccattacgaaacttcctattgcgttttctagcttgttttctgtgtgttcttccctcatctatatctctacactacatgtgattcactattcaatctggaacatcaaaccatctatctctatcaacgacctctaaatctatttagatccaacaggcttggcgcccttcgcagctatcagcgcatcagcagcggccgaggctgctttggcttcctcctctccctcgtatccctgctcgggttgaacgagagttgaagaatagatcgtcagcaagtgtttgatttctaagtaaaccgtgctgagaaatatgagccaagacttgtaaaacgaacctcgacaatcatatcgttcagtccgagttcctcgttctggtcaaagtctcgatcatagtcctcgaacgacatgtttgggtcagcatcgggagcatctaaagtgatgatcgtgatgaaaagaggatactagtcagtctatgaaatagaaagaggtttgaagacctttgaaacagacttacaagtattctgcaagtaggaatttgctaacggatcgtcgagaatcaatgtgaaaggtctgcttgcattcatgacctgattgtcattaaaataagaaaaaacgtcagcttgcgttcagcctactccggcttttctggatcgttcttccacgaaacgacttacccccttaaggtcctgcaagaacttttcaaaccctcccatctgaatttcctcgcctcctccagctcctccacccttcaaggagtctcctcctcctccgctagcaaagaccttggtgcttaactcttcgtacacctgggtcaagataccttcaagagtggtgaaccttcctccaagtgttccgggttgaagcacaagctcgatctcggggatttcaagaccacaagtctcagacttaagaaaaacaggaagaaaaaaaaggaaagatcaatcgataagtggagctaggtggctatagagaggatgtcggctcgagactagactaaagcgcaccttgagaagatctcgggagagatcctcggcgtcctctactttaagaatgatacgttttccttgggcagatacggctcctccagacttgacctcgttgtctttgtatccacaagagtggcagttggtcgacatgatgatgatatcctaaaagaccatagatgtatgcgcgtgaagacaacgttcggtgttcagcgtcttcgttcaaccctcatatgaaagataagagcgtagaagatccttacctggaaataaggaatgttaaccttcttcatcagcgtgtccaacgggtttttgcacgaatggcaatcactcgggaagctgaacacctcttcgttttggaactttccggcacccttgtcaacatattcttccccattctcaccttcctctttgacggtctccatctgctgatcatcagcctgctcttctggtgctgccaacccgattgaaacatcctgctctcttgttcggtcgtacgttcggaatgtccacttgggatccgaaggcgaacccaagaactggatgaaggagtttccagcaggatcgtccaaggtgatcgtgaacggcataaacggtttctcgccgacagctccggatgaagtaaagtcctgttcgcccgtttttcgtcgcttgacgtcgtccctaccaggcaactcgtccccctcctcatgtccgtccttgtactttccgtcccagcccatctcttcctcatctcctccttccagcacgccattcaacttggtgacgagctcttcgatcttctcgtacgtctcagggtcggtaatctttcggaccggctggtcgagagccaagtctcgcgcggtatcccggatgattccctcaacgttagtgagctgacctcggctggaaggaatcgttaattggaactgaggaatatggatggagcaggtaggcgacttgacgacctgtcggtcaaagtcttctcgagatctgatatgagcggtgtagatagatcctcgttctagcgatatcaatatatagtcagcaagtctaaatgatgacctagggagaaaaacgtatcggagaggatgcgaaccttggatttcaccagcactttgaatctcagtgttgttttctccacaatgctcgcatcggaaggacatgacgacgacttctcggaagaagggaatcgaggtcaacagcagtcgggtggttccctagagacgatcgaaaagatatcggagtttagtatctatttggctcttttgccaccacgacggtgtaggatggaacaaaaacggaagctgacaaacattcttataacagctcatgcataaactctcgatctcctgaacggctctctcctcctcctcctggtcaactgcattctcgacattgctctcttgaatgttatcggtatcagccgcaaccgaaccgatggtaggaaagaagctagacggaatcagaaaagaaaaaagaacagagaacggttcagtttgacgtcgctccaaaatcccttggtaagtcaagaatgaggatcttcttacggatcttgaggttttgaagacattgctaatgatgatttagtctgacgagctctgcaagatgatggatcgataggaggagaatagtaaaacgacaaaatgttgcccgcccaaaagatttgggggtgactaaccggaaccccggttggctttgtcatgatgtctctctctgtgagaacgactggtctgacaaaggtcgcacggagaacaggacatacagaaaggacacgagaggacacgaagaaagcccatgaatcaaagaacagaaaagcctatacaatcccaaaacaatgtctctctcttgcccttcaccaaacttgctctacagacgcgtcattataagtcaatctcaaagtttcctatagttcctcccgaagtttgctatgtcctaatggctctctctctccgttcactaacgacgagggaaacgatgcgattggagcagcgttctcgaaaaacaagtccttgaggaaggcctggtaagacggtcgatcaagtgagttcaaagccaccttcttgtccgtgttgatatcttcaatcagggcctctgttatagagggaagaaagagtaaaggtcggaccagataaatacaggcgctgcatttcctcgacttgagaaagagaggatcaattccaaacgaacccttcgacacatagtttaattcgggacggatatatcccaagacgacgaccaaaatctcgtgagagtagaaatcgctggcatactaatcatccagtaacaaacgaagctgtgaatctaactgaatgagccagataaaagacgctcttaacatacctcatgcataacatgaacctcctggaagacgcaagaaatgtcggtcagtctcagatcccaggatacgcgaggaaacgcgattcccctttgataagcaggatggagcaagagcagagagctgccaacttacagcagtcagcctttcgttcttgtagtacgggttccatcctacgctcatcaccatcggatgaatcttcaaatcctgatcctctaactttgttgacggggtatccaatcctgactgagacgctccgtgggaaggctgaggaagcacgcgggcatagccgtaataaacgccccgtaaagaaatcgaagcaatcgaggcaatcgagtgatccggcaggttggctgaagagtgaaccgtcggcgtgaaacggaaggaaagagaagtatgcaagacagggtaacagaaagagaaacaaattgatagtaagcaggtgcaatcagtcgggttcgatgtagccaaatcagagtccctccgaaatgaacggaagatcaaggggatttacaatacacgatggtgaactaagaaggaaacgaaacgaaaaaagagagagagaataaagaaggatgacgaagtgacatcgactcaccagtaggaattcctagctctttgcttcctctaccaaaccctttctggacagctccttggatgtaaagtgggaacggttcggacggtggttctaaaccgacgatctgaggtctgtccgctcgtgagatcggggcgagttcggccatagtcaagttggatgatggagcagtagtatctgacatattaggcttatgtacgtatgtgagagtgggcgttagtgtatgtctttgtacgaaactctatgtggttctggatctgatgatgatgaggaaggatggtcggtggaggcagaaggttacgacccaaaagtgaccaacttttttttccctctgattgctcatcgccatcgatcaccatcttgtccatccccggtcggtcgtacaccccagtcggccatcgcgatacgtttctcagtattggatactcatgctctcatacagaccgctggcgttcgcttccaacctctcggtgaagaatcatctcgttctggcggcgttgcttcggctcgtcttctttgccttccttcccggctttgttctggccttcctcggcagtcgacccgaattatcgacacccctgacatcattcagacgatgcaagtgtttccttctctttcttcctgtttcttagactcatattcggcctgtcatcatgttctaacttcatctggtgacgacaatacttctggaatatatgtctcttttgttgacagaagtgagagaaggcttgtttctctgggcttccggtcaagatccttatgatggaggtgttttcaaccatgtgggttcatcttctcgtctctatcgtcattgaccttctctactgcattaagactgatagtttgtcatatagtctcccatttacctatacttgttctcaacatgcgcttcatttcccgcattcacctcgctctatttcatagcagctgacgtctcggtagcttgggcgctctccagtatatggcgcatccgctctagctcgaccacaacatcatcagaaagaagaaatcaaaactggagcgctgtcatcagtttcctgttcgtattctcttcgatcgttctctctgtgatcgttctctctgtcttgccaaaccaggtgaaattgacggaagcaatcctggtgaccatttttcttggtggacatgccgatatagatacttgtggaacccacatacgttgttgatgtgtctcgccaaatctacagccgccatcgataacgccctggttgttctttctatctactatgctgtagtccgttagtatgggtctttgctgttcagaaagcgcaagaaggcagatcacttttgggtactaaactcacctgattgcgtttcttaatgcctgtgatcgcctgtcgatttttagaccgcccaacagcgtctcttttgttcctagcactgtccaccttgacctctgtctatccggctcttcttcttccattcattgtcatgattctccttgactcgaccccagtgcttcgactaaaaacggaccaacatcgaaccagcaggacggtcaggcgatcaatcaagctgataacaacatatgcgctcctgttgacaggggtgagcgcggccttgcgaggtataacaggaagctgggaaagtgttatgaaaggtccttcgataatgtaagctgttcgctccgtttggtcgtgtttatatcttgttatctatactcgttcagcggacacggagaatttacctttttgtgacaaattgtgttcgaatatagactgggtattaaagatttgactcctaatgttggattgtcatggtgtgagctccttgtcctgaatactctctgaatatgttccatcagattggcttgagtctctacttaacaattcgatgtctcctctactcttcatccgactgtcttgtttgcgcagacttcttcaccgaaatgtttgatcatttccgtccattcttcaccatggtctttcaggcacaccttgccatctatgtcgccccgctagctttcgcatttcagtacgtgcttcgccttgttctcatatctcttttatatttctcatcatttgtcgatgttgaatccttgcttgcgctttcaacatgtacttttacccggccttacaatgactcagctccgaccctctgttcggcctcttgtgccagagtttcttgatatccactctcaagacatatccaacagtaggcgacactgcgctcagcgcatcgttcctgcctctctttccggcaatctttcctcgtgagtctcttcatgcacacagtcctcgtcctcgtatgctcttgctctcttgttcgcgttctttctggttcttgtttttttcctccttgttataccttcttgctcatcatccattgaacttgccactgtgcttactttactaggcatctcctactccgtcgtcatcattggcctccatgtctattcctccgttctcttcccgctacttgatttcctgtggctccacgccggctcggccaacgcgaactttttctacgcagccggtctggtgtacggtctggggaacgtcctcctctccgtaggtgtcatctgggccggtcggacggttgaattcgagcagtccagagggatcatggataagtcaagatggaaggtcattcaagttgtcgattagaattcatatgatacttcgatctaaaacaggctttcgatcaggatcggtccgttactcgggcaaatgggaaatgactgtgttcatacaatatagcaaatagagtggcagattgagttgagaaggggagttgaaaagagagatttcagttgttctcttgtagtctacatgtggcaacgaaatgtacaaagagagagtgaaagacagaagagaaaaggaaagatctctctaagaagaaaatctattagagacagtatgccaaagatgaagtaggaaatgaatcctaaagagaagggaagagaaaaaagcagattggatgatattcaaagacaaagaagagaagagcatgcactagagtatctaaacaaaatttaattagaaccgtctattgacaccaactctaaagttaatcagactctgaggcgattgatagaccaagaaccagatcttcttgtactcatacaagaaccaaactttctgcagctgtttgttcctaggtggaggagtagcggataggtcctgactcgtgaagaaatcattgtcgtaatgcttgtatatcgagcaaacccgtccgaccggatgagctaggtctcttccatccatcatgtgttctgaatttgtcatttatagtggtagagaagagaaccgttcagcgtgattgatttctctcgacagacccgaaagaagaggaagaaaacagaccgaagagttctagaagcccatttgtcgcatcggaccggtttgatacgtccgtcgggttgatcgctctcacaccctcctccctgaatgttgatcggctgactaaagccccccaaaacctgcttgatgcgtcgagcttccaatatgtttccggcgggtccgagggaacctttcggaagaggagcggagagagctcagcgtctgtctgggcggagtcttgttcggcttcggttaaggctgctctccatttgaccaaagcgtcctcccatactttgacagcatcggtggaccgttttatgtaaacctgtacagttgggttttcgtggatcggtagataagagaaagaattagataaaatagagccacaaaatagccaatgacggcaatggttgagaaggcttaaattggaagaaggcaagaaacttcgaatgaagacaagaagactgacctttttctcgtcatatggaagctcctcccatgctttcgccataaacactgccatgctaccttgcggccgttcctgcaaaggtatcagatgaagctggctcagacgttccttggcaaaagtcgtgaatgctgtatccctgggtctcttccggatgtctggaagccagtccagcgatacaacatggacaatagcatttggattcagcaggccgatccaacttctacaatgcagaccatgggaaagatgacaagaacgagaatctatgtgatggagatgatcaagatcttcttacctatgggacccggaagtttggcaacccccttgtttcgctgacttgcataaaactcctccagagctctaccacaatcaacgtagaataagacgagttcatagatcacggtaatggtttgagacacaacataaagcaaagaaacaggagagagttattgtgggtttagtacggatcctttgtcctcttaggagatggatagggaggttgtatgtgcccaagaagacttcgaaaatcaacatactgagatcgaggtttcttaaccgggcaggtacgaggcggtgccttgggcttgaacaagcggaaagaagagagagaaaacctgggagggtatggcatggagacggagatgaatgaaacccaagaaggagagaagtgaaagacgggagagacctatccgttatatggaagcaacagaagatacgtgagaggtaagaagaaataaaggccgagaaacgagatgatggaagaagatctgatgtacttcctaatcactatcaaagaatatcgggatcaacctcattgcgcgaattcttggctcattctctataattctaacagagatattgaccatgtctactgcttcgaacgtttctatcgccagacaggatatggaatagtagaaaaagaaaaagaaaaaaaggaatataatataaagaaaagatagattatctccatgtcgtagatggaaccccattgagaccctctccgtgccaactagcctgctctctgtcgtcactcagtactcttgcgtactctaggagaagtagaagcatatagctctgcatgtcttcccattgccattgctccttcacaaactgtctaccggcagcagcaattttcttggccgcctccggccgagttttgaagaaggtcatgatgtcaatcagatccgagctattatcgacagcggcaagagagatagaaacggacagatatcagcctgatcggtaatattgtgatgattaagtaaaaatagaaaaacgaaggtagaaggcaagacttactacgagttttgtaaggggacatagtggtaccacggaataaccacactattgttttgtgcaaccccgatcaactcaattagtcagagatacatattcctacgcctcaagtaaagccgcaggcgatgacttactcagaataccactacaatcaataaaaagcagaccaagtaagaagaggaagaatccagaaagaattcatactcgagtcagatgggacagaaaactggatggatatgaagaactcgagacaaacctctgaatagactgtggacttgagcacgaccgcgccatacaagagggttcgtctgaacctggacgaccatccattgccgtccacatcgataacgtatttatacatgaggtgccaattgacactcgatgcccaacttactcgaggggcaaacttgatctcctttgcaatcacgtcgcaggttccgtctctacatatacccagccccaattttgatttgacaatcgacatgataatcgatgcaagtccataggtcaatacggatcatacgaggacatgctgattgcgtccaacgaacccggtcgcccgcatagcagatatgccaggaagaaagcaaggacttacgtggctgagcattgtacaggaccgtcaacaaggccaatatcgaataaatcttctgcgacgctgaccaggttatgatccttaggcatccacttttttgtttttgggtccaactcaagaacagaaaccttctctgtcgaattgctgggtggattagcaaagtggtgcagtcggatccgttgacccgatcgccaatcgactttggcatcagcgtaagaacctataagaatccaatcaaacgatgagaacacccaagatagtcgcgtcagatctcttgggatgcaggtatctctgttatgttcaatgggccttaccggtcatcagaccccgccagaatgctttttcaatcgtcttttcctcccatggaacgtcttctacctcatgtttagttgcttccgtcggtatggcaggaatatcggtgttccaaatagtctatcataagcaacggacgtcaggacctgctattgggaaacgttttgggcgataattcgttgcgtcgtcacttactttgcacgtcgagaatataggagttaggacgctctaggtttttgagaatcccaaacccggttccaatctcgttttgtcagcccagagatcccgttcagcattaaaattcagatgacagaagaagatgctcacaggcgcaagacgagagccgatgaataagctatgcgcatccaataattccggagattcgcaatagtctatagcctgggtccaaggatgaaacgatatatgctgtacatgagtgcgatggtcgaaaacacagtgttcatgttgattagatgactcttaaacgtaccttcataaagtctgcaacaaatgatctgttccgatggaggtctgaaacggcgtctgatagattatcattattctctatcagtagattgccctcaactcgatgccatctaggaaaaatttattaagacagggaaacttattcaatgctttccatcgatggtgagactgaccagattttacttcgtgtggtgttaagatgatgtccgtggtcccctggagggaacgggcgttttgcttgcagggggacaaccatgaatttgccctagcgacctgaccctcctcgtgtcgtactcgatcatcttcaggccacactgtttgcacattgcccgcagtttggtaagtagggaaggacttaagtacatacaacgacgctgatgaaaaccccgaagcctagacataatcagaactaacgttctcctctagaagcataataggtggtgcggtcgatgacttcgcgcgaagcgatatagaaaggcgagtcgttgatgttgaagaagatttccatagaaggaagtaggtgcgcaattggattgatcagatccgtcaagtctctgcactcgtatgaaaatcgcagacgatgcaggtgagtcttcattctacggtattctctctaaatagactccaggtttgtgtattcactaaccgaggtcgctcgccatcaagcccagaacctttgagtgcagtcaccttgccgtttcttcggcaggaaagaccccgatcagctattgagaagattccaaagaagagcgctcagaaagctacatactgaagcttcatagaaaaaatcgtctgggcaacatcaactctggaaagtcgttctctgaggacctctcctttataggccaagaacggaagcatagagtcgtgggctgcttgataaaggtgaggagtgactttggaaggaaatgccgagaaccttatgagaagaaagcaaggaaggttatgcacaagacgaaagaacaaacgtcagccctaagtatctctgagtgtacgatgcctcgagcgagcagacgaaaggtcaccaagcgtgcgcaccatagatcaaatccttttggaggattcttgtggtattttgatcgataggcagcgacggcttgttccaaagaagtcaacctgttttccttcatctgttgtactttgaggtttgcactctgtgaatgcatgttacatttgtgcatgcaagatgaccagcatcagtaaagagtgagacacgtagatgagcatcaatcaaacaaataagcttacctcgatcaacacttcgataggatgcctgtccatgcccgttgactcgtgcaaatcccttgatataagtaatccagagtcggctatccacttgggatcccatgttggtgatggaagctgcgagttcttctctccgatgccgggctgggtggacgccgctaggtgatcggtcgagcccgaaggatttcgaacgatatttatcttatatgatcgatagaacatccaaatgattgcagataagatgagaaaactgctgagctgccttctccgaggaaaccgtagaaagatgagacgaggaggaagagaagcgaggttctgtcctccaagtgtacgcgaattaaatgccatgtcgagcttatgcaagagcagagatataagggaaggtttggccagacgttgcgttggttccctttcctccctatgtcgaagaagaggcaatgagaatcgacaaaagaagcagacgagaactaaacaagcaaaggaagcaatgcaagatgatgtatgagttgaacgtggttgaacccgtctagccagctcggttcaaaaaaggattgaagaatacctaccgagtaggctgcgtttaacgggtaaaggtctatcgctcagtctagatgagctcggtccataatgaagcgcagtaatcaaataatgttcttttcatgaaatctctatcacagcggctgttctatatcgctttctatcgccatcttgtggtggacgatcactgatgtattatgttgtgtcaaagtttcggaactagaaacacttgtatcaagatagattccaggcatatgggtttctgtatatctttcctttctccttttgtcgcagaccggccaacaccctgacggtttcgacattccgcactttctcttttatcgccttgccagtcccatcgtctcttatggtggttcgcgaggagcatggcagtgagagatgacgcggttgaccgtcgttgttctcttggaggatattggaattctttctcagcgcgtttattaagcatatacaatggctagcatcgagaccgttaggcgtctgtttcggattgatgaactatgacgaccaaacatagtgagcagcaggtgtggatccagttgtaagacatgttcccaaaagatggttgattttggcaaggttcatcaaatatggaattttataagttgcgcggaaggttggacctgatagagacgaagcagtcgacaaaggaatgagcacagtgagcataactgatcgcaacctcagaataagaacccggcctatagaattgataagggatgtgaacaaacctgttcatcatggcaactttgtgcctctcatctacctgcttcagtactgaactcgttccatccagcactgccagcaactccatcgcgacccgcttatcaaagtcgattgctgatctcttgtcggcagcggccaatatccacttgattccccatcgagttcgctgacgctcggtcatcggtacgggaacgatcatgatctttgctcctttcttgatcgattttagtcgaatgaagggtgaagcagcgacgatagcggatttaaagataggg

SEQ ID NO: 99 - DNA, 5475 bp, Xanthophyllomyces dendrorhous
gatttaaagatagggagaggtggagatttggtctgtcgatgactgtgcaagtaagaattcgatgcgtgaaacgtgtcgagcgagtatcatgaacgatgaggataacgatgtcagcatagatgaactctgaatagacctaagcggttgctccgactgacattgcttcgagaattttatggaagcttatgatagctctaagtcgatgaccgttcttcatgatcaagttgacaaaaaagtctgagagaggatccgatttctgagggatacttcttgttgggtatggaatcgtcttgtggacgtaatcttcggaggacggcaccgacacaggcgcctccaactcggcagagatctccttagcgaacggcggaaggggctggcgttgggtgtcccgggatccgagaaagtcgaagagggcttggccagcattatcagttgatgccagacggatctgcttgagagtggtaggaagaggggaagagcgacgaagcacctggcgagcaggttgccagatgaaggacatgatgggtagtatgaggggtttctgctaagatatttagatgctgagaataagacgatgactggatgcagataagttgaaaaggcgagtaagaacgagggatagtagaaggtggtgacgaggcgacaaaaaaaagacagtagaaaagttacaaagatgcacaatactcaagatcagtatcagcatctcctgatcaatcatgtatagaggtagtcaaggtgtggagagctctttaccttgaggtcacagatcaaaccttggagaaggttctttgatgggttgattgattgagttgacctggatgggattaactgagttgacggaactgggctcgctaccggcctgaatacttgcctggaaaaagcaaggcaagagaggccacaatacagatttccctaatgagccaggaaaattacactaggaggatctatagtcaaatggaccggctaatcaggattgataagggtgggtccaactgacttggtcatgcacctccttcggatcaacctaacagaaacaaaccaacattagaaagaggtcgaagctgggactgaaactcgagttaatagacaacagattgatatttcgcttgtttagtttcatctaagaggtaagtctaggtattggcagatgtgttctgagtcgagtcattccttttcagaaaacatcttgagacaccccatttcatcttacttgtcacaacttcccatcataatcgagcagagggatttcacccagatgttttgtcagcatgtacgcatcgaagattgacgcttatttatctcgatcttcagcgggcattgaaagcgagagacagtctaccgaaacagacatggaaggcgatgaaagaaagaagactttacattgttcagaaagtatgtgtcgattgttggggatctgtcttctctatatgcgcctctctgtactcttgtttgtgcaactaaaacgtcgtgttcgattctttcaatttctttcgaaatcatgtatgatcctcttattttactcttgtgcctggcgcatcaactcgatattctgacgcagatacattgaagattcaaaactgagaaaaggtgtacaagcgatacatatcggctgtcttcgcagtagaagggcatcggtcacaaatcactctcaactgtgtcacccatacggtttgctgagagatggacttacgaccatgtccttttataccaccactgtgctatgtgtgactagccccgtcaccggcgatatgccatcttgactcgaggaaacgaaaggaaaaaaagctctaaaaactcatgatcaacttacaagttaatccaaaaaaatgtttcccggtctcttcattgtactcgacagtctgtgttgggcgtgactctcggcgctcaagacatctcgctccgatctaaagacaggatggatcagcaacctggccgagtccagcgcggacgtgataacatacatggtatgatcgagaataaccctaacactgttagataaatcggttgatggcttatttggcaaacaatcccacacccgatcggtctttagccagtaattcattcctctcgtccttttcaacctatcgatcttcctgatatacgatgctcctcaaggccattggaagacccatccgactgtctctagtagggaaggcgtattctgtacttccttctttatcaacacttgtaagtcattctgacgtcgaggtgtccttgttggtatatgagtcctaacacttttgcttcacagacttccggcacgcttcaagaccccaaatcatccgtgctacatgtcggttccaagtctcaggcttccaaaaaagtatattataagataggggacaaagacgtttcaagagtaggaatgttcctctgccatctctgataaggctgtgaacgttgagttctgatttttaatcttgtttcgcatgacctgttagctcaattcctatcagctatatacattgtacaatcccattaaagactccaaaatccagtttgtcgatgaattgtcgtttggcttcaccaaacatgcttccaacgccaaatcctccaactttgaccgagatgcattggttgaaaccctttcgcaccagattgagaccaactcttccgcgctttctcctctacagctctcgtcttcattgaccaagaagtactctgattctatcctcaacctctccttgacggccactcgcagaatcaacaaactctggagtgttgaatcaaagtgctgggttcctctgtctcctccagacgatctctatcatcggatggataaatttgtgattggtgtggtcactgcttctgatctcatcaacggtctgaacaaagacaagcggtgtctacagaaggctgtcgaagagctcaaggctcactggatcaaccagcgggatttggttgagtctgatagctcactttccgataaacaattagattcttctaacggccagcccatagtggtgatatgcttggtcggatggggaccggccaagctgaagatgaaggcggacaaccaaatcgccgaggcgatggacttggaaaccgaaatcctcaaaacttccatccaagagggttgtctcatcagcgagggtcagtccaagagggcagcaacttctttcgatatcgattctattcctgacgtatttatttgactgatatgaatctattccttcattcgatgcagctatgaaccccaaagatgcttatgatctcatctggtccatgctgggtgatttcgctagaaaagtccaagtgtcagtacccatctatttgtactcttgatactctgatatctctcaaaccttacctcgcttttattcgcgcttcaacgatccttatcgatattagagacaacgaacggcagtccttcatacataccgatccggacctggtcgtcccgaaagggaagagtcaagaaaaggcatattctcttatgttgcagcaaattccatccatatcagcagccaacgtcaaggccatcacatcagcttacccaactctaagagttttgatggaggcgttgtcgacagaagcagggttcgaggtcccaaaggtacatcttttggttcccttggggtttcggtcgtttctgtcatactttccttatcatcgtccgctgatccttcttgccgatcgactcttcttctcgtttttaacaccaaagtttccaagcgaaaaagcagcgttgattcgtcgtgctttgacgacggaagacccgaatagcatcatagatgctcccaagtccaaagttcaggtagcttagcccgtgtcttgttgttgttgttgttattgtacatatcatttgattattaaaaaaaaccgaaatacaaaccagaacacctgtataggtataggacaaaactatatatagggaaagaagaattataaagatctctagggtgggacgataaagtcgatcaagcaaaagagatgttccatcccttttccctcgataactcggcccagtttatccaaattctaccgtggtcgtttcgctcccaaatctcttcgaccaactcgaacgcgttccggatattatcgattctgcaactgaacgatcaagggaaaagatagatgtagcacaagtttcacaccgtcagcggtcatcagcatacattaagaccaaaagaaggcacagaatgcaaagaaacgagttacgaacttgacgagcaaatcatcaaaatgaaccactatgttctcccggtcctcactagaaaggcaatcaatccccgtcaccgtacacggaaacaaaagtccactctctgctggtgtacccttgaccagtcgaatagcctccaacagatcagctacaagaacctggttagttagcgattgagcgttgctatgacattgtggttgtttttatttgatagaaagaacaggcgccgatcggttgtcagtttgagacaaaaccaaggttacacgaaatggtaggtgaaacatagagacttactttctccagacaacttgcttcaaatacagcttcgcagctaagacatagcatttgaacgcatcgtctagatatttatcgtcggccttgtgaagaggcttgcactcatctaacgaaacctccaaccttgaagcctggtatgacagatctctcagccgagccgctggattgtttcgcaaggggaatgatggcgggaggtcaaaggtcgatcggtaaacagccaaacgagatatctcgccgatgatctattattccaatcaacatctccgttagttggatcgcggagaaagaaagagataggcataaagggtagaatggagccttgcctcaaaaactggcatggaagatcccatatatgtattgagtttcccgcctaaaatctccgcatacgctcctgaatcgaagcatggaccttccaaacagaacgcgcttgactgtgcaactcaatccagacatacgatgggtcagcattcaaatacacacataaaccagaaacgaaggaccagatatagcgaaccataaactcgtgatagacatagttttgcattaaccattttcctggcccatctagacgagatatcattcctggctcatccagctgctcgacgacctttcgagctagcttcaacggagttgcccaagtcgatttcgatcccctacagatctgttgaacggcgccaacgatacaaaagctcaagttaaggagagaaagtcatggtggaacatgaacgagagacaacacacctcgattccacaaaggataaccaaacatgcgagaagagtctcgtcctccttacccagtgcctgactgtcttttgcggactgtttaggtttcaaacttcttgccttgagagcgcgttccacatgcgcgcatacctctctcgtggtttcgttagcaatgaactgccatggatggcctgtagtgctcaaatgggttgcactccaggcgatcagacttagatgctatcaaaatcgaccgcagcacatcgaaggttaattactattcgcaaagcttgaacgaa

SEQ ID NO: 100 - DNA, 46990 bp, Xanthophyllomyces dendrorhous
tcctcggggaaaatagcgttgcatgccttcaggtggaagaacggataccacaggtgctagtttatgcataaagtagtcaaacaagatatgcgcctccttggcgacaatctataggatatgacaatcagattatcgagtcagtaagtcatgagtatagatgtgcagctacatacagcaaacgcgcgaaaaagattgacgccggtcttacagaaggtagctcaggaaaacgtatacccaacaatgaagacccaatttcgattgagttcttcattagcttcattctcttcctccactcccttctgtcatcgttttcgctcctcggacgcttttcgccagtttggtttgttgttgaaaggtcttcaatgaaagccctaggaggagacgtagacccgaaagagtgatccagggtttctacccaagccagtgttgctggagatagtcctggagacatgttcggtagataagaactaggaggagagaagaggccatttaaaaaatcgaaaggctgagtcgattgaatgacgccttgatcttgtaaaggtgggtaagcttgtgtctggattggaatttgggaaccatgagaaagatgcgtttgagagtgaatcccggaatgaggataataaggggaccgagatgattcggaagtctgagtgattggttgagagttgcattgattggatgtctgaacatctatcgaatcatcaagtggctggacaattggtgatagaaacgttagcggcggtgaaggtccataggttggaagaaagctggcttgtcgactatcgctggaagaatcaatagcatatccagctgatcctcggatgatgcctggctgatctgcgtaaggcaaaggaaagaacgatgaagttccgtcaaggattgactctgcgatcagtaatcacaaacgacacgaagcataagaatagactcgatctttttcagttttctacgactgaagctgtatatttaggaaactctaactgaccatcggttgtaccggattgccattgggggtccaccggaatgttaatcgagttttccttctcctttcctttcttcctgctcgtctggttttgatgaacatattcggatgcgccgccattcgtccatccagcaggtttctcatgaccatttgcaaaagttctgcttatcgtctcggtaccatcaacaggctgagagccaactgtattcacgtcatcggatgcaacgggagaagtagaggctttgagagatacaccaggcgcccaattaggcttcctaggctttcgttcgttcaattttcgattgggtaatttgacagtgacccattgaccagtttctggatctaacgtttgaggagggtactggcaggcctgtttcaagcgttgactgaatgcatcgtttgatagataaggcgaccgagaacagtatcgtagagaatgtcagacatacattctctttatccctacgattatcttggaggcttctcctgaaaggagagagatttaatccgatgaaggaaacaacatattaagacacaccaagacagacagataggcttctccaagtcgcatttcttctttcgggccctacagccatagcagccttctctgcttcgggcgattttcttattcttggaatcaactgtttcagcggccgtcgccagcacgaccgagtttacctgaggagtcgataaacccaagttcgccctatctacccgacaggagaacgaagatgacgatgaggaggaagatgaagacgaggccatggatgccatcggagacaagaggtgtccaagcagctcggcttaagatatcaggatggaaaaatggatggatggctgttagagaatcccggctgatatagcgccggttgaacccgacgcactatatgaatgacaaattacgaaaactacaccgacgagtctctcggtgaaataagccatgtatttgtcctgctcttcaactgcacatcaggtttgtttatcgtcatttttggcattggttgtacagatacatgagtaaattgtgcaaagtgaccaagtgaaacgagagagagagaagaatgacagtattcgagagataaaaaacagtggcgaaaaactaattcatgatgagcagctacactgaaatctgattagacgagaagacatataagatcgcagagatcgttccaaggggtcagaggagaggacaatagatgatcagaatctggactatccagtaatatgtagagtcaatctgaaactcacccgagcatgttttcagcccccaatccacagagtcttctttcttctttctcttccgtagaaagttgagcttcagcttcttcgtccgacacatcctcgcctccccaggatcggaaaggattgctggccatctgagaaagttgatagtcaaaacgttgttcgattagtctgggtcaatgagatacaagcgaaagcatcatcgactgacctccaaaatcctggcaagatctcgtctgcagccaacttctcccctctcacatttatcgattacctcctccaatatccattgcctcagaacgaacctcggattccactccttggtaccctttctttctccttcgcctactcgtgctgaatataactttagccaatcaaccaattctaccttggccgatcgttgatcgcaatgactagagcttgctagaagtttatccagcagaggagcatcggtggagaaagaagacaggttacccaggagagcaagcgatcggaagaaggaatggaaatcgagtgagtgccgctgaaggagagataacagagggttgatgaggtttaatttatcgcgatctgttggagaaggaatgccgagtcgctgtcgaagatttatttacatggacagctcgtttattaaaggttgtattctttgtgtatgcaagagtacagtaagaaaaaacaaaccttgcccatgatcaacagatacttttcctcatagactttccaaaattcatcctccagatcgttttcctttctgctggccagcgctttccaactatcaatggttgaattatccacctcgtcggcccaacctgcaggagcaagggcagaatgagattcttcgtagccgatcaacggtgaggtagctttgagaagtgcgctcatggcgtagaaaaccatttctggttgtgcctggtgagaatcaagtgaatcagtccatgagccatatggtattcattagcaaaagaagaagggcgcactcgataagaatatcgccccgagtcgtcagagtgatctgtataatgcagggtagatatagatatcagtcaaaacgtttcatatttggaaataagaatagaggatagataacagactgcagatatgatcgagattgaatttgtccataaaggcaaaaggtccatagtctatacagattcctaggacggagacattatcggtgttgataactattaagccacattatatggttatcaattggccggttcgaggttcattgatatttgaacaacaagaacagacgaacctccgtgcatgaatccccaagcctgccagccagcgaccatactagcgtttcttctagtgatttctctgaccatctcccacgtcgtcacctttggatcagatcctaatcggtctttaacaaccaaagtcagatctcgaagcagattccactcgtcaccagcatatgcggagtctcccatcaaggaaaacacaaattcattttcgggggggttaaggatttcaaatgagcctattcgaaggaacgttggagccaatcgagagacgatcgctcctttctcccagccatattctcgattgacgggcagatcagaaatcaaattgagggagagcgcgcgggaggtaggcagcgtggtttctggaaaggcagacgcatattcagaccccaaaactgaaacccccaatcaaaagactgtcagcaactatggaacggcagtttgttacaagtgggaaaagcatagtgtagcatacattctcgaatcgaagacctgagtacagctagtccgtcagctcgtcgactaaaaggtgttcttccggcacctttgatctgaatctcctggatttcaccagcagggttcacggtttccactgagcgcatcacacaaaagaaagaagggttgaaatgattaactattttcactacagatttacgagattggaggtaaacttacaaagagagatagctcgtccatcgcccaattggcctgcccactgtccgaactgtcttcctccactgtggaatgtcgagagattgagcgaggctcaaagatgttgtccaaaatagagagtatctgttacacttactatcttaacgaccatggatggtaactctcttccgtgtccgtttcgttcaaattcataatcacttccctgcctcccaatacgcctactagctcctcgcgcgccgagttcctcttctcttctacaccagtctccacttgtttgttgtaatcggctagcacgatgtgggcggcgtctcccgcgtccaaatggggaacaacctcgtccaggcatttctgactgaatccgagaagtaccaccggccattttctgttttcattagagtacagacccaatccatctttaccttcagaacttctctccagtggctcccgagacgttaaccacttctcgacatcctcagtcgtgtaagctttgtcctctgctccttccactcgcggtagacggtaaggaaatgatattggcaagggagttacgtatgagaggtgtccagattgaaaggttgttgttcgacgttgagtcgaagggttattcagcagaatgctgtggtagctaggctgactagatggacaagcggtcaaccttgtctgaatccgttgagagacaggtggcaaaggaagttgagatatagaggatgtcatgttggaagtccaacgagatagcattcgtacaggacaagacggaattggattatgaggacgttgatagaactagtgctggtcgtcgtcgtcgtcgttgatgtcatcattggggatctaggattgatacaaggtgaagtccgatcgcaaacaccatgtgtaaaaacaccgactgtacttaaccaaatttgtgaatatatcaataatcatatatcagatgcggtaaagcgcagcaagttgctagaggggcccttcaatcagaacccacctccgtgtgcttcaaccatcgcaccatcttccattgaaaccctgctgattcggtagtcatgcttccatttcgagctcttcgagcttcctctattaggatcccagccggccttctaaactctcagaaacgatacgttggtagcaactacgctccgctaaaccctcttggggattacgtaggcaaggggccagtcgttcccaagtgagatctaagctttggcctctatatgttggctgtatccgaattctattttgtgttggttgtatctgccttgtttcgtccggatcacgtctgacctctggttctgtcttgttgaaaatgaatccttttagcggaaaagaaccagatccgcaactgttcggttatccagagctgcccactgaatatacccagcgtatgtcttacacagttacccttgtctttaatcgtcgcatatagtgccattccttcactgagaacatgaatggaaatacatcggatgcatgtagtcagagatcctcgagctggatggtgggatcctcaggagcgacgaaactttggagaatttgtatgtggttgataacagtgttcgaatatatagaacatctctacatttgtcaatagaaattcttctgacctatctctcttcaaatccctcacaaatacattgaatagcttcaagaggaggatgaagttctaaacgtttggtctccagaggttaaccctcatcagagtccccgattcgccatctatactgtgagtcttcttccttttcagaccatactagatttgatgttgctgattgactgtactttgatctacagttcgcggggttctttggtttcctctatctttactaccagtatgcctgggctactttcgaataccctcccatggtggcccgagagtttccacatgtaaattccatcgtagctgtgttcttagattagattgaaggatcagcaaactaactgtatcatactcttcttcgttgacctacaggacggacttctgtctgccaacggagggcacaagaggaaccgatacaacgtttaccgaggaattgatgaggccgacgttttcgaaggctctcagagagaatactacttgggtcctaaggttgtagagcctaggaagtacggcgaccgagacgagtagatggaaggtgtacgaatacgtcagaaggcaggaaacggttgtatgttgatcatgttgtgttcttattgttttcttgtgtttcatgctagagcagcaaggcgagatgaaacgagatggaatgctgtttgctcggctttaatgacgacttgattcagactgtatcgttgtttgaccaactgacgaaggaccgggatctgctggattatctatcgatctggccatcgatctgcctgtcatgaacggccaggctgtttctcagacaaacagtatgctgtcacacaatatgctgtcaagaagcacattgctcatatatgaggctttcagctggtctcttcatatctcctcgcctttcactatcacctctcttactgttctcatcgattccattctctaaattgtttttagtaatggcacctaaacctaaggaaaagatagtatcagccaagggagacgacggtcagtttctactctgtttcgcttgttccttgtcgacttgagccattgatatctcctttttatatcgatggcacactgacaagtcttctggattatcttgtgaacatgacctgaatagctgagaaggttgaagcctctgtcctagtggtttttttttcttgttactcttttgttactgatgcaactctcatggttcttcttatacagatggtgctcgactacatgagacaggtacatcaccaacttcgttttcttgattcctttcaagatgcttttgactaatccctgagaccggttccataggtcaacagaccatacgcggcgagtgcgtaacgtctcccaagacatcacgacccttatgaacagcatcgtttactttgtagacactgacacgtctcgaaatttgttcttgctgcactaaacttgtagccgatatatcggccaacttgaagcaagcggtatcgaaagcggccgctcagaaagcgctactctcgctgagcgacaaaggtcttctccataagaaagaatatggtctgctctatttcaaacttccttggatagatgaatcatctaacgctcctgagctgactatatgtgaactcttgttggttgatggaatgaacgttcaggaaaacaaacgatctttgttatagaccaagtatctcatttttgccatccttgcacgatcatggttacatgcgctctctatgtctgacgcatatacccatttatcattaggactctcttcccgagacaacccctgaggcgatttctactcttcaagcagagatcagcgccttggatcctgttatagaagccgcgcgatcgacagtgaagaagttgacggaaggtgcgtctcgaactttgctctgtacccatgtgttcctgcaagacgttcttgtactcaagaacggctatatgtgtcgggtgtttcgttctcgttacacgtgtgggtgtgtacatgatctggacggattagagcttaatacattgaccgagtcgcctcgaacggttgacctgcctggcttgattgccagtcttgaagcagaggtatgctcaatgactttgtacatcaaacaccgcgctactcgctgtagcctatgtttgttcgttgctgaccatgtggtctcccgtttgtctctgttggtatgtccagaacgctatccaattatctaatctaaggtctctcgagtctggcgcccccccaatctcagctgagaaactagagcaggcggaactcgtgtggaagaaggagcgtgctcagtgggttcaaagaagaaagatctacaaagcgttagttcgctccgactttccgtttcctgacttgaatcgtgatatcaatctcttgagtttggattgactttcgttcattgtgtggccgtgtcgggcacagagtcatcgatcagcttactccggatatgaatgccgaagaaagagctgagtgggaagagggactcggaatcgagccgatgcctagcgtacgtaagcttgtactgtacagaaggtatctcaagagacactgacgtcttacgatgtttcctgttcatttgttaatgtttaccaggagtctcgaaaggtggaagaaagcaagctctgcgtcgttccttcagtggtcagggcgaagagacctagacaagggagtgatgcgtaacacttgatcctctcagacttattgaattaaaaccatcaagcacatgttacatgaatgagacaggtagagagcctgatggaaaatgtagatacaaaaagacaagatagaagtatgacgaccagaagaaagatacagctaacgttgcgagcgtttacaagcctttctgtgctcggtaggcctttgcagcagccttggtcagttccgtgaccttgtcctttcctgtgaagtcagaaccattcttggctcggaactcttgtaggaaaacaagccaggcattaactacaaagcaggtacatacacgatgtatagacaagatgagagcacaacaagagacatatagaaggaacagagcagcatcggtcagttcctcgcccctaatatttgagaatggtacaaaacataccagcaataggggtccgcgcgtactttcggaggggcagcagcgatttatcttgcttcaaagcctccttgaacgccgtcttgtcagcctcggttaaaccggccgaccaagcctcgatttccttctgccacgtggccttagcgtcattgtagactttgttatctttatcaaaggcctccttgtatgactgaaatttcgaagcaagcgagggtaaagaatgaagaagagatattgaacgagtgaccaggtcagtagagcttctgagcaccgagaggatgagtgagtgttggatggtacgatccacagagaagacagagaccaaaatagagataaaatgaagcaaaacaaaggaggaaacaaaggaggatgcacataaggatacacaaacctgtttgtccgtttcagtcaactgtttccagccttcagcagctgccgcaagagatcgtttggccgactctgttccttcgacgatggcatcctttccggcggcgaagtacgactgaatgtatcggttgtaggcatttgttggcctcttcggctgatttttcatcgctttaagatgagttgagccaagagagaaaaagaacatgacaatgacaaaagcaggtgggaatggagatggattagccatgagacgtgcctagtctggtcgtcgattgaaccacatcgaaagattacagcagacaagactgaacggaagccagaccagcatctatacttacgagacacataggtgttagccaaattctggatcgttttggtaacagtcgacttgggaggcatttttgatgatgttatagagaaaggacaagggtttatagagatggatggattcgatacaagaaggaagttgacacacgtatgttgtgatgtatctctgattaagagacccagcacgcgtcgcggaggcgaaaggttaaccctaactatattatatatgaaaagaaggataaccgtctgctgaccaaggctcaatctgtttttgatattccaagcaacttaagtctagcttatagctacacaaccgattggcacaagcagccgtaaccatgtaatgatctacagctttaattagtatcccacgtgcctctgtcaacagtgaccccatctaccaagccggggtatcaccggctgcacagagtggccaagcatagttgttccccagatcttcatcaatgatcggacctccacaatttttttccgacggctccactcgacctgcggcagatcatgaccccatagcaatgaccggagttgtgacccatgtttgtttccgtcactctcccgcatcttcggtcttattcccttcatgtgctggatactaaccggggttcagaagaagactccgtctggggctgaacgttctttgctaactgggcttacgtcatccagacggatagatagttgaccattccgcttggaacgtctactttgactaacgctttctgtagccactcatgcgtttcgttttatcgtttgactcttatgtcggtcagttgactgacttctccggagggtgccccccattcctggggctcaccaagctaagggcgtccgtctccggcaatttttttcctcatcattctgttttctctcagttccttatatcctaaagcgttaaaacaggagcagtctatcgacggcctttcccctcttcctcttcttgaacaatctttctcttccttctcttaacatacactcagcgggaaacccaaactagactgctagctcgattcattctgtcgacgcgttcagcttgacaagtgacataacagacaactacctgcgtacaatccatctttacaaccctcacattccccacactatgcaaagttcacacggtctcaagaagacgcctgttagtcactctttctctagcttttccttttcccattcgtttcttacactgtgaacttttgtcttccctgcgcacttgtcaagatcaacgcatcgttcttccctaacgagaatgaacgggaagatgagcatttcgaaaatctcgaccactcccctactaccactgctcccgcatcggaggctggtttctcgggcggcgaaaagactgctgacgtcaagagcaaaaaaaagattatccttgtgcagtttgaggaaaatgatcctgaaagtaagctcctttgttcagttttgcaactgtcgtcttgatttcgagctaatggtatgtaatcttttcgcagatcccatgaactggtcgactggcaggaagtggactatcactattcttctcaacttgatgacgctcatcatcggtctttcgacatctgcttattcgtctggaattacttccatgtcggaagagtttggagttgctaccgttgtcggacaggtgcgattcccttcttcgtctcttcgcataaggtctgactcggctcaacatcaggctaacatgttgtgtactctttaaaacgataggttggcatgttcactttcaacgccgcctgtgcaatcgctcccttgttcgtcgcccctctttgcgagttgactggacgaagatacatctaccttggcgccttcctttgtttcactttggttgacttgatgctcgctctcggcaagaacatcggaaccgagattgtcggacggctcttatccggattgtttggatccatcggttggtctttttctgttttcgaaccgatcgtcagcttacattgactcacccaactctgtcacctcttctaggtacaatcttggttggaggaactttcgccgacatgtttgttcctcgggatcgatcggtccctatgtctgttttcaccttcgctgccatcttctcaaccatcgctgctcgttcgttcaccttttctccttaatatcctgactttggagcgaagtcgttgatctaatcacgctttgtgacactagctttgtactgtggtttcatcgatcagtcactcggttggcgatggattcagtggattcacatgatcgctgccggtgtccttctcattgcagagttcatcttccttaaagagagccgaggagcggtcattctcaaagcccgagctgctagccttcgaaaggagaccggcgacgatcgataccgagcacctatcgagctggagtcggattcgattgctcagcttttcagagagagctcacttcgagctattcagcttttgtacaaggagcccgttgtgttcttgtttggattgtacgtcgatacattcgtttttccaaggtcgtatcatgcccgcgagatctgattctcctgtcatgcttttcttcgtcctcgattgttcagctggattgcgtgagtttttttcctttgtcgatcaatgttgttgtcatccaaaatgtcaagcactgcgcttacaacgatgtatacatgcgtgatctacagtttggcttggggtgttgttttcttgttcctttcggccatccccctcgctttcgccggtaaccgaggatggaacactggtatcgctggtctcccttacctcggcctcattgtcggttgcttcatcggatttgctactggtttctggcaggacagcatgtactacaaagccatggacaagtgagtctgttttcaagtctgcttcttcatgtcttcaatctaacgtttccacccatgtgtactattgcgtttctgcaacagcaacaacggagtacctgtccctgaggctcgactctatggtgccatggtctttggtcctcttttccccatcggtatcatcatgttcagctttacccagtacggattcgttcactggatcgcccctgtaagttttgtttcaatgttcttctggacgattgttagaaatactgaccgaccttgtctgcacgcacagatcattgctctggtcttgattattcttggaatttaccacatcttcttggctgtctacaactacacctgtaagtctatcctgctcaggcgcaatcttaacattccttaactgaccaagtttcctgatgtgatctctccagccgattcttatgccgagtactcgtcttccgctattgccggacaaggtttcatgcgaaacatgtttgccgctagtttccctctattcgccactcagatgttcaaaggaatgggttatcagtgggctggttcgttctgccacctcactatcctcatatctcacatagcggacaccttactgaatccatctgtttacgtcttctctacaggcctcatgatcgcttgcatcggtttctgcctcgttccccttccctttgtgcttttcaagtacggagcgtccatccgggccaagtctaagtttgctgcctctaacaccggactttcagccgacgaggatgaacaaggagcacccaatggcaagaagctcaacggccgggccacgtacgacgacgagaaagagaacaaacagattgaagctcaaatgagctctcagactgataccaaccaggatttacagtccgccgggtttggtgatcaggctgctcagagagtatagacatcatagcccctttgccttctgccaagcctttccactaggtactcatcattatcttcctaatccttcaattcacttgtctcgttcctgtttctatcttagaacaaccacttttcgttattttcataaatcctcacctgcatcaatgaatcaaactgggtagggcccatctatggtttccttaaaaagaaggaagacctcatcctttgctgctgtattaattacttttacaatattgaaacaaaaatatatatttaattctctctgtgtgaagaaaactgtcgatagactgatacagacgatctgagagtgaagatcatggctggatatcatgtatgtggatcagaagaacagagctgctttattggcagacagaacgccggggctcatactctccacaaccttgcactcgcttgagtttcttcccattcttctttttcatctattctccatttcttttgttctcctccttttcgttccactttgctgcataccctcactccttcatcttcccattcattcatctccatactctttggtcttcacaatcctctgctgggcactatgaggctgatccctcgagctgtcgtcaaggcacaaccattacttcagcctgccctgatatcccaacggcagttctcctctggggaacaccctccgagtagacgatccaaagcaaagcccaaagagatagtgaagacgatcgcatccttccttccggcccgtcctcctttcaagaaccctttcgagctactcggacatgctacgcgttatggagctcaagaaggtaagccatcttctcagtccaatctagatcgcgttcctgtccttatatcgtgccttaacaatgtcgttcatctcattcctcacgtcgctcgatagccgacaatccgttgtaccctcggtacaacccagccaagatacagcttgtctcttccctcgtacataagcagatctttccggaaccaacctcttcgtctcccactcccgaggcgctagaggtcttcagccgagtgacaagcgaacagactatgtcgatagacgggcttatgtcgagaaagcagacatcactgccgttacctccccagctgggaggcgaccttcgttctcatttcgaagctatggcttccaaggtttgtttgaccattcgttgtatctgttgagtttgcctcccgagcctcatcagtggttcttttatacgcaaccatgcgatcaacacttgtgttctgatgaacgctcttctaggttgcggaaccatacctgaagctctcagaacaagcagcggcaggtttcaaaaatccggttccatcaacgttccctgacggctcagcgtgcgtttctggatggtccagatttgatgtcgatactgaatcctggattgctacgccccatccggtcgagcaggtcctcatcgtcacctatgataaaatgccccagaatcatcgatggccgctcttcgcttgcgcttcctcgccaactgatacttatatatgggtttctccgtggttaacaggggattcagatcacttcaaacatctaatctctttcggccattcagcagaacctaggctcatcatttccaatgacttggtgggcttccgaccttgcgttcaagagacctacaacattcaggatagcgcattgcgattccttagtatgggtggccttttgggttctgttgtaacacagggcaagaaaattccagaggataactcgaaagatcactctgacttcgaaccgtcattatttgaaggcgtgtacaaccagagctttccaaaatatccgattcgttttgcttctcaaatgccgtctgtagtccggactccagccaaagcaagagaggtaaccgagaagagcctcaaggagttatttgaaaggcttagaggaatgggtcggtattttcaacttcttttcaagaatttccggaagacctctccttctttagtctcattatccggccctctgagaatgggaacatctatccttcctgtcgatcacgagttcagtcggtttgtcgccaattctgagcaggccttagaagacaccctgcaacacgctcaaacggatcttgctctacttgccgaagaagctcgactgttatggactcctccatcagcccagtataagcctgattcgccacactcggaccccatcgaacttcctccccaaatagcgaacgacgaatttctatctcggttggactggacacctcaacgggctaagcatgtcaattggcccacagagttcactctcaagcaaagctcggatcctcttgcgatatctcaccgtcaaaatgcaccgatgaactatgacgaacttgtctcctccaaactcatcccaactcagattggacttcggttcaatggtcatcccatcgtatactctgaggaacatgggttcatctatttctctccaacaccgctggagaaccaacaaccattagaattttccgatgtcaatcacgacgtgcatctcgcgcatgccacgagcacttccggagcgtacttctaccggttgccgagcagaccaggacttgatattgccgtccgatcggtgttgaataaagattatttgaaaagatcattttcctcgcctctgagctgtgtcgatccaaaactattggatcttattaggaaggatgcggatacgagccttattttagaaacagtgtctcaagcaatctcgtcttacactatgtctaaagataagagtcagtttttctttgaaacttctgttcatcaatacattcgtaaagctccttttgctttgacctaatttctgacctcggttgcgttccggatttacgttctttcctccagtttcgaaacctttttcaaaacatctttcgaatactttgtcgcgctttgatgatacgcccaatgaccgcgttgatttaaggaacaacgtgacggtgcctgcccgtatcggtctcacttttgatggacactctgtggtttattccgccgagcatgggtttgtgtatcgaactgacgcgccaatagatggttatgaacccttgcagttccccaaggagagtgcagataacgtttttgctttcatatcttccgcttccgagggatacttttaccacatgcctaccataagatatgacggcaaggaagtccgatcggtactgggagcaagatatttgacgagagttgggttcaatcggtttagctgcgcgaattcagacctattgcaactcatccgagatcgggcggataatgaatcgatcatgaatgccacgaagagagcgatggccgctcaagacagactaatgaaagaggcaccacatttcgactatccagctccctcgaaatctgctctggaagcttattggtggccgaagtggttcagtgatctttttgatgatgtgtctaccgagcctgccaatcgtcttaatctaccaatttcacattcaattactcctatactccttcggctctgctggaaaggctatcctctataccgtagccgtcgtcatggttgggtatatcgggtgccgacctcgaggacgaaaggagtaaagctgcacaccaacatgcgggagagtggagaccattatcttcaacaattgggagctcaagaggtacggactatggagcgggacgggttccttcacccaaaccgtaaaccgaagagcgcattctttagaataccatcggcggtcaaaatctctcaagccgcagacgatatctggtcaggattcatcaggggagggcggctcactagttctcatccgaaggcccaagccatacttgaatctctggcctcagggacaatttggacattgcaccgcgaacgtatgaaaagcgctattgccatgaaggcatctgaagaccaccctatgggtttcgatcaagaaatacgaaacggaaatcagaatgaatggagcctgattgctccacgggtctcgcctatggcttctttgacaagacaagcagcggatgatatttggctggttagtttagtccctgcaatcatcttgtttttgtacccgaagctgagctacttttttctcttctcatggtctttctttgcaatctttttctttctgttgtacaaccttttgtgatgctatagaacgctcccaatccaagatctgaccagattggaactgaggttaaagcaatggttaaggctcctgaaggctatagaattgtaggggctgccgttgagtcccaggaagcatggatcacttctaccttgggcgacgctcagtttggctttcatggagccactcccgatagtaggaaggtcttgaacggaaatgagaaatcacaaacagacatacattcccaaacagcggcgatggtcaacacccaggccgccaaggttttcaggatttcggaacctgttttgagccgagaacaggctaaaacgttaaaccaccatcgagcctttggcggcactcaacacgacatggccaaacaaatttatctttcaatgcctaagccagatcaaacggtggccggacgtctggctcgatggcttcgtatcagaacaagaggttggcgctcgagagcttccaagatgcaccatttctggtgcgaaggaaccgaaagtttttcgtccaactcggtcgaaaacattgcgcaagccatcagaccggttacgcctcttctgggtgcatgtatcccgtataatatccaggcgtcaagattggccgatcccgcacactttaggccgatccgaatcgattggagtgtaaagtcttcaggagtcgactacctccattgcctgattacctcgatggactatctgtgcaccacctttgagatcaacgcccgcttcttgatctccaaccacgacgaagttcgatatcttgtcagagaggaggatagctaccgagcagctttggcacttcaaatttctaacctctggacccgtgcattgatgtctcaacggttaggaatggaggatcttcctcatcgtgccgcctttttcccttctatcgatattgatactgtgcttcgggcagatgtcaataatgactgtgtcactccttcccatccaacacctatcccggctggagagaccgctaacatccgagagattctcaagaagacaaacagcagtctcctccgggatggacctatacctgcttccgtcccgagcgacaagagtgggggatcgaccgagcttgagaggattcttgaagattggaagaagctttacgcggaccgtgtttcttcgtcgacggccttatgtgaccatccgaaattcccgtcacttgctcaggtcaatgcggatcccgactggagaaggttttatctttatgcgcaaacagggagaaatagagcagagctcaagcaactctacgaggagactggggagcctgaggattgggttcgtaagagtcgaggcataaaatgattgagaacgaagagcatgatgttttatttgtatacttatttaatctcgatcatgtttattatttacccgcatatatttattcctttgctctcattttcatatctcgcacatggctgctccctatcgcttgtgcttcttattctctgtttatctttgacaattcggaaacggggggcgaagtaggggggccgggcttgggtagaccatagaaaatcgaatatcatatagaaatgactaggctacaaaggatggagacaaagattcgaacgaaaagataacgagcgatcgatgcggaaagcccttaatcgacaagagaaagcagtgaaagtgtattgtgttgtgtgcagaatcaaagatggaaactgaaagatccttcaaagagagagggaatgtggagggaatgagacagagaaaaaaagaagaagaagagggagacgatgccttaacccaagaccttcttcagtccctccttttgagcgtcggtaagggtgagagggaatttaatctgccatctgacaagcaaatcacccttctttttcagactacctttcttgctgatcggcatacccatctcaaatagcctggtctccttgccgggagtgacgactgacggaggaacggtgatcaaggtggtcgttccgtccaacagagtgatcgttcgttgggaaccaccgggggaagtcaatgcgtcgagcaaagaaatctcctggttaagaatcaagtcgttgtcctgtcgcttgtatcggtcgtggggcttttcttcgacgacgactggaacgaagagcgcgaatgatgcataaagtgagcaagataagtcacgaaaaagcgaaagtagaacagagggaacaagaaaggtcaagcgacttacaaacgacatcagccgaaggtccgttatcaacctcggttcccatcgactcatacttgatcctcgttcccgtcttccatcctggcttgatgacgatgctaacgaccttttcctcgagcgttccattcaacattcgtcttgtaatcttgagcttctttgtcgttccggtgaagagatcttcgagtgagcaaggtaacggtcgaacgatctcgtccggctttggctttggctcggccctgggctgtcgtcttcctccgcctccaccgggcataccaccgaaccctccgcccatatcaccaaaaggactgtgatcatgaccacccatgccgcccattccgcccattcctccacctcggccaccgccgttcatgaacatactgtaaggaggaagagaagaccgacttgtcaaaaccggtcgactgtacacaacgcttcataacgaaaaaaaaggcagctcactttaagatatcctccattccaccaccaccacctcctcctccagggaaccctccgctgaaacctgctcctcctcctccaaagccggaaccaggaggaggttggttcttcagtccatcctcgccataagtatcatacaagtgtcgtttattctgaattcacgaaagacagcgtagaaagataggagatagtcaaacatgttagactcttttgcgccacacgattcataaaggaaagtgatagaatccaagacgtacgctgtcagagagaacatcgaatgcctcagagacctctttgaactttttgctagcagtctcgggactgagggaatatggagaaagacggtgacgtttgatcagcacaaacgccggatcatccaggaaaagaagatacagtcgtcgagagggtatcttactcgttagggtttcgatctgggtgatgacgcagagcagctttcttgtatgctttcctagaaggaaaagaagtgaaagaggagcgaaaaggaaggcgaataagtacaaagaaataggttgagtagggcagagagtgaggaaacgggaacgaacttgatctcgtcgtcggatgcgtcctaagagacgtcatcgaagttcatcatacgttgaaaatccaaggtatcatcagctttggctcaaacgtgaacggcgtaggccaaagtagaatcggatgggaagcataccttggagatacctaacagtctagagaccaccgaggtaagaggatcataggaaagattgtgttagtgaaacgaacacagaccaagactcttgcgataaaaaggaatggagaacgaagagccagaagccagtcaatgcgaccggacacaagcacaaacggttggaacggacctgtagtacttgtcgtcggccattattctatgattcgaaagagctgaatgagatgatctgtgtgcgtttgcgaatggatgtacgtgttgctgtttatggagggaagagaagaggatgcaagaagagaaaaaggaaaaaaaagccaacagcccgactatgaaattcttgccggttttctaatagaacatgctagaattctctagtcagttttcattctctccgcctccatctccatctctcatcatcgtcaccttcgatcagtatcatcgttgttggctcctcatcatgagttctgttcagaccagacacagagtcatcggcctgtacaaagaggtcagcatgctagttcacagaagagatcagctcacagaggtaagaaagctaactggtaacggatctattgacccatccctttcgttcagctcatccgtctaggtcgagactagttcgtcccgatcgactaaccgtgtatgagagactcatcctttctctttcttactgacccgttgttttctcctcctcctccttaataatactaactgatgctcttgtaaagcccaaatcctggatataactttgtacccaaagtacaggcagccttcagagcatccgcagggttgacagatcagaaagctatcgacgagaagcttgctttggcagaacatgtgaagaatggttagaacctccttctctcttttcttccttgttcagctccggccgtactcacgcgcgcttggaatcaatatcgacttgatggtctacatcccgacaccgccttacctcttctctctgtgatgacatccttcagagacactggctctgatatctctttccaaatatcgatacctccgccggacgtactgtgttcccattaaggatacgataccagatgtctcactggaaaacacaaacaaatgaggaacccctgctttatttgtctgctttcttctcgaacgaagcagagcgtccgaggttctttcgataggaggcagaaccatcgtgattcacgttcgagggtcctgccatctgctcacacgcccgagaccgtccgtattgtcgttctcggtccaggtccaattatgtatattgtctcttgttgtaatcttattcagtcattttgggatcaatttgacccattgatcgagtctcagctcagacttgaactgcatggcaaaaatctttgtcttcttcattagacaagtagacaagagcagacatatagatcagagagggaataaagagaacggatcacgaaaaggaagaagaaagcttcctgatcaagaggaagaaatgataaaatagagaaagacatggaaggaagcgaataccggacttaatgtacaagagaccaaaatcagagagaaaagagagaaaagaaaaagatagccagacagaggggaggggagaggagcggagaggagagtagaaatcaaaaaagagaccttgaagggaaaaaaatattaaaaagttatccagagaaaggaaaggaaacagaaaccgagacgagagaagaaggtgataaagaggagagcagacaccaacagatcgtatgctttctgagggtcttggaacgattctttgcaataaatttaattcggattttgacatttctctcttatcttttaagaatatgtcttttcctcgattcatcgccaatgcgtcggatctatcataacgggaaacagatctgtcagttccagaatcagctaatcaaacaaaaaggagatggtaccactcactacacagcccaacgttctacacatacacatcgctcctcagatccaagggtacgccccgattcccgacccttgagctgacgttccagaaccagagctagagccaacagagtatgtacctatctgcctctgcggtcccatctggaaggctcctccaggagcagatctgtagacgcccatcgagggtccctggacctgctggtaaacctgagagtgtggagaagatggcgatggagagaggggagaagatgatggcgaaggcgtcgtcaaagctggatggtacgctacagagagcggagcatggtgaccacccgcggcaatatttgtgtgcatatgctgttgctgttggtgagaaagatcaagttgatgaccttgaactggaggagcaacgctgatcgcctgagggataggatgatactgagtataaaccggatgctgaagatgctgctgttgttgttgctgctgctgctgctgctgtatcgcaagagaagccgatcgatagaccatagtagagtttgggatgtgagctcccgaaatcattggttgatgagcgacttgagacatcatctgctgctggtgttgctcctgatcttgatgctggttttgggggtggacgagagatgagggagtagctgactggaaaccaagagaaaatgaacccgcctgtggctgtaattgagtgttgttctcgtgcgaccaagggtttggtctagcagtgccaatgggcgccggtcggccgaccgtctctcgctgtgtcaccgggttccagattggatcgataccaggcatatgtaatccagccaaagggaactcgagctgacgcgacgtgggaccatgatcatcggtttccaatgaaggaacgagtgtaggtacaggcgacggtaggctctggacggcagcaacgtgtttgaaaaggggaacagtcgatagacgaggtgattgttgttgcacggtaggtacagtagcttggacaacggcagtggtgaacggagtgtcgataggcttatccacaggagcggtagaaggaacagcaacgagagcaggggcctcctcaaccttgacttctggggcgaccggaataaccttcacagattcgtcaacagcggcagtgggttgaacgacttccgtcgtgataggcttggggctgatgacagacagcttttccactacagacgacttggtttttcttgactctgaggaggaatgaacttcaaccttcttgactaagggtgcaatcttgacagccgctttgacgactggagcagacgaggaagaggaaccagatgcagccgccttcttggctcgtttggcttcggcttgtagatcagcttcttttttcttccgagcagcttcagcctcagccttagctttggctgctgtcgctacttccgccttgactcgtgcttctgcttcaatcttggctttagctttggcgaccgcttctgcttctgctttagctgcgacctctgcctctgccttctttagagacgctgcctccctgttcttctttgcctcttcctctgccttcctcgctgctgcctcagccctcctcgcttcagcctctgctttcctggcagcggcggcgtcttcagccttcttcaaagcggccgcctccctggctcgtttagcctccaattcggctttcctggcggctgccgcttcctccactttcttttgtgcggccgcttctttagccttcctggcgtcggctaccgctttcttgacagccgcggcctctctgattcgtttagcatctgcctcggcccttcgggcagacgcctccgcctttctcgcagcggtcgccgcttctttcgccgcctttctctcggccttttccgactggagcctcatcagatcttcccagctgatcgtccccaggccttgaccgatgcctccaccgggttccatgccaacgtttggtaccgactcagcccctccgaacatggcttgcatctctgcttcctcctcaaccgacatcatgctgacaacacaaccgtcgctcagagttgttcctacacccaaagccttggcccttgcctgtagttcggcgtccgccttcttctttgctttctgtcgcatccgtttcttggcgttgagagatttgagaggtaattccggtggtgccgatgatgctgtaccagaatcaacagagtcagcgtcctgttcggcacgcgagtccaaatcgtcttgggagtttcccgaggtcgaaccggatcgagagcgtatatgttgacttggatcagagttcaaccccgaaccggaagcgaccggttgatcaatttgggctgcttccggttcggctgcagagctagcggcggcctgtttcttcttgttcttcttttttttcttgttctttttcttgcctggtagaggtatctcgatctcttcggactcatatacgttttcgtcgtccgagtagtcatctggacccgcgataatgttagcctgaagagatggaaacaaagagatgccagtagagagggtaagcaggttcagagtcaacaggagtgagcaatcaaccagaaggggcgacaaagaaggcgagaaggaagaaagcgaccacaagagagacagagagggagagggagggagaaagtgtccgaccaacgaaaacatcgcggatgaaaggaccgttgaaacaataactcagcctgagcctgggaacagagagcaaactacaagaacgggcagaaaaggggaggagaaacaagaaggacagaactgacgtcttgaaggatctggatggcccgagcctgtgctatcggattcgatatatgatggtcttgatagatggatcgataatttgcttcatcgtacacgttgtggtgtgcctgaaaaggaagaaggccatgagagccatgttcggtataagcaaacccgcccaatgtattgacaaggtctctatggaaagccccggcggagaacgtggcattgtcgtgcaggacaggttggatggatgaacgaacaagagcatcctgtgtggttatcgccatcgacgacggcggtggcctgtagctgccgatcgaactcggacttatgctcggtccgacgcctacgccgacccttgtactttcaatgtcacccatgccatatgtcccactgatatccgaggttttctcacgaaacgactgtcgggcgatccgggaggtaatggccgtgttaccgaacgcggaggttggcagaccgaccgaatagactccttgggaggtaggaaacgtggtcgaaatccgtccggaaagaccctggtcgatcctctggaaagtgatctttgcgtcttcggcagaaaccgctcgttggcgttgagccatctgggcggcttctccggcagcagcgagcatttcctgggcggcctctttgagctgtcggttgaactccaaccggtacgcctccgagtttggatcccctgtcattcgactttggatctgactctggatatctctcaagatgtcttgcctcgaaggcgtcgagcttttgctgtagacaaagaagaggagtcgcaacaggatgagagacaaaagagataaagatcgagcagttccggtaggggaacaaagaaagaacgaaagactttggaagacgaaaatttcaagacttacccctcggtcggcgttgtgacgctctttcctttctgaagcgggctcgatccagagatagtagtcctactggtagtaccacgagtgttcttgggacttgtcccgagatagctccagattggagctgggtctggtgtagatttggatggattcggctctgaccgaggatcagttttgtcaacatgttccgttcgtctatactcggcgagagaagatgcggtctggtcgttcatcgtagcgtcgcattcgacttccgacagcttgttgtcggccattgatcgatagacgaaaggagtgggccgcctggatgtgaattatgtgttatggatacgtctacaaggaacagaacagactggcgaagacggtacgagggagagcaagtcggaagatagcgagagcaaggacttgggcagcaaccgaggattaaacctggatatcggaccagagagatgtgtggcagagacggatggaagagagtcagatctaagcaagtgatgttttttagggaccagagaatcttatgggtcaaccgaacaatgcgaacgaagccacacagcagagaggtctggaagcctgaacgatcaaggacaaatccaggacgatacaacaagctgacgcagtgtattcctttctatctctcctctcttgcagccgtcgctgtcactctgagagaaagaagactggaaaggatccaaggctggacgtaccgatggaagctgatggttactggttgcctagaaggaagacgagaataaaaaggaacgaactggaagaaactacaaaattgcgtaatcacattagaaacgttttctaatacaaagactacagaagtttgacggccaagactgctgctctgacagaacagttgttcccatctcccggcaaacacacatcgtctgtggacctctagagaggagtatcccagaacgataacactacaacgctctcccagataccatatcgacccggtagaaagccccatcatctgccggctctgcaaggattcctataggacgcagggtttctcaccgccagctgggggccgtggcagacgtcagattacgtaagtgtccggcactttcgccgggttacgtaatcataccatctttcaaaaaaacgggagaactcacacgctgaaagaatggcagactcgacaaggataccatcacctcactttggtctttgatctgtctatctcttgttcccatggcatcaattctctcccgatcgcttctctcggcttctcgtgtggctagagtaccggccggcgcgtttgttttggctcagaaggctacctttagctcaactcttgctccttccatccggatcaggtcggctcctctcgcttcggacccaactccgcctcctccaccgccgttcaaggcttcacccatcagaccttcaggtcaatccgagtctgacgtgaaagaaagctcttctgatgctgaggcaacgtctgagtcggtcccggaaccgacgcctgaggctactaaccctccgccttcgtcaccgggagccgaaacgcccgcatcagagcctagtgcaaacgctggtgccaagccgactgccaatccaactcctgatcccaaattcaaggccaaggaggaagcaaagaagaaaatgaacagcaagctggtcgacaagatcatatatcgaggtgcctgggctatcgtggccggttgcttggtatactctgcgttgcctttcagcgaggaggagaggaagcgcgttcaattggaggcatgtcttctctttgattttctctctctccttctctccggtcacgtcttgcttcagcatctctcatgtttgtagtctgatctgatctttatttctcaattctaacaggccggtgcctccgacccttctcttaccgatcgaatgtgggctcgactgacggatacttatgtcgtaggttcccctcctcatgcactcaacttgtcccaatgatctaaaccttatgcatgtttcgatccaaacttcacccggtgataggtccaacccaagcctttgccacctcaacccatgcttccgcctccgattcaggcggaaaagcctttcaccttgatcctcgaccttgaaggaatcctgtccatgacgacggtggatccagtaaagggccgaaaagtcgcgattcgacctggagccgagtactttatcaagtaagtgcggatcggtcttgtccatacatctcttttgaaacatccaatcttggcctagacctcattcgcttgtccgatcgttctgtgtcaaacagacgcgttcatcagctttatgatatttcggtcttgacatctcagccaggcagagtacgtccacttttcacgatcctcaagcataccttcatttttgcgcttgtatctcaagctcgttcttttgtctcttggtcgcgacacgataggaggcgatgatgatcctcgacaagttcgatccctatcagttttacattcccttcaaccagcgacttcttttagccagccccgatcctgaagccgctccggtcttgcctggaacccaaaagaagtcatttgagaacctcggtcgagattacgaaaagacggtcgtcatcttgaccgatcgaaaccaagtgggaagccacgaggaaaacgtgttggtaattccaccgtggaagggcgatgcgtctgataaagcattattggacttgattgacttgctcgagggtatgacgttctttttatttttcctcactctgtacccggcaaacattatcctgacgagttgattcatgcgtctttcttctttcctttcccttttcctctctccttcgtgccttccttccatagctctgcgatgttcagaggttgatgacttccgaccgatcctcaagacatacgccaatgatgcaaaccccctcgaaacgttccagctctctgaagccaaccgacggaaagcagcatacgacgcatgggcgctcacccccttcggagctcgagcgatccaagaaaacattccatccggaacaccggaagtgcagccaacgtcgtcactctcccgatggttcggactgggagcatccagaggacaggcctcgaccggtagatcagtcgttcccaccgtctggggagataaacccggtccagggccggataagttggacgtcttgaagtatgtgattcaggaaagcatgagaaagctggaggtagagttggagagggcggtcaaggaggaacaagcaaagaaggctgaggaggccaaagccggggaggtggctactgtttaaataatcatgatttggatgaaaatgtaccttcacatgcacccccttgctctccaaagagatacaaaaaaaacgttttaaaaaaaaggaaaccccgacagatcagaccttcattacaatgatttctctcgatggagtgactgaaaatcatcctcgataatgtaaagaacacatttggatgggtaaaagaaacttatacccgctcggtcagatccgaacatttccttgttctatgtctcaaatttggaattcgcccagatgctaaacccatctcttcattccatcttgatctcactgtgtcataaaccagacaaaatcaccttagtgactgactgtgatttcttctagaacgaagaaaaacacgaagactgcaagaacactacacgcatcagaatggagagcatcagggctcataatcctagagacctcattgtcatcagtgcatcggacgatcagaagagagctagccgagtgaacaccttccgttcgttcgcttctttttcttctctttgatggtatttccatttccttctcatggcgatcgtcaagcttatcaagactcgttttgttcaaaaaacgaaacaaacacaaatccgatgcaatgaacgtgattgtcgacttctgacataaaaagctcagtggggagctcccaacggcttgtcactcgagatgtatctgaatagagatgaattgatggactcggaggcgtgggctgctgatcggaaacttgtcacttggtttgtgttattgatttcttcttcttcatcttgccttcttctcttgtctcttgacgcacacactgatctataacatctcggactttgtttgcggtgtctaacgattgggccgatgcgccaatcgataggattcttacaacaaagagcacagctgatcagtcagacactccccttctcgcccattgcgaaacattccgaagggccgcttttgttcttgaccaatctgctactgacagtgagaacgagacaagcatagaaggtagaaagaaaagattgaagagagcagtggggtatggaattgcttctgtcttcacgccagctgttcacagaagcaaggggtatgcgaaacggctattaaaggaattacattgtttgtctactcggttctttccctcattgttcgccaagcaggaagtcagaggcctcctagctcatccgatgtgatcgatcagaccttcttgctccctcagagtcactcccgccgtttcctgaaagtctaggatctcatactccaaaagtcccttcagagttgacgggtatgctacaggacggtgcattttctgtactatatagcgacattggaccatcggtttgctcttcttgcttcttttctgtcctgctactccacttatagagctttgactgatcgaagcttgggctggtctgcgtcgcgtcccctacgggaacggggaagtgtagttctacacaggatgctacgttggcgagtcggagcccggatgggtttcccagtcgtccatcacctgggaattccctatccttccatcctctctgactgaaacagacaaagaagcaggaacgaatgtgaaatggatatatttaaaagaggacatcacccacatccagtcgcgcgtatccgaagagctttacacacaactagagagcacaaccagtgaaagagataaagactgcgtcgagttagggtttcttcctgaacagtatgtattatcgaactctataaaacatctgatgaatcaacgtgcatactgatctgcgcttttcatccaactgtatcatgtacagaggtcttctctatacatctatagtccgatcccaactagttgacacccagccaggtcccaagcaagcacggcgaacgtatggatttcagacgtccgatggaggattagttgtctggtctcctgtagtagagaagggaaaggggaaagggctgggcatcaccttcgtaggtgctcctcttattcttttgtccccaagttaacggaaactgaagcttgtacacatgtatacgtgcatatacaaacagactatgggaaaaatcccatacgacttgatcgcccgcgccgccgccagcgagcagtacgactggatcgagatctgggacgaccggtggctggccgagcaggaagggatgggatggcctgttgatggaaggaggatagaaagaagttcgtctgccttctcgattgccctttttctgctactcgtgcttgcgctttcctctattacgcgcgcttcctatctactgacacttgactcaaccgtgtgagaatcttaatagaggaacatctcgctcagttgtgttactacgatcgacctaaggttgacaaagctcgctgggtctataatgaacggtttgttatgttattcttgtagttcaagtcaattacgacttggcttgtcttctcggtgtgtactgatgtgacagactaactgatagattcgttccatctgaccacttcattctaggtatgcatggtgctgaggtcgactaagcatatgaactcctatcagccatatatcaagtatactgtagagaggggcagcgttgtacatctaaaagaactactatcgtaatgagcttacaggaaggcctatcggcctttctcgctgtacttccatatcccagtcttacatgagtacccgagaatatcgtctgtatctaccaacaaatcaaccagagcatggacagtatatctataaggtcatcagagaaacagactggatcggaaaaatccgtcttcatagaatgtggatttcattctctgcaccgctttgcttatctctttcttatctattaccgttcttgaccgaaaacccgatcatcgataatcttctatccgaacccatcttctttttattgcacactccgcctccagcatcttgtctgaccgcataacatcgatctctcaaacaacaacgacagaagattgaaggagaagaaacagtcggagacatacggaaggaaaaaaaatgagtggagaaagtgtttcactgacagagggctatgatcatcgagaactgatggtcgtccaagcttctgaggagcagacgagaatgactcgcctgaacacatatcgttcgtttttttttcttcatgcttgctcacctttttccggctgagtttgcattttcagcagctcattcactgattgaaaaacacacctgattactcttctttacttctggatgctatcttccgttcattcgtaatcgatactccgttctacacgcggacgaaacagctcattggggactctcaaacggagtctcgctagaggactatcttaacaaagatgaggtcatggagagagaagagttctccactgaaggcaaattcatcgtctggtacgccggccttcttttttcttcctctttctcgttgtccgcacttgactgctaagctgacatgcgctgtacaaacaggattttgacgcctaggaagacagccgatcaacctgatacacccattcttgctcaatgcaagacttatcgacgagcctcttctttcatcctcgaccgcaacagcagtcttgcagagggaaaggtaccgagcaccttggagaagaaggtgggctatgggatcgctactgtttacacgccagatgcctatagagggaaggggtatgctaaacggatgttgagagagttgcattgttagttgttttctgtcttttcacatatccctgagagtgatctgatcacgttatactgtcaatttttatctcacgtacagatctcatggcggccccagagtccttgcctccgtatccggccagtctgggaccccattctcctcgtgtacctcctaatttgagaaatgttctacaggatgctgcgttctctgtgctgtatagcgacatcggaccccttgtttgttcatttttcttgattctgatcgaggttataccacggaacatctggacaccatactaatctagtcgaggatactgtcatggtcagttctacacgaagtgttacgtcggcgagtccggatctggctgggttgcccaaccatcgatcacctgggagtttcctgtttcggctgcttccaccacggcgacccatcctgacttacagaaagagaaagatgttcagtggatatactcaaaggaggacattattcccattcagtcgcgcgtttcgcaagctgtgtggacccaattagagcgctctgcacaagatacgaagggaaaggatggagctgaggtcgggtttctgcctgatcagttcgtctggtctttctctcctttcccttcggatgtacgtgtatactgacgattatgacatcccttgcatctcgctagaggagtcctatacatgatcatcgtcaagtcacaagcggttgatcctcaaccaggtcctgatgatccaagacgaacatacgggttccaaacatctgatggaggggtcgtggtatggtcacctgtcgtcgaaagaggaaggggtgtcgggttaggtataaattatgtatgtccttttgttcttgcctacccatttatgatctttcttttcttctcttgatgtgactgacgaaacacacttacctgtgagtagactatgggaaaaatcccatacgacttgatcgcccgcgccgccgccagcgagcagtacgactggatcgagatctgggacgaccggtggctggccgagcaggaagggatgggatggcctgttgatggaaggaggatagaaagaagttcgtccttctcttataagcgggagatcgctggtcaggtcgtgtctcacttatgattcgttctccctcctttaaccggacgttgaattcattagaggaacatatacctcaaatttgtcattacgatagatctaacgtagatcgcgtccggtttattttcaatgagcggttggttttctttttttcccttatacctatctgctgtttcacttgactgaaagactgagcacaactgactgatcgaccaatggatccaatcgtttaacacgtcctatagatttgcatggtgttaaatcaagtcacggctgatcttcaaaagggtgataagatttgtatgcgacgcggaggcagaagggaagggcgagtctgggacagagaaggagatagtatatcttgactacaaaagatccggtacgacacttgatacaattccacatcactgagattagtaacgggacctcttgttcaaacgcaagcgttctagaagattttagtaggagaaagcaagtagaaagacgaaagagagagaaaagatcacgcattgtaccgcatcgacttgaacaagtcatacactttctcgctcaaaatatcccctatctttcgtctacccacaccttttacagtagcaaccaacatgtgcttggcatacctgatctttgccggcctcttcttcggtgttttggtcaccgactcggccttcttttcggaccctattgatttagatttcgacttggacttgggacttggtgtagggttaggttgagatttagcaatagcagaagctgctatatcctgcttctcgacctgctctgcttgctcgaaagctttccacaagagttggagcgtcgggtgaacctcaacgatcgcgtccgctttaggagcgctgattccgtctattgagcgcaacatcctgctcaacaactctggtggagtaagatctgaccgagaccgtttgtttaatttgttgtacgtcgaataggtcgtcaagtaggtttcgtgtgggttagaagtagttaggttggatctaagagactcgtaggtttgtcgggtcacggccgagtctgggatgatgtttagtggtttgttctatttgtacgaaacgaaaacaaagatgtcagagataagacgtatcggccgttcacgcacaaatagatcaagacgttgcatacctcaaagaacgaccggacggtttgatcaagaacgcgtagagagtcaagtgtatcatcggggttcatagtccttttgagaatcgttttatcaagcgcttgaagggaagtcatcgtggaagtgatttgagtggaccatcgttgttcatcgtatgctgattcaaattcctccatcaagtatgatacgtgttccattcctgattgccgaagtcttgctttttgatctctaaatctgccatcaagtgtagagttgacaacgtcgtccatccgtttccgttcgactacgaaccccaagacgacttcatcgttatcttctggtgaggatgattttgcgtctgttctctttgcgacccaaagcatgtctcccaggacgagacttcgcttctcgacgttgagttccgtggcctgaaggttctcgaaagcggccatcccactttcagcgatagtttccctggtatcaacgagaagagcaatctcgtaagaaccagcaggccaggtgatcagttgaggaacacttggtggaggacgagttgagaatgatctttggatcgggtgtgagcaagctattggcagagatgtggattcggagcgcgtcggtcgaatcgagaccagtttaggaaaagagagagggaatggtcgacgagccacgacaacagaccgagctagaggacggaagtgtatgggtgtcagcctgaacaaacacgcgacttggatacgtcgttccatccaaaaacttacctgataggctcccaaggcgagacgtacgagctaggtgcatttcacagtacagaatagttgtgcgatgacggttgatcgttgatcgtcggtgtccaagatgactgtcggatgggttgtcttgaagcaagcggaggccaagtgaatgttaggctagggttacaatgcacatagactcaggtcacgtgttacggctaacgagtaaccagactcgcgccagatatcttttgtcttcttctcttatgttcgttttggattgtagggagcgtcttgatctgtgatcgtgcgtcgttactctaggacacctttgaaagtcacgtatgtttctggactaggaagaaatgggattatttgtaatctgctgatagcatttcattcgaatacagaggagtcgtctagacgcaaagagataggaaagaagaagaagaagcgaccatcgaagtttcatctttagaaatcatcttcgtccatctcgactatcgtttggaagcccaagagaaagagcggaaagttagcttcgtatcaaatgcgaaagacagaaaatagaagacagttctaaggaaagagagataagacgtactctcgtcagggttggcggccggtccttcattttcaggcaaagccgtggtagcttccgtccccgtcttcttcgtagcagccacgaaactaggtcctcctgccgctccggctccttcgagcgcggccatcggatcttctcctgctcctccatcttcgttagcaggattagaggagctggaagcggtggtgttggtcttgccaagtcgagcggctgcgacttgggcggcaaggtatgagccttcggtgttgaacgctgcttggacggctctctgttatggtccatgtttattaagtaagagaggagcaggaaagtgcaggagatgagttttctcaactcttgagattggaggacagggagaacagtagaaatcgaaccttgattcgaagcatctctcggaacgtatcctccgatccagtatcgactgaacagaccgaaaagagacagatcagtctctcatcaacaagagagaagagagaaaaggacgaagactagaaacaaggcgtactctcaaaagcgttccattcggtccagaaagccttgtggattctcggatcacagaactgactggcgtgcgcatagatcgctcgagctctgtcgatctcgcccaactttctctcgaggttcgcaaaccgaagacacatctgggcggtttgaccatctgggaggacttcgatcgctcgagcgtaaatcggccgagttgcaggaagtccaaagttggcggctgctttagcgatgtagatcgtgaacatctgtttggggattgaattatcatcctcgatccgaacgtcagatacgtcggccaagagaacggtaaacagagtaggacgagactgacctcaaacttgtcttctgatttgacagcccgagtggctcgatcgtaaattgccatcgcccgtttcgccagtccatgttcttcctcgagctgagcaaacatgaggaacagcggcttgcagaggttatcaggacatttctcgagagcttgttcaaacaaatctcgcgttctctccaactttgttccgccctgtttgcgagaaaaggggataaagattgcgttaggatttgaattataatgtaaaataagatgacaagtctttgaagaaggagcagaatgaacgtacataacgtttaacaaacttggaaaggtaaatgttccaaagttcgaaagcgatagggaaagcgaacagatcgataccccgttcgtacactttgaaagattcctcaaagtatttgttttcctcgaggaacgctgcgtaattgacgatgatctggaattgcgccatgatacattagagagttgatcgtcagcaacttcaaacgaccgaaaagagaccaggagagatgtgctttgaaactgacctgagcattagcgatcttcaactccattattcgatcgtaaacctccttggtgctctcaacagaaccgatggattcttcaagatcaacatagaaagaccaaagcttaagtgacttgaagagtctctgttggactgtgagggtctgttgttacgcaattgatagggatagattgactgtcaggatgtacgctatgaggtatcataggaggattgatagtgggaacaaaatttgactaacttcgtcgtggtaactgatcttgaggtttttaggtgcggtcgtcgctcgttgcataaccctgatagcctcatcgtagttcctatcgaacaataaagtataacaagaatacgtcagatgtttgtaagatagaatccggaacgacgcaaagaccatgaacaaagaaacctactcgtttcggacctccatctctgcccactcacaccaaacctcggccaactcatcgaccgacacgaacggaactcttaccgccctctcgaacacttctctcgcgctcttcaagtctttttcgttcttgccttctccggactcggaagagggatcagatgatcctccgttttcatagaacttggcaaaatttatgtacaatggggagagcgcggttggcgcttttcggggattgattgtcgagattgccttgttgtacgtctcgatgatctgaattgggatacgtgatcgatgtaaaaaggtcaggctcaagacgataggaggtgataagcagaagcagaaagaaaaagagagaacgttttcaatcataccttttcgtcgtcctgaccatagagagcaactcgtttctcccactcgacgacatcgtttccgttcctcctcaacaaaacttcgttgaccaagaatggtcgcttatccatcaactcctcaaactcttgcatagcagaatccagctcctgttccattccttctttgtcatcctcatcctcctcatcctcagcggcgagggattccatgagggaggagattagggtttcggagaactcggtgaaggcatcaaagatttgggtaaagtctctgatggtgagaacagagccaagacctgtctcgaaagagtactttgctctgtcaaattctcctttctgaatccagaacgtggccaatccggtccagagtcgtccggcctggtctttgaaaacctccagtccgtctttcataacgatctgttcgacatcaagcttgacatccgagctgggatctgtagcggaatcgtagatctccttcttttgttgctgttgttgagtgggttctttctttttcccattggcgactgcagaaggagcgacagtgttggcaggtctcatagggccgtcgatcctcatcaacttgccgttgaccgaggcaccaccgtcctggtcagcagttccatcagcatcagcctgagcgttcgttccagaggaggaagcagcttctgctcgagcacgttcaacctcgtcccagtccattccaacctcatccgcgttggcctcgacgcgctcgagccactcgacaaagagctgataagcagactgtccgtcgacgggtgtatatgtccccgcctgagcctgtctagccagagagagcagcaactttgaacgctcgaggggcgaaggaagaggggtggtgaggtagtgaggggtcaaagatggatcaactttaaggaaccgtcgccagactcgtcgaccagcctcacctcctctgatctcggcccatcggaggtatagtgcccagacttttccatggagggatggagcgagggaccgaagagctcggtcgaacgtccttcgagcgtaagttctagagagcggtgccggacagagagggtgaagaagcggaagcagatggtagtgccatgccatgggaagctagaggacgcgtacattgtagagagacagatagagaggaggttgtaagaaatgaaagacaggagatggaagccgacgcgtcagccgaagcaaacttttcagaatgcatcaactcgaggatagaaaaagaagaagaaagaacaaagaccatgccgactcacattaggtagccagctgaccattctttcccctgttgcgatcaacgctttccactcctcaaaaccaacaccaccatcgagaccaccctcccaatcggcagcgtctttgatctcttgcaagagctcggtcacgtccaactttcgcttgaccgacttctgctttttggtacctgcaagaacggagggtccgagaacgtaccgttgtctggtgaggatgtaagatttccatagcttgaacgaggtgggaaagatctccaacgctcgttcataaagcgaggtcaacgtttgaaggccaagtctagcttcttttgaacgaagtggaccaagcacgacacattctgcactagcaccggagttctcggccgtgtctttctcgtcgttctcggccagctctacctcggcatccttctcggcagcctccaaccgagctctggtcgagtgaatgtgggtccaccaggcagcaaagttgtcagggttcaatgataggtcttcctctgcctgtagggaggacggggagaggatctctgggtgtgtcaaaggatttgggatgggcgatgtcagcgggaacaactcagtgagagaggataacgatgccatgataggcaaagtgagagataagagagagaaacccagaagggatggaggaagaaacgaagaagatagttggaggttgaaagactgaaatcgaccggagatggaggtttgaggaaaaaaaaaggaataggaaatattccagacaagactacaaaagtttgtaatgcaaaaagacaaaggttcactacaacatccagcccaagctccgtcttgatctcttggtctgtatcctccatcatgtctggatcatcagttctcagaccgtggtgccaccctctaggaggagtcggtagagcgttatgtgtcaagccacgtttgttccggtcttatgtggtcaagtctcataatggtaagaccaaaaaatccaagtcaacatcatcaaaatcagaaccatcgccgtcacccctaccgagaatccaaccaccaagcatcactagcttactctctccagcgtataccgtggtatccccagacgagaccaatccaaatccagttgggtcgtttctcaatccgatcaaagttcggaccaacttcgcgctcgccaaggaacgcaagatcaaagcaggcgccgctgctctcgctgccgctttggtcgagggtgcgggatctctggatcagatagaggaagatgagtctggtcgtctgagaaaactggatgggacccttgtcgtctataccgatggaagtgccaaagggtctggtctcagactagctgatgctgggtggggcgtcgtctggagtcacacaaatcaacagttgtgagtgtgttgtttcgtctctttattgtgtcgcggtatgagatcatctttgggtcctaacatcaatcatagaaatcggtgtgggtacatgccaggtttatatcagacaagcaaccgagcagaactcaatgtttgtcttttgtttctcgcgtgttctccatttgccgattcacactgatatccttgcgcttttctgtcccaggccatcttggaagctatccgatcaattccggaccatcattccccagtcgagattcgtacagactcatcgtaggtccgaatgactctttagaattctgtcctgttcctcttcgcctctttgtctatgcgcgctcatgatattgtttctcgtttctgtgctctttttcttacagatattgtgtcaacagtacggtcatcaatttcgttctatcaatcccacacctcgcggaatatcggttcgatgctaactcttcatgctcgacgtctttcctaacagtctttacaaaatttcttgccacgtggcgaaagcgatcttttgcagggagctacgctaacttggatctgattttcgagatcgaagatctgcttgctaaacgaagggcaaaggacccgcgaaaagcaccccaaagcaaggctgagaaagcagcagggggatcactgaaaggaaacgaaataagattcgtccatcttagaggacataaaggtgaattaggaaacacaatggccgatgtatgtccttctcctgtcatcctcatcttgtctatgccttttgttgcgccagcaaccatacgcccaccgtctctcagcgtactccccttgccactgttctgatcccatctacaaacctcattgtccgataacgttctgaatagaaactcgcagacgaaggatcatcgatccctttcccgctacctccgatggaatactttggccagagggagttctcgaaactacgtccagagtggagaggattgaatcacaagtaccggattcctggaccggcaagtataagattagagggagaaagggacaactagagctggatcgagtttgtcgtatactcgacatcttccaaaccacatcccacccaaatacataatctgggatcactccaaagcatatacgcacgatagatcaagttgcgcgcgctcttctttccctctctcagcctccaaaacatggtatccactgtactcttggtgcgacagaaagagatcgtagaagaagttgattacacatggacattcttcatagacatcacgtgacctaaccccgcaaagaatctttttatattcccaaccttccatcctatcaatcaactcccatacattcctgcctccgttcttttcagagtacattcgtggagatcaggagtgaaggtaaaggtagagcaagacgaggatgtccctcatatctagattcaatatcagatcgaacgctgctcttagtttgagccgtagatcaaccagtcgagtttcactgctttcacttccttctaccttgaagtcaaccgaccaatctatcgcatttggccgggtgtactcttctcatccgaagcaaccctctggacataaggatgttcctcatctttcttctccagagtcccgagtatcaacagagtcccatttcgttggaagacgtcgtcgcggaccattcgttcgatctgaaggttcgcaatcaccttcttcatcatcatcaccacaaacatcatcatcatcgccgacaacgacaacgacgacgacatcatcatcatcatcatcgtcaactccatcatcgtcattcacgccctcatctccatcagcatcagtatcaagactatcttcaaaaccatcgtctcataaattcgcaataaaaccaccagaaccgactaccagacctaaatcataccaaggtctggccgctgacctctataaccaatacgttaccggaaagctggctccgttaaatagagctaaacctgtgaaaagagagattctcccctcgccggacttaaaagatgaagagacaggacaggctgatgcaaggaaaaagaaagatggaggcgggtcaggaagggtcagaagttggttcgtcagggatatcaatgcgtctggtgagcgactcgtttacttctctgcaggtctattcgtgtttcaccttcgatctcgttgtatcacgtcgcttaccctcctaattgtagagatcaatggagagagctccacatccgtttccaatcaaaataaggatagagtgggaaccgaggtcaaaacaaagccccaacagagtgagcatgtgtttcttctcgttcaatatgaagagtcatcatatgacgtcctaacgtgctttcaatactcagcgtttacttcagaaaacatatctctcgctcgcggatttgaacgcactctagaaggagaccagttcgttcttatctcttgttcttctcatgtattgttgtttacttgtgatgcttacccataacactggttcatcctgaaggaatatcaaggacgggaagatgcaattttacaaagaaccagtggagaagggtggagttctccttttcgaatcggatgctagaaagatccctcaacccgagatcttagatgttaagaagattattagttatcctacaacgtcccagttggccgtatgactattctcttgattttgtatccctctcatgttgtgtcgatctattgcgctgatagctttgatctgtttttgggcgattgatggttatcatggtgggaaccaggctatggagagtgcagcagacaaggactcaagaccgacttttctgagtgattcgtcatatttttcgacattatgcgccttggtatacaactcaatctctgctagatcggacctgtcggataagggtgcttctagtttccaaaactatgtttgtccttctacttctggaggtgttttcagagcttatgtagtctaacttgctgacgcgctgtgttcaatctgttcaacggcaataaagcgtcctatgtcgttcaacttgttgcaaaaagatgatacaaacgtctatcatatagtagaagacgtcgatctatctgttcagcctttgaaacactttaaaaatattgtcagtgttatcatctttgtcctttaaccctctgtcctccacttcgtttcgccgcacgaattgattgtcgattgaagcgatttacatcaaacaggatacgatcgtgtcaaagatgatgactacgcctacggatcagatggagaatttgattggaaatgtcgattttgtggatcaggtggaacaaacaagacttgagcgagcaaaagttatcgaggtaccactcttcctccgtgatctgatctttcgtccagtaatatgtcgaactgaccctcattcatcgtgatcatctgggatggtcaaaagctcatggatatctacttgggcgcatcaagactttactcgtctcctaacttgccagggaacggagaattctctgtgaagaccaaagttacgaatcggattatgcatgactgcatgcccggcgaagtacgtatctccccgtcctgttctcgtcgtttgcgccgtgactacgagatttcctcggtatacttattttcttgtttttataaatcgtatagggcgagaggttgaagaagtttgacgagcaaatggaactattccaaatcgaaagggaaagttccaatttgagagacatggttcaagactggttcgtattcctctccctatctatcggtcccagcgtctcactgctcacaaccctttattctaggttcatgcttcgacttgaagaacgacaaggacttcttacagtcttccataacacatctcaactccaaggcttcgagtaccgatccatcgatttcttccaagacgctttgttctccttatctttgtcttcaccttcatcctcacaagacagcttggcaaccaatgaggccatggccgaatccagatttcgagagacgatcatcgctgtgacagagatccttcaaagaatctctgtggacttcaactatcactcggttggtcctgtttctcctcattctacatctgttgatttgcgggtcgaggaaagttgttctgataatcgtcgttacatgcgcgcgtgaatataggatctcaacgtgatcataaatcaaagagaacaaaacccactggcaatctacgtgttttcacacggactttccaaagagtcttctgccagtggaaaacgagctggaaagatgttgttaggctcctacatctacgaataccgaaatgcgcccggctctgaagcgtgtatgtctcttccttgttccttatacccgagttgctttcgtgagatacgttattcacgacttgagttgtttttggtttacgggtcgatcagggtctccggaaacaaccgtcattacgagagacatctttggcgctagagacgaaatcgcaatggagatgcaagatatcggcgaagctctgaatcggcctgcaaaccccttgttcctgctctccatctacgatccgacggatcttctcaacttgttcgaccgaagacgcgatctcgcccccggatggaggaacccttctcttgctgatggttctagtacctcccatcgatcatcggatggcggaggcagaggaagagagatcgatgcatacacgttcattcgtgatgggaccgatatcgcgagacaacctcccccgtcgtttcttagtggacaaacaaacacgacctcccccctgccgagtctttcattcgatctaggaattcatgctccaaaagctcaataccgaccttggaaagaagttctgacttctcctccgactgcttctgcagatgcacctgtgctggccaatggattatacacgaccgattattctgctttgttcaaaatcgcaagaagatcaggagcctggacgtctaaaatggaaccgatggaccgaaacttggtgggagaaccaaaccgtcagcgtgaccagatggtaagatggaataaaatacaatccaagatgaagtccatcatcgaaaaggagttcccagcccctgcactatcaacgtcatcggcaccatcagcggcatcagtgccgccagcaccatggacgaacaaaagcacaaagtggagggaagagagaaatccacatgcccctcgtcctgttttgacctacaagtcggttcaggaacaaaagaccgccaaccggcaccacgtccgtgactcaatcggaagatctaaacctatcgttgctactcccccatcaaaccctcccactccaaatgcaccagccccaaatttccagataccaacgtaccaaccaaaggtggactctgaaaaggctgtggcggcttggcactcagctgaacacgctagaagacgagtcgtggatttcttcgcaaaggaagaggcgatcaatcctgatgctaactacgaagtcgacttgaagaccggccacggactactcaataagcctgtccgacacgaggtgttggctaatttcatcaagattaacccgaacgcaccatcgtccactcaagattcttcctcttcatccgtgttttctccacccccctcgatcccaaactccaaatcttcgccggcggcaacggcagcgatttcagccgcggtagcggtagcgaggaagtcgtctggaaacatcctgtataactccccccggttgcaaccaaggaacttgaaggactacaagaggcctaagaaatagtctttttcttttctttgatagaaagatatgtagttgacatccgctgcctgaggacgaaatatatatatatatatgtgtgtgtg

SEQ ID NO: 101 - DNA, 11988 bp, Xanthophyllomyces dendrorhous
atatatatgtgtgtgtgtgttgtataacatatgctttcgtcttattctatcaccctcattcgcggactttgagcggatcacacgacgtttttcacgtcttgtacacatggaaagctcataatatactgaagatactgcccaaaaagagagagagagagaagaagacacacgattgaagcacaagaaatatttaagaacaatacgagcataaagaatctatgagatgaccctgccaaatgctaagccgtcgaacgattgagatgataagtcaaacgctccctaaaagatcaagatccatcttgcaagtttctcgagtcgtgagttccaaagagaaagaaaactttcggtcgactcaccatactgcatcttacaaacatgtatgaagaacggcttttcattcctaatatgagctgccaattgttctcttcttgagaatagagaaacaccgacttctacagttgagccactcttagcgcttgcaaggtcttctcggacgtatctgacagcttcttcaccataggcaacgatgttgaagatatcaaactccgttttgtcctgttttactttttcatcaaacgatatcgtgagagacaagaaaaagaggtggatggaaaggtgatgatacagttcaaagtctcagcaataatgtcgtggatcgacgaacaggtaggggtctggcgacttacatctcttgatgttgatgctgatagaatagcgaaacaagcaagatccgtttaacacatggcaatgagttttgaattcttacaaggcgtttcaacgaaagatatgtttgtatggatccgagcgacccctcacctggcatatgtcctcttactatcattgcgaaatcaaagagacagaacacaaatcggagatcagtgtctactcgacgccatcatgcagtgaactcaccgagatcgaagcaaacgcgggcttactctccatacttggaggttttatactcgacgtcaaccaagagcttcccttggaggacggtgtcagccgctggtcgacccagatcagtagagtagcagagctatcttgaacggacgaggatgaatcaaacgaaaacaacaaaggatagaggaatcccagatgaactaacgacaccaacagtcacagctttctacataaacctaaccacttaccctagatgcggaaagacttctggtggtagtattgacagctcgactgaagagagacatgaaggacgatagccgatggtcgacggttgaagtcaaggacgtgtgtttcaggcagatgtattatcgacagaagacacatgtattttcaaagcatcattttgacttgttatgcatctcacatctcgttgctcttgttgtatcaattacatgctcattcatcttgcacactgtgcagtatacatcgtcaagtaaggcttagatgatctatcatgatttatatctcgtcctcgagatgcgcggatatgatcctgaatgacgactatcaggttgtaaacccgtgaagttgtcccagcccgttcaatgttagcgcgccggttccaaaggggtgtctttccaacagaaaatggagccgactgcaaagcgacaagagaaggaaactagcaagtaaacagaaagaacataccgatttcatcttcaacgctctgcccagatcatacggatctttgacggtaacctgataagattgctgtccttctggatgggataatgagggaggtgttggtggaagtgtccaaattgcgctgaccaggatatcgttgatagagaactgccttttgatcgttgtatgtccaggatctctctgacaaacaatcttgacagacatatatgtgtgtcaaatgcagaatcaggatatgaatgagcccagggttcgagtaaaaagaccatgtgaacgagcggaagatcaacagactttgacataaggtgttttggtgggcacaaaatcaccgttttggcttgggtcgaactcatgctcaggctgcagctgtttgacctgaggtgtatttatcttggtgttctgctctggttctggtgatccgaccaatgcatgatgaccagatgtgctgttatctgaagaaggccttcgaagtgtcgttggttcgtgacgtatcgagtttcgttgtggacggtttgatgatcgtttttgtgaaacattctctttgatggatgctcggcaatggttattggtagacggagagtcatcgggaagagaccggggcgatctgatagactacagtgttgcacaactcatcagaaagtacacatttctgatgcacgcatgactcggctcctgactcacttgatgatggtcgttatcacgatgacgatcggatcgacctggtattgttcgactgccctcagaagatgctagagtggcatttcgctctctcctcttgttttcgtctggcttattttccggtttgttctgatgggtttgaggctgagaagatttcgttcggacgtggacctgtggcatgggtcgaatggcctacacccaacagggttttcaaagagttgaacatcagccaatgaagaaaatcgaatgcatggagcaacgtaacctacttgcttcgacatgtcgtccaggagattttccaaagtcattgacgcttcttttcgcttttctgaatcagccagaggtgatgtatctttttcgttccctttgcgccttttgggtttcttctttcccgtttgctagataaagtggaggaaagaatcgttaattttggcaacagaagaggaactatacgacccgactaacctggtggtcattccttattatcatgccctcattttgcttattagaagcaagttccctgggtgtttgtgtttctcgaagaatggcaggtcttgttccagaacttttgtcacgaaccattccttcctgtcgttgatgtcgctgattgttaagtctgacaatcatgaatcgaaacgcaatccatcaggctcttgtacaggacagagatcacatcattcagactgactgtttgttttggttggtctcgttgcgcaaatcatgtgttcgaggctttctctagaggccgtgtaacaagtttgagctggatcgttcaataatcatgatagacagtctgtatggagactagtagatgatccatacatacagagttatcccctgagttcaccttaacagacacggatgttgggagcgatttaacttcaccagatcgccgatcacgatctcttctagacgactgtactggaagcgatgagtctgaagcagtcgaagaggaaggagggcgtttcgcgaatctggaattgctctgtaacttgctggatgccatggctattgattcggtcatcgcgaacgaccttgaagtccaaacagagtgggacgccagcagacgaaccggccgaaagagattcagcatgagatcaacagggttctctccaactggaggtagcagtgacgctgtcttagtagaaaggagagaacggatgagacggtgttgatggtggtcggaggagaccaagcgaattctttttgatgtatatcatctcaaaccatcatcagccagacttgacaatacctcatcccatgagcacggctgactctacaacttcttctcaacctgtaaaacaagcatgcttatcctctgttagccctcaaatgagctctcttgcgttggggatcgctccgactcagtcagacaactcacaaagtgttggtccaacggcgctgatgaactcttcggctacgggtagtccgttcttggcctctttatccaggttagtacatgtatcatttgtcccgttcaaacgacaaacgagctgatttcaaggacttcttatgtcagaacgatcatttttcttattgggatgatgctgaaacgaccggcaaggatattcaggccgtcaaaaggtaaggctcgaaaccccacttgttccatagcaccaaacacttctctgaccttttccttgtacacttcttggatggggaaacagtgtcgacatttgctttcataaaggctctcgctcagcgggatggccggtcgttctcgccttcaggtcttctcaagcttgctaaacgctatggaccgttgtccttagtattgcccatcattccccctctgttcttcaataccattcttaccagtaagctcggtcacactcctactcataattgcctagaacaaactcatatctttcgcttgatgtgtctcatggctagctctcctgttcaccacgcattctgttatatcttctctcttgagcgctcttcccttcttccgtcctccggagcgcacatccggttcagagcctactggatttctttctgaaaccgactccgagccagatacaactatacctgtatacctctcccttctcacccataaccttcacgcaaccgttcatcctacactgctttcgttcttggcaggtgccggcgcaggtgtcgcacaatctaccttggccatcccgctcgacaaagtcatatcatttctgacgaggctgattgtcgggaaacgcggtcatgatcatctgaaatcagggctcggaagggaagcaaagttaccgagcattccaggaacacccagggtgaaccagattggtgatagggctgtgggaggaagtattaagtcgaaaagagacatgggcgcttggttgagagaattgaggaacgtcgggaccggaccgggaggagcgttgggtatggtcagaggcttcgattggggtgggatcaaggattggaagggattaggaaggttgggttggcaaggatggagatggggagcagcgaaggatgctgttgggtatgtttctggtttcttgctcttcctttatggtccagtcttgctctatgttactttgagaatcttggatgaaaaagactgatcaccttgtgaccccatcatctcataccttatgatctttgacacaggtacggacttttctttgctacgttcgacacctctcgtcgactggccctgcatgtccgacatctgattgaggccactcagtcagatgcctcacgctctgtcgacgttgtcgaaaacacatctcccaaagtgaaagcgttctttgggatagaagatcggacgagacgtaaatcgactgataaaaatcattcaagagtagacgatgaagatcctgaggaagaaggtgggctcggttacgagggaagcaagtgggcgagggtcggtcaggcaaccgttttaattctcgtacgttcaagtgtctttcagtctttgataaagttataagttgataggtgtagtctgatctgatgacaaaatcttctgatgctcgccttgattcgcgctccgttcaaaagggtgggatctgcgctggaacactgtgcgtcgtttttatacctcatcgcgtgtgctctccttggccccgaaatttaatctgtttattcacctactcttttcagatttacattgtcaactcgtccattcgacgcgatccttcacctgctctctgctccctcctcctcttcttcttcctcctcctcttcgacgccttctccaactcaattcaagtttcctatcgtatcaacctccaatacctcgcttgctccacctcctatccaacctctccgcacacaccggactcagcgagtgatcaaaccaacctgggaagcatccttacctcgcgctattccgttaataacaaagacttggaaaaagaagggccctaaatacttttttggtccccaaaagggagagaatttaggtggaggtggaccttggaagaggtttggatggagacttgttggtgtagccccttggtccgtactgtttatattgacatcatgtactcttgcttcaaaaagaaagttgatatagaggagagaatgattgatctctcttcttttttgtgcgttcgtcactgaaatcttctggacttgtaggggctgtggtttcctcgtcttcgcatggtatgtattgttcgtgttctttcagcgtttgcttctttttgaaagcgatagtaatcattcttcatgttctaacattctacagggttgggggggaagtatgatatgataaatcacgtaaaacttgaaaaccgaaatctgcgtgctagcggtgatcaccgaagtagacgagacgactttcgtttgaacatttgattcctatttttatctattcattctacatcgtctctctctctcattttgctctctcccctccctctatcctcctctcatccgaccaacccaggagccaagagctccaggtcaagacactttgctggaaacgttttagaaaatagaagatagaatcaaggttcgacaccaatgtatctttagatcccgtatcaaatggatgatcttacatctttgccggttcatcattcttgaaattggcgcaaagaccggacgggccagttcggatgaaaatccagatgtggaagacttgtgtcgaaaggcttgcattaagattgctcagtttccccaatcaaaacagttcttccttctttaccatttctcggtttgcctgaaaggggaagaaactaagaaaggcgaacatgaatatagaagatgatttatcatacataacggatgagggaagaagatccaaggttgtagtgaaggaaagaagggttgtgtatcaaaggcatgtgacaaataacacgaaaaacaagactgcaccaagaaagaagaaataccatactaaaggagagagacagagtgaaggtccatgtatgttctctcacatatctctttcaaagtttttccacgcgtgcttctcgtaagtcttttgcgtccttgctctgctttgaggaatgatgggttttcgaggttcgaccaatgctctttgttgcatcgaggtaaacctatccttgaacaagttaccctccggctgagattcaaagatgatgaccaggtcagtcagtcattcatgtctgggcacgatatgaagagacgaaaggaacgagaaacatactttgatagccctccaactctcactcaaatcctctcctagttgaacgtcttcctctatgccgacgggtaccacgtgtttaccaaccttgatgcccttcaagccagcctggagtcttgcagctctagcctctgctttctgaagcatcatttggcttcggagcgagtgggtcttctcgacctgcttgcgaagagtcggaagggtgttgatggtttggagaagttgtttttgtttcaattgagccagacgggcggcttcctgtggggcgcgaatgttacaaatggacacgagataagatggacatcatgttcagtcagctgaagaaagatgaggctatatgattgagagaacctgatgaagcgaataaagaagacgaacctcagcagcgagtttatcagcctttttcctctccgcctttgtcttccttgcaggtgctttcttcttcggcgcctcgagcttttcttcatcctcctcctcctcttcctcctcgtcctttggcagatcgaccctcattccgtcaacccagtcttccgtccagcccatcatctctccctccgtctttctcgcggcgtgcatcctgtccttgacaatcctatccttctcctccttcctaactctggcaagctccttctcctcagctctcgtgagcaaagcctgatgagcttcgaccgtagggttataactctgaccggtgggaggcagtgggatagcaggcacagagatcttttcgacggattgtaatgatcgtgggaccttgatgtccttggggacgaacgtccttgcctcgtcccattcggcgttctcgtcgacttctccattggtagctttggactctgccaaccaatcgtattcctctccaggatgaaggccaccgaacagagcagaaccctcgccccaccgagaaggatctctctcgacgagtgctccgaaaggaccccggatgtcttttctagcgattcgaaggagccgctctttttgctctctggtcatcttcttcttggcaggaggagcagaggaagaaggccgggagtagacagccgggtgagaggatcgttggaggagtaccttttggtagtgaaggagtttctttggaggagaaacggtgggagcttgggctgagcgttgatagagtagatacagaccatataagggtaagcccctcttactccgtttccgtttgtcccacacgatagtagttgaatggtgacaacagacggtcttcgaagaaagacatgacacacaaagatagaagcttgacacgtaccaccagattgaccaacggtatcaacaacgaacaactcttcgtccttcttgtccgaaacatgccctccgatagtctgctccttagctctcctaacatccaatccatcaagaatatcgccaatctcactggccttcctccaggacgatttcttgtttttcgaaacctttcctgtcaaacggggagcacctattgagttggacatcacggacaaaagagaacgtgagaaggaaacaaaagaaagagagaacggcaagtttgtcgaaacgaaagagaaagtccaaaaaagtggcccagttgtaattttgatattttccgtttgcaccgcttgtggatgctaccggcgggctatctccgatcacgtgacattcgatatggcctttcaatgtgtacatctatctcaacatcattttgaaacagcagaggcagagaaagacaacacaagttcatacaataactaaagttcacaaaggtggtaaggacagaaatggaacaacaaagaagacaaaacaaatggatgtacagaacattgaaatcaagagaagaggagccaaatgagacacccgatcaacccctttgagcaaccttgggctcccaagcattcaacttggcaccggtggtagagtaaggtttgtaagctcctcgagtacctgtcatgttctctcggtggggctgttgcagatcaggagtggtaaaagagataagttattgagtatgagtaaaagttgatggatctttcctggcagacgataatttctccgacaaggtcagaaagccacagaagacaagggaaaagacgcacgagcagccatgtgggagtagactccttcatgatagggtcgatcgtaggaggatcctttcggatgtggttgatccaagagtgcctataagatcgaatgaggtgatggttatgaaccgttattaaagagccatcaaccctaaacaaatagaaatctatggaagcaatgaacttaccactcaggagggatctgggacacgtggtagttgtgctatacatgtatattacaaaaggaatgagatatcactatctaccactctgccgaatcttgttgttacctgaggacctgatggaaacatacctgagcgtagtcgacccaacgatgacgaccaggaatttcctcttcgggattgtagttttggaagtactgtagtgacagtaaagagttgtcggtttaggtcgttagccaagctgataagtcaggccaacaagtcgaccggatggaccgaggacaaaccttgtttccaaatctgtttcggtgagaaccaagacagaccgttagatggcttgatcaagtgctcgagctaggacgacggcaaggttgaaggacgaaaacgtaccgatctttaccaacactaccaggtttcaagatcatgaccaaaagcaacgaaagagaagggatcacgccgaacaagttagatcagaattcagaggaatgaacacagctcaattgacgtatttttgacacatcggactgtgtcgttctgttgaacgagaataatggccaaagaaaatgacatacaaatctccagatttggcatcacagagatagctagttcgatgagagggtcaagcaatcagtcaaagggctggcactctaccaaaggcataaaatgttgacctgtgtatgattgctcgtctgaacaaaggtcaactcaacggccacttacagcatttgtcggaaccaatacttgactccggtcctgcggatctggttgtgagattgagaacatgaaacaaaagatagaaagacttagacaagctggtgtagcgattgatttgatgaagagtttgtggaacgcatctctatccgagtggatggacgggcgaacaagctacgagattgaactatcaagttccatgatgtacgcacgtttctaatagttctggctagagataccatggccagatatgtatttgctctgtgtgtgtgatctgtgtggatgtgtaaagatatgtgtatgtgtggatgatgatgtcgatgtctgaggatggccaagagagaagagaaagagaacgaacggattggctcccggatgggatgtctggttacaatcgaacctgtttgcgaaccgcgggttccagtcggttggtgagggctcgaccgggttgatgggggttcagaccggttcaccgtgtaaccgtcgccgggttacactcattccgtaccttgtgccttgacttgctccgttacttcccttctctccatccaatcctcacccaatcgacatccatacagagatctcctcaaggaaggatgagaatcaagaccaacccctacgatgtggagaagtccatgatgcgaatggtcagtctggttctttgtttcgtttctgtttctgtttccctgccatgtgttgtcttggtctctttctttctttttttttctctctttttttctttttcttttcttcttttttgtagctcctgtttgcatacatcagatcagatcagcaaagacttcttgcttctgcttgttgcctctcaggctgaagggagataagtaggaaacgctttcttcctccagccatgctgtagatcgtctttctttctttctttcgtcgagagaccgtccgactacatatgagtctactagaatgaaatcattacgctagcatactaaagccaatttgtttcttgatcgtctcggcacacagggctggaacccaacgaacgtctacaacacatggaaacgaaacgccggtccgctcgctgggcagtacaacttccgaaagtcaaaggattcactctatcagcttcgattccgaagtaaacagcatctgagagcctattggggtggttccaagatagaagatagacaagtcagttcccttctatcttctttgcacttcaaagctatacatgcttggcgcttatgtacaacggctttgtccttctttctactctccaccgcaaacagtttcggaaatggtaccttccttccgcactcccactcatcgttccctccgccttgacgtccccaacgttgaacccgaaagcaacctcgatcacccgattctctcaccctggtaaagaaggtggaagacaccttctcgagcaagaggagatgttccgttaccatggatcccaggccccagtcagcccgctcatgttcagagaagtcgagcgtcggctggatcatgtcatcttcagaggtggttttgccaggtcggccgaagaggctagaggtcttatcggttcaggtgccgtcaggttgaacggaaacgtcgagagacagtgccagatcaggcttcttcccggagactttttggagattgatccgagcagtgtcaagatgttgtccatcccggacggatcgtctattctggccgcagttgacaaggacgtcgtaccactgagaaagaggcaggagcttcttaccaagaggccgagcgccacgccagtcgatgaagacggagaagagagtgagcaggctctgggagaaaaggtcaacaacggagaaggatggaaggctgtatatcgagcgaggttgacaagcttgctcggaatgggagctgctgaggtagatgccttgttcgagaaaggcgaaaagaagaccagagatctttggttgcgacgatggaacgcaatcaagaagaaggaagctgacgctcaggatgcagtcatgcagtcgaaactcgcctccttgagtcttggatctccttctgccaccactgattccacaccttctccttccgccgatgtcacttctgccgggtcttcctcggaagcctcttctgaatcttcttctcctaccggctggcaacgaccggcgatgaagcccctcacccccacccaccacgtcccacagccgtc

SEQ ID NO: 102 - DNA, 41025 bp, Xanthophyllomyces dendrorhous
tttcaaccttcctccctttgccggcccatcgctatttgtcccggcatacctccaaccgaactatgcctactgtacattgacctacctccgacatccgaccgcgagacacaaatacgaagagattccctctccgttcgacgcgaaaggagacgtgatgaagagcgcttgggagtggtatgtgcaacgaaggatcagaatcaagacgtttggtggtggactcttcccaggaggaatcgacgcgagggcgagactcaagtcaagaaacagaggaccggagatcaagaggagtggtgtggtcgaggacttttactaaatgggtttatgatcatgaaatcaaatctcctgcttccgtttctcttcgtccgaggtacatcgaccacgaacaatgtgaatgatctgcactgctgagcgatccatatgaaagagacaagaaaacatcccacactgaatgcgctgaagagaggcgggaaaagaacgatgacgtgaaatattcggaaattccacgtttaacttcactgccatctcttttcccttcttcacccgaccatcaccctctctttcttctagcctcgtgccttcagaccacttgtttctcgtacaaacatctctcataatacatcagatacatcatggatgagcgtatgttctgttttcacccagtagcgtgatgtcagctcagtctaaaatcgcttaacgcttccttctttctcggttcctctttcaagaaatcgcacagttcatcagtgtaacttcggccacgccagaggttgcccgaacttacttgacacagtcgaatgggaacatcgaggcgagtttcttttgctccatctcttacctatctcttatcgtataacgtcgaagaaacgttttctaatcagtcggtgggaattcgcactgttttcaataggaagcaatcaacacctatctcgccgctactaccggtgaggacgatgagatcgatgacgaggatgatcaatacggagacgaggcaacatctggttccgctagatcatcggcaatccgagaagaaactgggagcggaaacactctgggaggaaacacgttggggggagggactgctcaaagtagcttaccagacgactgggcgcaaaaccgaagtcagggaggaacgggtgcaagggttgggagagtcggtcagtggggttctacaggcaggttcgtttgtagttccatcttcttttccgaccaggtatagagctttcggtgtgtgatcaagcgaatgcaggacttacgccatgggtctactcccgaatcggaaatcagtggatcaggaagctcgacacctcgatcaggaggaggacctaaagttgcgacctttggatcgctagcttcttcgtcgagcgcatctatgcctagtggaggcgacgatgtgagtcatagattgaactacctttcctctggcctttcgtgatcatataacgttctcatcgctcttcggatgctgatcgttgattccgattaattggccttatggcgtttagtcggacaaggaaggagaggattggtacgctggtggagagcgcaggtatgtatcaattgtttgtttgtttgtttttccttgtaatcctgaatgtggttcaaaagatctgatcgagtcttaaaaattgtcattgagttggtagtgggatcaacgtccaaaaccccgaccgagctcccgagggccgaaatggaccagggatcgtttctgatattttgaagaaagcccgacagttcgttctgttctccatcgacctcttagattctcaggttcccattcttccttttactatcatagaacttaactttcacgaacgttgtgcttacaaaattacagagccggtcccccgccttcccaagatgatccttcctcatccacgggcgctgctccctcttggggatcaggaaacacgctaggatcagatgtgacagagtcggttgctgtccctgatccgaacagacccacagtaggatcggctcaggatgatgaagacgaagaggatgatgatgaggtggccattcgacatctgactttctggagaaacggatttagtctggaagatgggtcggtaagggcttatgatgcgcctggaagtagagaaattctggaggccatcaacaatgggtcagtatcttgttcaactccattgttgggtttatccaaacagatgaagaaaagctgattgattggcatgattgaaaacattacagaacggctccgctatcgattctgaacatccgacctggtcagcaggtcgaagttcgagttcagaaacgactgaacgaagagtggcagcctgctccacctaagcctcgacagcctttcgacggaaccggttcgttcggacttcatcgtcatcttactatccatcatagcttccctctcatatcattattgcctacttatctctaattcattttgtctgtgtaataggaaaccgactgggagcccccgttccttcagttgcttcatcttcttcaactggttcatccatgccaggatctttccagtccactacagctagcaccagatctggtactggtactagcgctagcgccagtgccgaaactagcaccggattcgaagtggatcaggataagccggtgacaagcttgcaaatccgtctaggtgatggaacgaggttcgtctttgatcatttacattctaacttgttgacaaggagctgatatgatcaattgggcacgatatgatgaacccgggctactgggatttgacaggatgcctgcaaaggtcaatttgactcatactgttggtgacctccgacgatacattgactcgtgcgtctttatatatgtttctctccttctctctgtctttctgttctgcaccatactcatacaccatcgtcacttgtcgatgttgctatacaaatacgaactggttgaatcaaaaatctgtacgtaacagatcaagaccagctcaaagacaatacgtactgcagaccacgttcccgaacaaggatctcacggacgacacccagacgattgagcaggctggcctgaagaatgcagtcatcgttcagaggtgggtctgagcgcatttatggtcaagcaagtgggaaggaggaacagtgttgcggtgagatataatgaagatcctcttctttgtttcaaatctccatctatttctttgcttagtgatgcagcgagaggtatttgagatgtgtacaggcataaatcaaaacctttctgtatcagacttgtctctcggtcgtgtctttgactaaaggtttgaacactgaagatgaaacatacacaagtgagacaatttggatcgataatgaacgggcaaacacacatcgtacattcatcttttttctacaacatcaacatgcccacgttcttctctcttccagtcttcttgaacatcgcataacaaacccactctccaccaggcttgggtctgatcaagcttcgaaaggagcacttcaagcttcgttgatcgtgacgaacaatttttcgcctttccactcgactgaaaccctgtttcaaacagagaacccaaaacaaaattaaaaaaatcaagatgagtagtgcgcttgacgccaggaatcccgactagaaacaaggcggggaagaggatgatgagaactcttcggaacgaactgagtaaggtcagcaacgaagtacgtcgggttaacctgttgacacaaacacatacattatgttgacaaaaaaaattaagtagagtgttgttcaatacaaaaatacatgaaaacacaaactgaagataaaaacattgagaagctcaaagggggaaaaatggaaaagagtccttacggctttaatggcaggaacatcatgacctgttccgacagccagtacttctgagccagctgcgagtcctgcgcgtgccccagaaggagcatcttctaccaccaagcctgaagagccccaggataggtacggttgagaaacacatatcagttcaatctgaacgttgggacgaacgatgacaaatgaaaagatgcgaagacgtacatttcgtgatatcaaggcctagtctatgtcaaatgaagcatcaggcgtgattgaaaagcaaagatatctcttaatgagaacagacttggtgaaatagagagatggaaagacaatttagaaacaaacctcttggctccctcaaggtaaggatccgggttgggctataaacagaagaacatgatagatccgtcaatatctcatgtttcaagaacagaacgtcatgaaatttgtagttcgtagtagtggctaaagttggttgaaagggaaggaacagagaaggacagacctttcctttaggtacatcatctgccgtcacgatcacttttggaagctcgcccaattggtccgagagcattcccaaggcagcttcagcatctgtgattcgtgtttttgttagcaaggatggaacaacccccaagagaaaaggacagtagcacaggcacaaaaggcgttaggatacgctcaaacccagtcacagtatttcaaggaagtaaacacgttggcgcgcaggtcaaagacctcgtgttgagcaacatattgtaatatgactagtaactcacaggcagaagtagcagaggtgacgatagcgtaccctgtcgatcgacctgctcggagcttcatagatcatatacagaatgaccaaacaaaaccattcgaaagaattaattatgttcagaaaacaaggctggatatacaagaaaaacaaaaggtgagaccaacttgagagagtacagcgggaactccaggaagaacatttaagccctccttcccctatatgaaatgaattggtccagcgaaaccgtgagatatctcttacaaagcatgaacccgtaagaaacgatcggaagagttgggcttacctcggcctgaagtttagtggccattggaataatacccttttcgaagttaacgacctccgctgccctgtgaatagttttgaaaagggagaggatatcgattcggacaaacatgaaccggtccgattgtgccgaagatcgaagaattcacagtgaaaccccaaaagagggaagaaagtcatagagaagagattagccagaagaatgtatacacgaaacggaatagattgcaaggaagaaggagcacctctcttcgtccgtaagatggggaaggtattttcggaaggtcatatgggtttgaacaccatgtgagtctagacagaggagagcatgccatcagctcacaaaagatcaatgaatattcacatcaaacttgatctctgatatatctgactgaacaggatggtatttaccactaagcatctgttttagattcagatcgtactttttcgcaaagtcttcccaaactccgttgacagcaggggtcgaattgatgagcgtgccatcctgaatgagtcatgccgaatatcaaacaacgaaatatgatgatatgatgatctggtcaataagagtggcatagaaagagaaggtggcagcagtaaaaggacctatttaccatgtcaaagaggatagcatctatttctaaagtgtgggaaggcatgtttgttaagacgctcggagggagtgtatcaggtgttggtggttaacaagcaaagagatgcgatttttatatctagaccaactcattcgacatgatcagaaaacaacctctatcattctttctttctttctttctctcttatcgcaatattcgtgttgtaagtcggccaagctcgttgaattaattaggcatataattgaacaagtaccctataagatgggtgatcaggaagagcgagaacagaaacgaggaaaataaccaaaatcaagagttcgcgaccagatgggagaaagaaaaaagaaagaaaaactatgataaataatgaggatgaggacggagcgaacacatcaaatggcagcaaccctcaaagatagaagagacgaaataaaagcacaagacagagaggaagtaaataggaagcccggaactcccgaaaatgttgagacagtatatgaaacagtgaaccaaatcaaaagaatctggccaagggtactattaagaggtgagatgtagagcgcaaaacgaaagaattaactgatcaaccatcctgccggtgtcgagccgccgtcctggccggatattggtccctcccaatcaaatccatcaagcccaccactgaaatacgcatcctcgcccatcaaaaagatctcccccgacggcgtctcgttaggcaaaaggggagacaccgagtttttcaaccctgtcgcaaccccagctccgggacctgtcggtacaccaccgcccccaccaccgttacccccttcagccgaacttggaccggcgtcagtttccgcttgatcaagacgtgtcgagcctgactcggcctccttttgcgcgagtgagttctttggaggcgagatcgcctctttgagcgatatcggagactcctcgataccctctgtaggctgaatgagatccggcgtggctgcactttccggcggtcgaggctccggctctttcgtacttgatcccgatccggactcgttcttcgctgcgcccttctgtccgtcaatcttggactggtcggttgtctccgttgactctgagttagccgctggctcgtcgtcctctgcgaattgagaatcatcatccctaatgaagaatgagatatcgaaatcgtctggaggaggagttggcacagttgtcggcgaagatggacgtaacaaattagggaaaggcatgaaagaaggaggtcggatttgttgcagttgtttttgaccttgtacagtctgctgagcttgaatgctcgagagaaccattgaaggtgaggtgaattgcggggcggtcaacccttgcatcgcctgggagagataagccggtacggcgtcaacatccagatgcgactggctgacagactgcaagttcgaaaactggttttggaagaatgccaaaggatccatgttggcgtcttgatcttcttgtttccgtcttttgagctccgtattagcatccgtctgcagaccaagcatcgagcctgtttcctctccttcgatcaccggcttaacctggtttgccaaagtcgagtttgacgcagcagacgatttccgtttccttggcttggtctccttcggcgacttcccaaattgaggcgacgtctgagtcgcaggcgtcttgggtgtcttagcgtcggccggagttgaagcaggggacgaagctccgggaccggtggatccgttccgttgtcgcttcgtgagaggcgctcgaagatcctccgcgcgaagacggacaggaggagtaaacgacgtgtggtcaaaggagctcgcagctccagcagggttgggcatagagaggttcgggccgttatgtaacaactgttgttgttgttgttgttgttgttgttgttgctgctgctgttgttgctgttggagttggagctgctgctgttgctgttgagcctgttgttgggacacaacctgactggcctggttgttcgaagacgaaccacttcgagacatgatgttacccacgaacgcgatgaacttgttgatgtttagcttaatctgatcaagttccctaggcttgatgatgatgatcgctcgggtcgcgagacatcggctagcgtatttgaccatagcaacctgttgtcatcgtacgcgtcaaggtctccgtcagccgatttgttctgcttacaatcgataggacttcctccaggatgctgcgacaaccaaagcagaagaagaaagacttgccatatagattatcttcttggatgatgccgcagtctcttccgaagggaacaatgctcgatagagaagcaagcccttttcagtttccatcaagatcggtggcaagacctctcgtagtaatctcacagcgtctgttcgctcctgatcggaaagaccatcgatgttgttgctgttgcttgaaactatcattcattacgaatttttgaggaaaatagcgccaatctcagtttggaaacgggtataacagattagatagatgaagaacgtacgaaatttatccatcgcttgagcctccgcgatggcgatgaacttctttgcctcctccaactgttgacccgtcgggatggatcttcctccaggtaataacccattcgatgcggtccctgggccagtgcctccattattcagaccctcaggcttcaactgctgttgctgctgaacttggtgctgctgctgctgctgttgctgttgctgttgctgggcctgttgctgttgttgaagttgttgttgctgttgaagaccggccaacgcttgctgttgttgttgaagtgcccatgcctgggtattgttcaattgctgctggctctgctgattctgctgctgaagttgtctcagcccaggtgccatcccggcagtaacgccagccccaacgccaagacctagaccaacaccaccagcaccaacctgattgatccctccgtttttagcggcctctaccatacgaagtagctctggggcgagattgagtgctcggatctgagcgggagtcatagctgcaacttgttgaacaaccgtaggattccattcagatgcaggagggatgttcgttgagtttgcgttggactgagcaaacaggtttgtccccaggttgttggctccaccaagttgctgttgttgttgttgttgttgttgttgttgttgttgttgttgttgttgttgttgttgttgttgttgttgttgttgctgctgctgttgcttctgttgctgttgctgctgtacgtgaagctgctgaagttgttgaagctgttggagttggggagattgtcgaagttgtctcctttgatcctcgactgcgtgcttccaggcgtcttcgagtcgggcaaggaaggtagtaaagattccagccagctgattggctacatcgggagtacaacgcgatggcacgtccatcgatgagggtgaggcgaaaccgatttgacctccaataataggccaatggttctgattccggacctacagcacacgatcgtagagatgcctgttagcaagagaaggctttcgagatcaacaaaaagaggggaacagttgatagcagcatacctgatcacttcctcccatcgcgatgacagcttggtagagcagaaacaaatcgacgtcttttccttcgatctgaggcaacttctcgacgttcaacccctgagttttgaacagctctgccagcttcttgaagaattgtgttctcctcgcctgatttgcttccgagttctgagttgccaggtattgctgcagctgaggtggttggatgagtcccaaactgggagatgcattgattgcttggttcccaatctggttcgatccggaagctacgttcgggttgataacacctcctccgaccagcggggatgcgagcctaggcgatttgttgaaccctgcctgctggtttattgccggtgagttcaattgaggcaccctaggtgatccgttcaccccaagcgaatcagagttgatccctggcggatttggatgaccagcagccccgacaggcttgccacccaggttgatccccctgttcttgcattccgcaaagagcaaccgaacctgttttcgccattcagtctgagcagctcgagccttatccaacgattcaggtggaatcgtgttctaaagaggggtcgcaaacaagattttggattagactcttggtctcgtgatatttgatagaaggtagtaatttcgagatatacgtacaccctgcaatgatatttccaagttcttcagcttcattgccagatccgatgtcatcgcaagaatttttgcatctggcacggcggcgagactaggaattccagctgtaggcggctgttgttgttgttgctgctgctgctgttgttgttgttgttgttgctgctgttgttgcgcgtgcaaggatgcggctgttccgatggaaggagatccgttttggcgattcaaaggcatgttgaggttggtgggaatattgttttgaggatctacaaagagttgatttgtcaatccggcgtccaacgactcacttataaataacagatagaaacgtatacactgaaggagatcaaacatactgagtttcactattcctctttgttgagccatgagcatcatttgtctcaactgagtgtcatgaaagagaaaagataggcgagatgacttcagttggtgggatgatcatattttgtggatgacaccgtagagaattggagaacatacctgagcgagctgttcctgtgtgagcgatccgttctggtacgacatttgcaacgcctttcctctttcccccatacttgccaagagtgctgacagctgggccgtcaatggttgaccttgaccctgagattgaggaagagggatgttcccttggttctgaggttggacagtgttaggttgttgggcaggttttgattggagtggaggttgttggagattgaactgttttcgagcataagcccgtgacacgatagaacggctcaatcatcagtataagtgtatcaacatgccctgacatcacagaagagaaacctcctacctgggtttgatcgaaacctgtctgttgttgttgctgttgttgttgctgctgctgctgatgttgttgctgctgcacctgtaactgctgggcctgttgttgggcttgctgagccatgaagaactgtacagggaagtgagaggaaggaaaaagcgcatcaatcctccgagctgagaagacttcgggcgagaaaacgatgatcgaaatctgaaggagaagaaggcaagcaacaggaatgggaagaacaaacgaacctgtaaaagagttgcattgttggttcctacaccaggcatgccaccttgtccagcttggtttccactttgctgttgttgctgctgctgttgttgttgttgttgctgctgttgtccgctctgggctctttgcatttgagcctgttgttgttgcagaaacaaagcttgttgctgctgagtcgtgttcatcctgggcgaaggattgacgtttgtgcctcccactgagccaagaggtgtagaaagattgccgggtgccggaggattttgagcagagaaaggtctctgtcgataggatcgcagactggatggaaccaagagaaccccgatgaagaagaagtgacaagatgacagacagagaattagatagaaaagacattagctttaccccttgactcttcatgctaacgagatactaagagagtgcaaaagggtattgttccgagatgagtacgtacagctagagagcgagcgagcgattgtcgagaatcatattcagcgttcacgcatatatagcatcatccgattagaagaaagaaaagaagacagagagtccagtcagtgaattgactcgatcaggaccaccatccgtgtgaacagtgaaggaaggcgtgaacctctcaagaacatgacaagcaaggcgatcaagagatgaaagtgatgaagcaacagagacaaggaagatagaacagagtgcaagcgaaggaaaagttgtaaagattttgctaggtcttgaaacatgctcgctcgtctgtctgtctgatatatattccacgctgatggaactctcgcccaccacaagaataaccccaccagtcgctataaagatccggatgaatccagtagacagagtgtttcaccacgaagagaagatagaccggcaggtcctcttctttgcctcgctttctaactgcatatcccgacccatattctgttcctcaacgaagactgccttgtgtacgtgcgtccagagaaagccccctccctggacctttacgcatgtccatcactagattgaaagagcgagaaacttgccgacgtccatccagtgagaacaaaaaaacaacgaacctgttctgtatcttggaccgcgttggttccttgtggttgctgttgaggttgttgaaacgtccagttctccatcccgcagttgggaggtcaggctgcttccggaaggagaagaggaaagaggacttttttttcttctttatatatgcgttttcttttctattctggttttttcgacgatcctcgattgattcgaactaagaggtgaactgtttcgtctgggctgtgatatcctcggaggagagaagactgccacaaagatagagaagatgggccgtcgatggatgggagaaggagaacggtttggacgcaacaggacgagaggtggacgaagtgccggtgaaaggaaaaaaggagcgaccaatttgcacgcgtctcagaaagtcagaataggaaatcttgtggaaatgaatagagaaattctatccagttttgtaatcaatcgcgtctctcgcttctcgtttctgtacccatttaattataccaggtgtaggtcatcgcatacacacactttggatgcacgaggaccacgagaataagaggaaaggcaacatatatggttcaaattatagtgtgttcgatcattcaagcattttcaaccagcacagaagtagaggtgaagacaagaattctttctgtcttctttttttttcccttgatttttctaatgatctcagcaggacacaactttggtctcaccaactctcgttcccaccaacgacggcctcgccaacaggacttacacctgcttcctgctgaagctgttggaattgtagctgctgtagatgctgtagcgtggccaccacgcttgagtgatcttccaggtcgtccggtccgaacgagaaatgatgaggcccgtcgtcgagcgagagcgtgaattggaccggatgcgcgttcgatgcatccggatcacgatccaaatcagtacctctaccgagatcacgctcggggtcgacggagaagagtggtgagagagatcgaacggagggcttcgaatggtcaaatgataccctgttgggtgatggtagtgatgatgtcgagtgatggtcaggaggggaatccgagggggttctcgcttccctcgtcagaggcagaggaggtggcgacggcggaattgacggtggatcgatcgaacttgggttcggaacgtggtcaaacgaattggtcgtcgtgatctgaaggtcggtctgtgtacagatgtatataaatatatacacacgtatgtacgtgtgttttgatggaggcgttagccgtcaaggacaagtaagaaacatcttgagtttttgcaccttcttcagctcccaagacgaaagaaatgtttgaacaaaccggctccaaagaatctttcccactctccctcctatctcccaactcacttccttccctactgctcaacgcgccaatatccatcctcagtataccctccgcctctggctccccaccttcatcctgcactctgtccgcatcgcttccttccccaccggtagcttctgccaacgcgacggccacggctgccgctgctgctctcgcgttatggtcatccacataccgatcaaagacctcacctatgcccgctctcatgttctcataatcggtttccatcacgcccaacgttctctgaagatggtcctttagtccgtcattcatttgaagggcgagtaacaatgtgctcgcgaacaagtgtccgttcggggtcggacctgttgagataggtgattctgatggatgatggtgatggtgatgttgttgaatatgattttgatggtggtgatgatccccaccaccagaagaaatgttcgtgcccgtcccgttggttgagttggaatgtaaagaaagagcggcagataggtcaaggatatgctgtgtggtcgaggatgatctagccgagcgagaggacgattgatagccgccggctgatggaccgggcgacggagatccatgggcagagtagtgttggcttaggtcggactgtccagtttggtttggcttccgttttttgcgtgccgcgttggccgaggcttgggcagagttgtcaccgacaacaccaacgccagaatgacttcctggccgagtaagacccattcgacggtttgccaacgttccgtgagctgttgatgtggatgcttgcggttgagacgcgtcttggagtattagagatggctgtggacgaaagaggaaaggaaagggagcaaaacaaattcctattgagaaaccccacgaacatgccacagaacggaaagtgaaagtgaggagacttttgttactcacatcctgagatttttgagctctatctcgctctcgctttcttcgctgtctctctctaccctgtgctctgatctttgccaatcgatcctcgtcctgattgattccatactttggtctctttttcttcccaccagctcctgctcctcctagccctccgccaagacctccacctcctctacctcctccctcctccaagtccaactcgccatcgatagttgttgaatcaacctggtcagcctgaccattaaggtctaatgaatggtgaccttccagatcgacatgactgcctgaacccgaatcatcctcaaggtggatgaatgttccttccggaaggctgatcgacccgtcttcatggtgatatgccaagtgttgctgctgtcgttgtcgttgttgtttttgctgattatcttcgtcagctctaacgacaccgttctcttggtcttgttgctgttgctgttgctgttgctgtcgattatgagcatcttgtagttgttgaagttgacgttcgaacgaaggatgatgttgctctagagcgcgctgcatttcttccatcggcagatcgatagattgatggttttcgtctctattgtcatggtcattctcatcatgaggctgacctggttcgtgactatgggagtgatgatcgaggtggtcatggttgaggtgatcatgatgggagggaagttcttgaaccgactcatggtggttgacgtgatcattgtgaaggtgatgatgatgatgatgatgatgatgatggtcgtggtgcagaccggagctgtcgaatgagggatggggatcttgggcaaggtcaactcctaaggaagggtctcccagcgaaggatagctttttgatgtaccaagagggtttacaagtgttcatgaaggtatgatagaggagcgaggagagagtgagaagaaaacaaaaaggtgagcatacaatcagacgacccttctatccattgggatccatgagcagctctttcttttctcttcttctttttccttacttgtggctgctatggagccacctcgacatgaacggctgaagaaggaggagagaacgtactcttgcagcggatcattcatctcgagtacgggcccatccaatcctaaaatatcccgaatctagctctactgaaagacaaatccgagcctgctcttaaggatgtgtcgagcgagagaggaagagaatgaaaacacaacggagaggagagagaacaggtgaatggtagggtgtggactcagacggttctgttggtcaatgtgaaattgttgagtaaagaaatacttgagaattctttctcttccgcgcgcgaaaccgcaccgggccgaagcgagttttctcctcatgtgttcttatcatccttctctactgtaggatttccgcttctgttcgggaacagcgtctctcagtcttgctgatcatagaaccgctctctcaagctaactgaactgccaggcgctcatctttatggaagagggccaagtttaaagtagactcttagtgtttaaccctaacatcggctgtggccatagtatctatgccaagccctctaatgctaacgaccagcaacactaggaaaattgtatgttcctcgacaagagcaatcatgattcatccattatccgcacatatcgtccaagttcatatgtgggcgaacaagacccgcgcacaatgactgaaggcttagaagagtactaagagtggatgaacattcatgtcgctgtgacatgctgatgttgttcccgacgggcgggcgggcggacggacagactaccggctaccaccttctgactcgtcttggttgagtgtgtatttcagatcagcacgaccgatatcaatctcgagagtgatgatgatgttgatgttgatgttgatgatgaaagcagtggccttcgtgattgtagttgtatccggttgcttgacgacaagccttagggattccaaacgttgtggcgtcggcagacaacgtgactacgtatgctgtgcaccactgttacgctcacctcatccatcttctcagcatacagatcatctactcaccgcccaacgcccaacactcaacactcaacccatctggctagatcgcttccttatgccccttctattcctcttcacctttgccatgtatgtctaaatatgttgatgtcctccatctcactcagatagaatagccacaacagtcctggccggccacgatctttcaccgtggcaggacgagctcagcaactctttgttacactggttactgacatatggttacatcccccactctgctttgtttttcatccgttggggtttttccactcttaacttgcacctccatcaactcttgggttgtgttcttcctccagcacatcgatcgtcctcatctcgctctttcatctgttcgtgcaaccttatttgcacgaccttgctctctggatcttgcctcctccccacatagatctttaggtttcccccaaggttctcaaattccgatcgtccctagccgatttcttcccctctcccacccgaaaccttgctctcttcatctctcatgagtatctttggatttgatccggccgtcattatctcgctctgtcttggtatggggctgagcattggatcgatcatcctgttcaactacctctcctccgagagtgggtctcgtcttttttctttttcttcttcttctccatctcatacatcattccctggactagttttgtcgaaactcatgtctttctattctcgccctttctatcgttcggcgcccttaaagaggctagcaagaccgctctcgatggaaccaactgggctcagtacccgttgatcaagcgagttgacattagctctaacactgccgtgtttgtatcgctcccatcaatttctgcacatcatggctcttactgaaccgatcccttctgaacgacagctaccgattcggtcttccctccccgacggccgtccttggtctgcccatcggacaacacattcagatccaggccaccatcaatgacaaggtcgtcacccgatcgtacactccgacttcgtccgacgatgaccagggcttctttgagcttctcatcaaggtctacgagaagggaaacatctccaagcacatcgacggactcaagatcggcgattctatcaaggtcaaaggaccgaaagggcagtttgtgtatgataagaatttggcttcccatttgagcatgatcgctggtggaaccggaattactcctcatctgcaggtagaacttgtcattctttgtcatgtaggagcacggagcatggtgttggtgtaacatgattggctgagctgtggcccctttcttgacagattattcgagccgctttgaaggacgagaccgacaagacgaccatcagtcttatctacgctaatgtgaccgaggaagacatctgtttgtgccccttctttcattcatgtggtgaccttcttctgcgcgtgatccgagtctgaactttaaaatcccaatactcacgcatacgtatagtgctcaagaaggaacttgacgagcttgctgccaacgtaagtctgcatatttagttcatactcagcctgccttcccctcaagatcaacagaatatcgctgaccggcaacacgattcggaacacaaacaaaaagtcccagggcagatttacagtgtattacgtgctcaacaacccccctcccggatggacgggcggtgtcggttttatcactaaggagcagatcgaccagcgtttgggcaaggccctagaagacgagagcagcaaggtcttgctttgtggacctcctccgatgttgaccgctatgaagtctgttccatccaattctttttttcccaatcttctttccctcttctttcgtttgacaacataactgacgaaccttgtgcgcttgatggataattatgaccatgtgttcatattgttattgaacaactatagggtccacctctcggagcttggttatcccgctcccaaggtcatctccaagttgcccgataaggtcttctgcttctaaacatcaaacaaaacccatgagtccttatccgacacggttccttccggtgatggggaccatcattacttctcttgtttttcgctttcacactcattctcttcttcctatgttgtttctgtgtctttgggttgataagattgatatctagataagctttttttttctcttcttttttcctttcgtcatctcatgattctttctctctagatccttttacttctcgccgccggccgtctggcatgtggcggtcaatgtcaacacacgtagatttgagagtacccgatgtctgatgtctgatgacacttcttgatccacccatcaaaagtcaatcgagaccgagtcatacatatctgatttagggatttctgataagaaagtaaaaggagaacgaagagcacgaaatcaagatagataaggaaaaaggttgtagaggccagatgagatggaagataaacgcacagaggggtgaagaaagttgtacgttggagacagaagaagacagggacagtagagtatgacctggtgaggaagaagacggacagacggatgtatggcacgtacgtgtagttgagtacaggctgtaaataaatccgtgagacgggcctgaaagacaaagattctttccgacatatagatcgagcgggaagttcaggtgatccaaaaaatatcaaaagaccgggggcgaaataagatatggataggaagggcggaataagaaaaaaaaggaggcaagagcttctgtgttggttgataacaccctctagagtctgtttgaagcatacaggatagaagtagtggtttagatgtgtaagaatagggaagggataagatatgaaggtagggtagagtagagtacacaggttcaagatagaaaccaacaccaaaatgaagaaggaaaagagatagtatgggaaccagataaggaagaaagggatgatgaagaaagaaagaaagaaaagaaatggaaccgagttcggtcgtggcttagaaaccttcttcaggggcttctaagtacgatgaaccctcccagtctagcgctacatcgcatacagtcaaaccaagccgaaggtcagtaacggaatttgactgttttcacatctagatgaggagctagggaaaagcgaaggactaactctgttggaaaatattgttcccaccccaactcagagccaatccgccgtccttcggcaactgaagacacaagaaaacgataataattccaatgacggttcctgtgtccaagcctgcgcttaatatgtagttgtactgttggtttcattgtcataaaggaaaagatggcgagaggcggaagtgagtgtgatgggctattaagttgatgagaatagagattggacgaagacataccttggaccaccatctgaaataccgacgtctgatcagatattctattaaacacctcagacccaaagagaacagatgtgatcaacaccacttctaaaagaggaaaaaagttgtccggtccaaaagagaaaataacaggcaggcgagaacgcacggaagatgaaaccgacgataacgaaagacgtatagttgactccgtttgccgaaggaatgttcgtgtatccattaaagagaacaatccaattgacgttgatcacccacgagtttggatactgaagtttatatagacatgaccgaaacagattagagtcaaatccacgacgcttagcctaacttagataaagaaaaagaaaacaagacaaacccttcgaagccagagccaaccgataacaggcaagaccgcaccggcgagcagagcccataagaacggctcataaggcgttccgcttccaaattgtctggccggtccgatcaaacccctgttgaaaccgtcccagagaaaaccccagatgtaattggttaggttcagcgtgtgcttgaattatcatacccacatcgaggcagatatgactcaccaaaggacggaagcggtgaagaacgtcttggttgaagggcaatacaagtggttcttgtttgtcgactggcagatatcaggtacctgagcaaacatgacttccttaatgccgacctggataagacaagtgataaagacgatcaccagttgagctgtcacggcggaagaagaaagaagaagaaccacacaaatcagtacgcttgagacgaagaacttagaaacgcatggagataaagaaagaaaacacgtaccggtgaacgactttctcggtgggatcttcaagtaatgtcccagtttcagagccatcgaaaaatctccaccgacaaacaatgtttcaactgcgaacgctttgaaaaactgattcggcaggcggaatgaacatccaatgttagaattggttgtttatgttgaggaaaagtcgaagaatagacgaaccatcacaggaacaggtttccctttgaagaggtatccagcaataacctgagacaggacattcaacattgaggcctgctcggatccaaatcgaacaagataggcggagagaaatgtgagcaaagctatggtgatcgaagaagaaggaagacgagcgaacaaggacgaacagattgtccggtttgagcaaagacgtaacccgctgggatgaagtatatggccggcaggatgagtgaaagaatcaagccccacactggaacttctgttgggtacgcctagcaatttaattcattccataccgcagacacatacttaggtcagctagtcagaagcggaagaaaaacgacctgaactttaaaacagacagacctgaacagcagcaatacccagaacaaagaacactacaaatgacagggcataccacctgacaaaagattcaaccaactttcagcgttaaccagcgatcaaagaccaccaaataaagcgaattaaacagaaagtgtcatcgaactgaccaatctggaacatctggatacactctcatcagctggttatgaatatcgtcctcctcaaccttattcccttttaagccttgccagatcctcggtccaaagaacaaagcggtatgaacaacagcagcggtggttaaggcaaacgagaagatgtatgccatcatgagggacgccgagaggtagaatggagaatattcttgataggcagtctcattgaaccgaaggtcggtaccaataactgcagtgtaattgtatctgcttccaaacctgtcgaatgcagcgctcgttgaaatcggcaagtaagcaaatccagcgtactatgaacagacatgaaaataaggggagaaagattagatcaatgaccgttgataagatctcctaaagatgatcgtagaaggaccatacgtacgttggtgtagtacaatatggggaccaagatccaagaaccgagaacgaagccagcgccgatgtttgcctcagcccaccaaggagtgacaagcggagaaagaatccaattaatttgactccagtcaaaggtgaggatactcatccctaaacctgttgatgttccaaataattggttgaccacgatattatcttcagaaagtgggggtatatatcagctagagaaatataactcagaaataccgaaaggaaagacttactcggacgaatccaacaaacccaggaaaagtaactaagagctccaaatagataacctgaaccaccagttcaatcatcaggaccaggattagccaacgagacaaaagcaagatagcaaggagaaacaacataggaacagtaggaaagaccaaccaggtaaaaagtagtagaagaatgaggcagcgatcacgatgatgaaaaactttaatctggtcatccttcctcccgtagcgtcatcctccgcgtgcaacgtattaagaatggtacacaagatgagcacttgtggccagatgagcgaggcaggatacgtctgtataattgggcgaaggggtttgaacaaggagatgagtacatggtcaatgaatgaccaaaagtggaacagaagaagggatactgacaatgaaacgtcgtgcataacctgcaaatgcaaacccggtcatttgagtagcaagcactagtaacacttcgaacctgtgatgacaaacgaaggatcgttgcatattgagtatacgtttgaccgatgaaggagattgtgtaaggacaaaaacttacccgacagggaacttgatgtcatagtatagatcagaggcaatgacggcctgtagggcataagcctgtacgttactaacgacgaccatgatagtgatcaacccgtgttctttgatgttgaacggccctgggttgagagaccaagtcttgccggccagtccaaagggcatgaaagatggcaactcgtagtcgtcgataggaagggcccaagccaatagtttacccaacgggaatgcggtgagcctgtttgggaagaggaaaaagagagacattgttcaaagaggtgcatacaaaagagtgaagaaaagagttgcaaaacgagggactaacactcctaacgtggtcggaacaggaggagccggatttcgatagtacaaaaacgcgttgattgccgcagtgacgatcgagagaagcccaccgacaaaccaaactcggaatgtaagcactaagagagtaaaatgggtcagaaaggaagggccaacaaaaacaacacatgctggcagtgcaggagaaatggagaagagaagaggcgggtacttaccaggcatatctgggtcatccatattcgaaaccgatgctctgacttctgcgtatggactgtcatcctcgtgcatgtctgccataatctcgcctctgtttgagtaacgagagaaagaacgaaccaacaggcgaataaataggttaatggactgaagtgtctattcgaaaagaaggaaaagacaagcaactgacttttctgaatcatcgatcgaaccgacgtcatctggtctatcaaacgttccgtccggaacggtggatgcgccagtgagggcagtggtaagccaagctcttctgccaggtcgagtaccgaaggcgtgtctgccggtgatagtagtgcctgtagtggtcgagaaatcggttccatccgttaggggcgtgaagtttctcatccttatggcggaagaatccatgcctaggtcatcactgaaattgctggaggtgtcgacctcactcaagagatcagcaatcgcctttctggagcctagatcatttctgacaagttcggaccgtttgtcggctccttccgtgtatttgatcggtgccaatggggcgagtgaactttggtttggagtcgacatgaagccactagcactcgagttgaatgtcggtgcggttggcgagtaagtcgctgtcgaccgatcatcagcgtaggtacgcccgttattgaaagcgaacggattttctgacgggtgtacccggaacgcgtcctgggacgatagttgtggagatggtggcaataaagacggcgatgacagcatggtagacgccggctgggcctcctcctcgcctgtagactcaacgattgagggcggagcgaacgagaagggaccagacgaggcggccgactggatgggccgattgattctagtgttcgcaggacggggaccaaacgaagccgggtttgctaaaggaaaatgaccaagttggccttggttcatctcgaacattgctctgggcaccctaccagccgaagtttgtggtcgttcgtattgttcgtcatcttggtcatcatccgatgaagggtacattgtgcctgccgatactgagcccggttggttgactggcacggtcgtcgtgccctgaaaggcagtggaaggtctgtgaaaggcaaatacaccttcttctggctcactctcctcctctgattcttcaccttctgaaaagtcattcaaatccggtctaaacgtgtttggtgccgggcccaggtttgaaacggtcgaggccgcagtgtctggtctaagacttgaccaggcagtcgtggcggaggcggaatcggaggaagaggggtagccagaggtcgaggtgcctggccggtccgtcgttgacggcacagcagtcaacatcgagaagggtgtagttgtttgggagaggaaaggatcgagtgggttcaaataagaattaaagactgattgtagatgtacaagagggaaggctgaatcagaaaaaatggctcgagtcagctggttaagcttttcgcaagagggaagagagaaacaagagaagaaaaaaccgtctctctccacagaaggaaaaaggagaaaaaagaagagacaaaaataaaacgacttgtcgagggcagaccaagcagagaaggagaagattatctgtgggaagcaacaaagagagaagagggacgaacgagaagacgatctctaagagaaagactggctgacactctgaggaaaggaggatgatctctagcgatgaagaaagtgttgatgtatgtagcttctgcgagaaggatggataagaaggcgaatccaaacggacaatgcttaaatcgatggatttcctcaaagggtgaaataagcacgaggtctatttcaagttgacaagcggcgagcaacgagcgacgagcaatgagcaacgagcgacgagcaacaagcaagaacgacggaagacctgagctgggccttgccttgattggaagtaggtgggtaagcgagcgagtgtgtggatggagttgtgaatgagtgtgtgttccgcactattctatatctgtgtatcttaactcctgggtgtgcgtgtatatatccgagtggatcgagagagaagggaagaaatgatgaagagaatcgccggaactgaaagggaagccgaaagagcgcagtcagtagaaatgaaggcgcagccatcgatcaggcacatgaacacaagcacaggcatacggccacagacaatttttcgcagatagctgctgcctctccgacgataagaccaatgtggacaaagccgagacatccatgttttccttattcttggcttccgcccagtgcttatgttcacacatccctctcttttcacatattcttccacgcttccatatgcgctttctctgttgatgatatttaaatttgctttctctagaagagcgttcgatacccagacaaacattccttggctctaacacacatgttccatctcgagcttcagtcctttccgagggcctagatccctgcccacggtccgttcaaatagttccatcatcacgccaaactgaagagaaccacagcatacagacgaatacgtatcaatctcagctcaatacaaacacaagagaagaagacgagaccacgactgacgagtgagcgagacaacgcagcgtcccatcgtcctttggaagagttgtctcgaatgaatgcatgctgtgcttgaacctcgtaaaactagagcacgttgtagtaattgcaagttgcattcttcttcagtcaggctcgaacacaatacttgaacagaagatgtgacccactgaaaacactgtgccggcatcatccaacgtatctctgatcaacgttctaccttctctcggcacatgattgtccttcgtgttcggagggaagagaagagtaggcatttgtcaatcaacctgagcctctgaccggctcgatgccgatatagatcaccgactcacctgcttgccaaataccatgccgacctcgcccttgatcgtcttgctcttgattcgggcgagagtatcgtcgtgggaaccaaggccaagagtggaacaatggacatcggtcgcaaagtaacagaacgaagctagtactcgaacgtcgaacgaggcctaaaaacgggtttccagtcagatgatttcggatatcagttgggctctatacacctttgagattctttgactcactcgaagtgcctagagtaattaattccgaaaaacagagaaggattccttcagcaaaggggaaagaaaaagagagagaactctacatctctactcggattgaatcaaataagaagaaaagaaaacgaaacataccaaatgcccaccgagacacatcccggtagcagcgatcctcccgttacagctatttagctgagtcaacaagtcgattgataacgtacaatcttcatcgtaagcctccaccgtcttctctgcctgaattcatcaatatcagatgaagaagaaatgaccgttaagttcgtttcttcaaaaacggatcttgacagaagaagattaaacaaaccttgtacttgttgcctttgtcagtcccagccacgtcatatggaatagcctctggtccttcccattcatggaacgaactaggacaagcgacgacgtatcccgctgatgcgactgttatttttgaaggaggaaagacacatttaattctatatggttccttcttatttgtctttcgttctcgacagtgaagaaagaggaacaaaaagagcgtactgtttgaggcaaactatatagaaacacatcatccaaagacaaaacgttagctgacattactcagactcaaagaggagaaaagagaccaacacgctcgacaggtcctgtcacttggtagatctcggagaaacagacgacacccgggaatttcgcttctggatactctggaacgttcggttcgtagatgaactgtacaaattttcaagaaaaatatatataccgtttgattgtttgtcaccccaagaaccagtcaaacaaggaggagtgaagacagaaaggaaaggaagcaaaaaagtttcagagaaaacgtcttgaaatctattcacatcaagacttaaagaaggaaaagaaagaggaagaacgaacgacacgcatcgtatcgcccgattctgtcttaacatcttggtgagaagtcttgatgagcatcttttctgataattcctttgactgttaagtttgattctgagctacgatgtgtcgagcttgacagtatggtatctgtttgtccggcggtgagattgatgaaagatggccgcgagagattcacaggatagataatgatgaatattatttgggctaaagatggaagaaacactacaactactggttccgtcttctgcgctaattcctcccaagcgcggtttaagaccgcgcccattccgctttcgtaatgtagacttcatttcgtttcatccccctttcaccacccttctctttctcatgttctcagaagacacgtctagcccgcgacctgaccgaatggctcttttctcctttttctaatcttcctttttgttttcacctgtccgagattggaaaagagcccgattcacatctattccaagcgttcccctttgcaccattgggtgcgatgagccctggtagaaaggaaaaggcagtagaaaaattataccaacatctcaaaaaggaagcgacgagaagacaaaaagaggcaacaacacagaaagtaaacagaaaaccaaatcggaaaagcagtaaatcgagatgtctagaaagaaaggatataaatgaggaggggtgaggtggaaagagtgaagttgtgataatgacaagtgagacgaaagaatgggatgatcatttttctgatagaagaagattagactatgatacaccgttttgaggaccagaggaatcgtcgtcagtaggttaatttggaggagtgtcaaacgcgagcatatgtgtactaaccgtatttgccaaagaacggaatcaaagtttgggcgagagtgtacgagaacacgagcttgggtccgacgaccaagatctgaaagcaaggtagaaggtaaggggaaagattgatcagcgtctacagccctgaccctgctcgagacaacaaaaacatcgaacgaaccttgggggtcaatcccttgaagaaccctcccattccctccttcttgatcatatccttaatgaccgtcattccaccgacggagctctcgaaactagcctgctgaactctggtcttgacgacatccaacggagcggcaacggtgatcgaggcaacggcacctccgatggaagcgacgaagttctgagcgaacgtagcctgagagtagtcggacagattgaagaataactccttggtcattgcggaacctccgaagagctaccgagataggcgaaagattatatttagcatcgagttgacacaggagtggtagcagaagcaagccgaaagtagacgcagagaaaaactcacagcaaacgacccgggcgcgtttcgggccatggtccatccccatcctcggtagagagcgaaaccttcatccttgacgatcgagaggaatcctcggtttcggaacgcctcggggttagtctgcctgaggatcttgagaacatccaaaggaagaaggacaacctctcccaatccagtcaaactaaaatgtcgagagcagaaagaaacaatcagtttgtggaggcgatcggatgcgcttttgagccaagaaaaccacttacgatccagcagtggcctctctgatcatctttccgttcttctcaccaaacgttctgaagaagaagccgccatcatgtttctggatcaaatccctgaaccaaggctgaccaccgaacttgtaaactcgctgggcaaccttgtatccagcagcataaccgagtccggggaaaagcgataggaacttcttgccgacggcagcctgggcgtgctgtcggaagatgatcgagttgacgtttccgaggttgatctttgaggagaggtatagagaagaccggaagcgcgacagatagtatggaacatgagcactaggtctccaagcgttcgatacaaattgaactcacagcttccttgtgggtcatcaatcgcttggcgatagtcttattaatttggtgtccaaatgagtgacagaatcggcagtaccgcaaagatgcgatcaaagatcagtacagaacacagtcagatctgaataaagagggaccccgacggattaaatattttgaaatgagcttgaatactcacgtccacagggtgaaagaccatgagctcagcaacacctacacaaagcgaaagaggagaaagaagaaatcacggtgcaaacgttagtacgaaaaagtagataagaaaaaagtgagctcggaaagacactaacccgagaagccagatccaagaactcgagcagttccagactccttctttccagtcatagggggagacatgatggctacttagtaaaaagagggatcgaaagagaagacggaagacggctatagaggatgatggatagaaagagaaaaaagagaagagacgaaaaccaaggtgagaagagcaacggaaggtaacaaaaaatcaaggcgcagttatttgatatctttttgtccgacttcattgcgacgaatttccaccgaccaggtctttttgaatgatctgagagcgagagccatccctcactccttgaatctgttgaactcatttgtcctcagtatgggaaacatctcgtctgtttctctcacatgggcgatatgcattctcaccctgggcgacttgattctcaagaacaaaatcgcgcgcgtgacataacttctggattgccgccatctcctctttctatatcttgagttaaactactcaatccgttccgacctttcatagcaattctgcaagagtgcgcatctggtgggccactaacatccaggacaatattatcttgagcttgcgtttatcagatgccgaacaagcagtggtctagcttctacctggcttagatccaccaaggcaatcggctggccacggcctgataacgcggccgatacgatgcgtaacgcactgcgcgtaaccgcgtaaatttgttgaagctgtctaatctaatctgtgttcgcaacatttttgctgatgttccatgcttcttgaatcatatcctcatgaccgacttgcccactagctatatcgacccggatatcgtagcatcgctcgtcgttgagacctatctatccttccctgcgtcctgtgtaccatcaaagagatccaacggcgtccaagagtggacgcctcttgctggagtcgttctctctcgaacgaccgatagttctcccatcctcaagctcatatccgttggagcaggttccaaagttgtgcccacaattagaaagtctgctagaggagacattgtcaatgatctacatgcagagattctgtctatcagaggagcgaggcgttggattctggaggaagtcggtagatgtttgaatggagccgatgatgattggctcgaacagatcaccaaggaaggtagggtgaaatggaaattaaaaactggagttcaggtccatatggttcgtcctgggtaccacatcacgttcccgtatccaggattcaggctgattgtccgtttgttcatcacagtacatctcgacccttccttgtaagtcgcacagctcgactgttcttctttcagtattccttgcgctcagttcatcgaatcgttgtgttgtcctccctcaaaggtggggatgcctcgactgtacacctagccaatcaacaacaaatactcgacccagatatggctgctctcaaatcttctcaccatatgccctcagaaacatcttctgactctgctcctagcggcgtgaatgcaccgcgaaagtcatttgtcctcgcacgaggacgagacgggtactccagccttggtgttattcggacaaaacctggtcgggcagactcttctccaacaacgacactctcttgctcagacaagctagcggcatatactctactaggtatacaagggtccgtcttatcaacagtcgtcgagcctatctacctaagcactatggtaattggtgatatcaaaggactggtggacaatgggttcgaaggagagaaaatcatacacgaagagttagacagggctcttgtgcagagggctagaaatacatggagtagccttcaatgtatgtcaaacatattcctctcagcgttctttgaataagggtgtatgtatcttattcgttcttgcgcttgtggcaacagccgaattaccaaatctatcatatcgtcatcaccctcctcgtctgaatctcacgaaaattacattttcctactcaaaatcccttctcctccgagatacgccagatttggctatagctacaccttcaatatgtaagctttcatcatcgctttttccacatctgtcaatgtcatcttttaacaagttcttcatgtctacttgtgtataggtctcgtatacacagcggatgacaaaccagagcgtctggttgctctgggacatctccatggatctttcaaaaagagcatacaagccgctgggggcaggctacctgacaaggctgtatccggcgtttgcagaaaagtcttgtttgcgttgacgctggatattttgaacaaaacgcgtgatgagggctttgacattcggtgggtcattccacaaccgaagcacacttctttaccatctatcacttgctttcaattgattacgttctcatcgatgtacaacctcaggcaatcataccgatccctcaagaagtctttcctggcattcgagtatcagcagaccaaacagatcctccggacgcatccgatgtctttcttgtgcggctgggaagaaggagacagagagcagtgggaatcctttgattcagctggagacatcgaatccctagatgttgagaaatcgacatcgagttctgtatcatccgaaacgcctgtagagaagcggcagcgactgaggtgatggagtttgacttttgatatctccgtccaacgttgtctcccgtttgtctttttagctatccgaactatttattttatatttttgaattattatcgtcgagcatgtggactaattttgtttttattttgttaagagcgccattctatatattatcctacaacctgctctcttgtacatcagctctattcattgattgcagatgtatcggtcctgaacagatggctcgatgtaacccaatgattgtggtttccactgtgattgtactcacgtgactacttctggtcacattgtcaacgacacgcgagttccaaccctgcactttctttctcttactacttcttcatccctctccttatctcaacctcttcccttgtccttgtctctatattttctactctatcagtggcctcgtcctctgcagggccgatactattagaacgaattgtcaacaacaaagagaggcagagagaaaaataaaagatgcaaaacactcatcaacaaaatcaaggaatgcaacaacagcaacaccaacagcaaaatccttctccccaggctcctcccgcacttcacaatggctatggaggtcctgaaggaggaatgaccttagctggtgttctacactatctacaaaccgaatggagaaggtgggagagagatcgtaatgagtgggagatcgaacgagcagagatgagggtacgtaaaccgatttccttctcctgtcgaacacaccagacataccgtccttcaacctagctggtcgtatcgaggaaccgcttgattctgatgaactcaagttttttcctgccttttcggtttttgttcgcgaatttccgtttgtctggaatttgtaggctcggatagcgcttttagagggcgagcgaagatctgccgacaatctcaaactagatctctctcgtagggtcaagatgttggagtttgctctgcgacaagaaaggtacctattccattctaccgttcgttggttcagtcgagagagttgtcgattgacagtaagctgcacaatgctaaatggacttgatccgctcacttctatccttgatcaacataagatcgggcaaaggccctgcttctggagttttggctggaggagctgctactactgctgttgccgccatccctccgagtaagctatctactttacaagccgaagacagcaaagagaacggaactagcggcggaagcgatgctggatcggatgatggtcgtgagttcatattggtttgcttctgttgcttgggccagataccttctcttcactttaaatctgctcgtattgatcaatgtttgagtgattttattaagggcttccgaatggaagcgcctcacctcctacggtgaacaagactctttctgccaaaaatagttcgaccggccccccgtccaacggaagtaatgcgcctttacccagttggaagaccggagtggctgctgctggacgagatcctaagagtaggcagcgaagtcgcgactatcttaaacagtatgtactactctgtcattttgttttattttacttgactattctttcttttcaactaagcacacgcttgattgatttattgatttttgtctctttgtaaccatcaggtgcttgcaagaaatctcctacctgacttcacccaacgcccttaacccgcttccaaatagaccggttgctgttcctgccgcacctgcctcagcctctggctcttcacagggtgaggctccggctaccaagcttcctgctgttgttcagtcacgtcagttttctggaacatcatcaagctcggagatcaaacctgacgacgagtcacttatcgtgtcatctgctttctcggctcctacgttgctgcaacgaccccgaaagatgctctcgactgctcctccagattcacccaatcaaggtatcccgccgtctattcaagaggcgaaggagaaagagcagcgatcaagagaggaagctcggaggaaggaagaagaagtagaagaagagcagcaacagaaagaaccgaatgagagaaactctcacgcgtttaccgaggctccttcagctcctgctttggaacaaagagccaatccattgccacccgttcctcctaccgtttcagaagactcagctccgaaagatacgcaggagttgacagaacccaaactaccagcgacggaaccggctggagaggaaatggaggatcgagcggaagagggagagcagaagggaaaggccgagctccctgtatcaccggttcatgatactgtagaatcattccctgaaaactctacagttcttgcctcggatggggtgactgatactgagccagtcgagccagtcttggaagaaaagcaactggagaaggaagttgaagcagaggagaatgtcgatgtggcgcaggagaacaaatccgaggataaggatttggaggaagaagcgagcgtcttggaggatgattctatattagaaattggaaactcgaccatcgtgccggttccagaagtttctgctctgaccgagccgaggaaagagaaagctcaggaagcgcttgaagtagaagagaaggtggaaccggagccaaagcacgatacggagaaggagaaggtcgaagagttcgatgaggagacggtaggcagcggcgaagaacaaaaggctgaagaaaacgggtcaacgacagaatctcaaccggaaagcggggacaaatggaggaacacatcgaaagaggatggaaccaacatcaaggtgagtttgagctcttttatcatggctgatgaaaccgatacttgagctgatgatgtaaaccgcctctgtgtcatcagtctatgagcccaacaacaggtcgatctggtaagcggctgtcgtccctgaggttttgtatctacggaagatattgtgaacgagtaactgaccagaatatggaataggcttggcgcaaaatgatgaagaggagctaacggaccttgctcttgagccgcctctgcttgatgacgaagacgaagtgaaacgagaacctcccctgccgacaacgagcgataagggattgtggaaagctcgaaacctgcttcgtgggtgagtcgatagtcacttagtttcgaggtcaacgatttggactggaggttcctaagcaaatgtatttgtgaatgcaacttacgaaccgacagacatgtggactgtgtgagagcggtggcatttcatgagaccgagcctcttgttgcgagtgcttctgaggactgcacgatcaagttatggcgagttgatctgtctgaaattgtctcggagaagtgagtattttgtgctttcccttgattgtcttgttctttcttgcttattttcttgatgatcacgaaattcacatcaatcaaggtcaagttcgtctgagatcgagccgttgacgacgtatcgcggacacaccaaaggcgtgacatccgtcgtgtttgatgcgcccaaagggttgatttactctggttcattggattcgacgatccgagtgtggaaagtcccttcttcttcacagacgctattcagtccgcatgattcgtcggtgggcgtgaacacgcttgtcggtcattcaaattctgtgtgggggctcgcgcttgtaggtcgaccgagcgagggacaagtgttggtaagcgtgtcatccgatggaaatgtgaaagtgtggaacacggagaaggaaggctgtccactggttggcagctggccatacggagggtccagtttggaggggcagcaaggcgacgacagagcagagggaataaacaaggaggaagtgatcgtgccgacgtgtgtgagcgcggtgggaacggatgactctttggtggccgtcgggtactcaaacagtgtagtcaagattttcaacgttcacaccggtgagcaggtcaagatgatcgagagtgaacctgttgccggtaagtttgtttccttgcaagcgagcaattgcacccactgtcggtctgaccagagccatttgttttgacagatgaacaagagtcaacaaagcggcagatcaataaggtaatcactcacccgaccatgcccatgctcatcaccgctcacgaagatagccatattcggttcttcaacctcgagactggtttgtcacaataacttttttgtgatctgcttgatcgacgaagttttctgctaaactggcttggcatattttatttgaaaaacaggcatccaaacttatgaccttccggctcacgcggatggagtaacttctttgtttgtgtctcggcttttaccggagatgatcgtgtctggcggtcaggacgcgtcgcttcggatttgggattctccttcgcagacgctcgaccaggagttgacgattcataagaagaacaaggacatgggtgttttggacgtggtggtagggacgagagagaaattgatggctaccgccggagctgacggcacggttcgggtcttggtttgggaaggcaagggcgaagaccagagaagttgattgagctttccttccttccccccatgtgttctccttaacatgtttcctttgcctacttttattttcttctagatcgcgcttttccctcattctgctcgctctacataatgtgccgtttcgtaaccataacttttttttttcttgttcatgtttgagttgatatacccattgattcattctctctcaccatccgactggtcttccagctgtctttcgtccttttcctttatcgtcctttctttttgccttgatctttgcttcctcttttctttagtttctatatgtttttttttcactatgtaacaattcgtcgatgtgctctttctcccttcttctattcacctgagacaaaaaggaggaaaacaaaccccatgactcttgcaagctctaccctactacctcccaaaatgaacgaggagaaacacaaaatacactaaatcggggcgagcacttgcaccacgagtcagctgacagaaatctgaaacgagctggcataacgagtttaaagaaaggtttggaaggagcaactagacattgagtacggaatagtcaaatgtggatgatgcgtggaaatggatcgcccgatgttgaaagttcgagggttttgatttgctctgcatgatggagaacgacgctgtttgtacggttcataggatagagctcgggcttgagcctgtttaggccggtgccttgagcacccggacctcaaaatctctggatcctgtttcttctcgatttcgggaacaaaagatcgatcgagtaagataaaataggagcacggtgacataaacaaatcataacaagccaagaagaaagacatgaagcaaaatagtaaaataatctctgccgcctgggctaggtttgcgttagaataagtttattttgaataatattttgatcacatttaatctaattgttgcgcgttcttggaccgatctccatgtttctttttttcttcttaatcggcctgaagagttcaaacaaaggattgtcgaccatctgagacggcggcgggattaacggacgaaaaagccgggataggtgtgatgcattatccagaaggatatcaggaaaggaagggaaagagagtgtgtgtatgtgtgtggggtgtgtgtgtgtatgtgtgctccctgttcggatcgtgccgctggttctcatgcgggtattatctggccctcgcttggatataaatccagatacataaaacagagaacggaaggatatgtttcaagtagcgaattggcaagtcctgcagatccattttcggcggagtttctcatgcaagtctctcttcaaaggaagagattagccgtcagggacagaagcagaaggacgagatgaagagaggtattgtgagagagagaatgtgaagagcaaaatgagaaaagagagacaggtgtacgatagatctgcagaggaattaaagtttggagtaatgtgtttctcatgtcgccggtggtgcgcagtcgaaaatttatgcttccatcccaatccttcagaccatcactttttgttccctcgctgacccggccttgccacccccgagattgcgctcgcggtctcatcggaacatctttctaccgtccctttgatggcctcccccatcgtacacggcgtaaatttaaagtttactcactcaacaaacatcttgtaaacaaagcccgtaaaccgatagacatacggtactcatgaacacatccacaccgcacgatatgcgcgtgctgatcgccatgatgcgccgcgccaagcctattaattgagcacgtgccgccaatgaaacccttttgtctctgttgggtgcctgtattctaaattagttcttttcttcaagcttttgtttattatttcatttctaattctttcgtatgataaggtaaaaaagaaggcccatcgggggaaatacacacaactacacagaacacagaggacggagaaaagtgacaaagagatgatggataataacaatcatccaagaaagatcacaaaaacctaccagaatgattctcttttcaactctaaacagtgagatatgacaatgacctgatcggcccgatcacgatgtctgttgctcttggcttttcgctcttcgctcgcttcccctcattttccgtcgagaaattcatctatgctgttactattcttattaatattgttgctgctgctgctgccgccgccgccgccgctgcgattgattgcgcgatgtatttatcccgtctcgatctgtccgaggatttcagcccgatcatcgaagcgagtggcgctcgggctaggtttgatgttaccgaactttaattggccgaacaggctctcaggctgaacaaccttccaagcagagcgtattcagcccgggaaaaacaggagctgaccaagaagctcgtactgagtgcagtatagtatcaccggtgagtacaggagaggaagaataagattagcaatcaggacgacaggccaggtgggataccttgagacacagcccgtccagaggactgggtacgggaaagaggtctctcatggatgaaagaaagcgatgcacggaagaaagagcagggaaaacaaaagaagaacaggaatcaaagtgaaaggaggaaagagcaagagagagaaaaaaggaggaaaaaaaaagtcctgtcctagacgggaaatcgaagtttggaatgcatcgtgggggaaaccttgaatccttttaagaggaacaggattcctcatcataaacccatctgccttcttcttctcttcgtgctttcttttcttcctttcctcttctcttgtgtccttccctcttttacatttctcactcttttcatcttcatcgctataatctctacgtccttcccttcccttttctcgtcgttctagcagtttcgtccaatcaagacgaaatcacagaaccactcagcacgttttgtcaactcacctggcagaactaccttcttctcgtcttcttcctcttccagaccacttttctccttctcggatgtgtgccgctcctcctgtctatcttgattcgcggccagtgcccatgtcggccgattggaccgatcggtccaactctcagtcatcatcatctacatcggcacatctaaacgagcagaggaccttctcagttgatattcctatgcacggtccggattggatacatatatgcaaaggtggttgggagtctgttcgtccgatcggcaaccatgacgatgacagagcgcaagggtcgattgatggaaagatatatacgatccagcgagcacacgacgaatataaagcgaagactggtcaggtagggtttcctttgatcgatttttcattccccatccccttcttcctctcccttcttcttctccctcttctttccatctgtttgcttgtttgtgatcccatatcatgtgcgcgcgctaaatcagacttgtgttttgtttgttctcttcctcatcataaaggcatgcgagccatgtcgacgaagaaagtccaaggtaagtgttccggtctcgatggagaagatatctcgctttgaagcgcatacatgcgctcgtatgctttaggaacgaacctgtcggaagaaccatctcgctaatcatcctgatctctgcccgtacgatgacagtgtgacggaggggcagtatgctctagatgcatcaaccgagggattcagtgtgtctacggccagcctcgaaagcagccgagcggcagacgaccgagccggataatccacccctcaacgacagctgccgctagccgttccgctcgaggtactaccgacaacgcaccgaaaccgacgagacccacaaagatggcgaaaccctcggctaggacaccggtcatgacgttcaaacctcttgagactactcacgattcaccccaaatcgaacgtacctcgctcgcttctccatcattggggcaaccgactcttccatctacttcgtcatcatcgtcgtcgtgtccgacagcgactaggccggtcgttcctcacatgcgtttcgagatgagccagctgtctatggtgccggcagctccggcctccgctggactggtaccgatttgtaaccatatcaagcacccgggtgagcagctcgtcagacgaaactcgatgggtaattgggtcccttcaacttcttttgaaattggacaaccgggtatgtatatacctaccagatatgagttctctcaggctcatggggcgaccggacaccgttatgattcgaatggcccatgggtcaagcctgagcctattgaccaaaatttggtgctcaaaggttggaggccggtgggacccaatcgatcaaactcctctccatcagtcaatccgccagcatcgacctctctcacgacgtcgacgccgaccctggcgtcgaccccgttgtctatgtcagtttggtcagatgaacagaggagcgagcaaaacacatcaaatcaatcaactccgtcaactcacttgtcccctctgtcatcaatctcgaccgaggccacgttgggcgagacgacgatggctcgattcccaacagaatatcaggcggcagggatgtggaccgtgcctcactatgactatcaccaaacatcttaccatccgattggacattcctacgcctattcaaacccttacaccgagtacggtcgtaacgtggcatacgatctcatcgaggggaaggccacggtccgatcggatggtcatggattctgcggaacgacatctggaaggactctcggactgggcttcggggatagttcaatttcaactccagcctcggtaccgatgtcgacggtcacatcggcgctcgatctacctatcgagtcaagagagggacaaccgggaatgttgttctggggggacccctgagtggagaatattgagatgtgagaagccgatcaggttttgttctgtatatcttaccaaatttcgacttattcgtgtctcggcgccaattttcttctcgtcttttctccttcctttttttttttttttt

SEQ ID NO: 103 - DNA, 1378 bp, Xanthophyllomyces dendrorhous
ttttttttttttttctttcccccccccaagtcaaagcttttaattttcttcatttcatttctcttgacgctttcatagtcttagtctagtctctcatcattcggttatctatttgttagtttctatgttctttccccccccctcggattatgtacctcattgtcttatatagtcggctcgccattcatttcttcaatctctgtagactcttccgtactcgaaacatcatacaatccatcctgtatatattcacaatcaaaaactcacagcctatatgcactctcgtccttttcagctttcttctctatctcttgtttctcgacctatgactagcgcgcaaagggtacttcgggctgttcaagtgtatatatatacctcatgtttattcgtattgcctttctttctgatcgtgttttccctcgctttgttcaagattcttttgtacctaagttgtttgtgttggttctctccagtctcatagtcgccgtaaactgtttcttgctccagtttttttttcactctcctcgcagtcgttttgaaatgtggtcgttctcattccagttatcgatgtaaatttcttttgcttggccatcggtcatcatccggccgttcattcttatttttatttttatcaacctctcctttgaatctgttggctcgtctgtcgtcatagatctaaattgaatccgtctccagaacgtggagggttttcattctctttcctactgaagttccctgggatactcagcccgcatttactttcactgtcttcttctttccttgcccccgatcgaattaagcaccgtccagatcgtaaaatcgcggaacaaaaaaaaacagatgaagagaagaaggcaacgtgaaaagagagggaaagggaaggctcaagatagagggattatcatttatatctgtagcctgatgcatgttccgtcttggatgaagtctcaattaaagttgaaacaaggttacgtggaggagaagaagaagaacattccatgtgatcgcgtatttcagactacagcgatcaatggtttccttccaggtgtgtgtgtgtgtgtgtgtgtgtgtgttgattgaatgtgaattgatccgacagaccgaacgatatgagccggatgggagccctccgaggccgaaggcctcatgtcaatgccgaggtttcgatttgactgctaaattacaaaaagaaaagacagtgaccgcgatcatcaacggacgacaaattcagctgaaatcgggttttccaacttttctattaggtttcactgttgatattctgacggcataatttttttcttcccgtttcataaaaaagcgcacggaacaacccaacgagaatcatgagggataaaggtaaaagaaaaaagaaaaaaaa

SEQ ID NO: 104 - DNA, 16400 bp, Xanthophyllomyces dendrorhous
gaagataggatcccgaaagatcaagataaagcagataacattcgaaaatggaaagatagatcgtgtttgttttccgtcggattgaatgtttcaagtttcacagtctacagtgactaccccttatttcacgcttcgacagacaaaattgaactcaaacgcattgaaagcaagcagattcgatcaactggatacatttcagtccaaagttcagttccgagtattctcattcccgttcccgattcgatttccgcttccgtactcagttccatccgaatcctcgtatccatcatcaaacacttcatcatgagcatgctcgtcatacacttggagaggcatcgcatcgtggaccgatagaccgttgtctggttcgtggttatcgctcaggtcgagggcctttccgtctgaagaaacagtaatcgtgacagtatccccgtttctgtcgagagttaaatcgagtgaagaatgtggtaaccagtcagataaggtcctaccggtcacacttgaagagatgaagagacaaacctgattcggccttcgacaagctttcgagcaagcttcgcgagaagttctttcgagatcaacctagcgatggacctagcgccataagtctccgaccaaccttccttcgcgatccattctttagcctcctctcctgcgctcaacacgatcctcctatcggccaaccgtctactgatctcgcccaatcgaaggtcaacgatcgacaggatcgcctttcgggacagcttgttgaatatcaacaggttgtccaaccgattgaccaattcaggggggaaatgacgagaaacagcttcgaggatatgttgttgtgtctcggcggtcggtcgaccaagagaatcggtagagccaggaatggccatcgcttcgctacccaaatttgaagtcaggcaaagaatcgtgttcttgaaatcgactgttgagcgggacaagcgcaaagataactagatgagcatgtctgaagagagaaaatgagagacacaggacatgttgaacccactctctcgtccagaggaatctgtcagtcgaccctcatccaacacttgaagcagaatgttggacacatcccgatgagctttctcgacctcatccaagttgatcaccgcataggctaaaccaccgagcaaccagtgaatatcaataagatgcgatcaaaacccgcgcgccagattaaaacggcagaaagaagacttgtactcacgccgacgtcggacagcctcggttaattggcctccttcttcgaatcctacataaccaggtgcagctccgattaatctcgagacagtatgtcgatcgtgatactcgctcatgttgatcgtcaccctgaacaaacgatcaagggaagaagaaagaaccatcgagttaagtaactgataagtcatgcgaaatcgaacaaacactcgacttacagtgcatgcttctcgtcatcaaacaaaaacccagccagcgcctttgcgagctccgttttacccactccggtcggtcccaggaacaagaaagaagcaagtggacgttgcgggttttgtagaccagctcgagagagtctaacggcatccgaaacactacgcgcaggaggttatgagaactcgataggtagtcagtccaaaatacatgaatgtgcgtatgcgtatgaggtaaataggcgtgacatacgcggtaacgacgtgttcttgaccaacaacccgctctgtcaacgcgtcctccatctttgaaggacatatgagaagacaactgttgtaagctttgatcatgcgacatctaaagataactcatgcaactcacatgtatcaaacgttccttctctcctttcagcaaggagttgaccgggattcctgtgcttcttgctacaacctttgcgacatcctcgcttgtcactcggtctcggagtctcatcattcctccttctcctgcaggcgaagaaccagcttcatcgtctctggggatttttccttgtaagtttggaatcacgtcgtatcgcagtcgggaagcatcttcgtaggagccattccgctgagcaatctcaagatcgatctttgctttctcgagatcctgtagaatcgcaatagaggaggaaaggagaggatagattagaaatttggttagtctgttaaatgaccctcaaagcagaaaacaaaacaagtataaattccgacgcacaaacttcatctgcttcaagtccttcaaccaattcttctccttggcccagattccctccaagtctttacctttctgcttcttttcttccaactcctgcagaacaatctcattacgatcgatcgagaacgtatctgtctcatttttgagtgactcccgctcgatctaaattcatattcaagttgtaaaatatcagtcaaccaacctactcttgaataaaagaacagaagagacacaagtggacagacctcaagagtcatgatttcccgctctagggcttccaactccgggggtttcgattcctgggcgatccgaagcgaagaagctgcttcatcgacaagctgttagtaaattttaagggaacggagatgattagcttcgctaactacaagacccaaacggttcatcggaatgaaggttaactaacgtcaatcgccttgtcaggtaaaaatctatccgggatatctgttcgacaaaaaaagaaagaaatgtaagctccgaaccctacagagtaatcggccatgacagtcaactggaaggaaaaaaaccaacatctttgagagtacacggcggctagtaaatccaaatagcgaaagagcaaaaagaaactttgagaatcgttctggtaaaccatgcacgacgagggatgagtctaaggaaaaatcatagaccaaccagtgacaagcgcagaatcagatattccgactccgtggtgaacttcatacctccctttgagtcctcgcaagatcgagatcgtcgaagccactgttggttcttcgaccttgaccggctggaaacgtctggaaagagcagggtccttttcgatcgtctagtatttcccaaaaatatatatcacaaacgatcagactcggttcttgctaccaacgcaggcaatgatgatttcgatagaaggtggaaaacaaacctttcggtattcatcaggtgttgtggctcccacaagctgcagccctcgtgcaagagcctttgcaaagcatgaatgagatgtgtgatcaatacaggcggctgatgacagcttgtagcgaaggatagatacttagtgaacaaagaaaactcacaggcttgatcatgtttccagcgtcgatcgatccctcgctctttccaagatttagaagaccgtgaatctcgtcgatgaaacatatgacctgtccagcttctcgatcaatgtctttcaagagcgccttgaatctttcttcaaagactcctctgactccggcgcctgcaagaagcgctgaaagatccaacgcgagcacccgcttgttcaacagggactgaaaaagacgaaagttgttcagtgttctgttcttttgaagattgataagagtgccaaagacttggaaagaaagtcatacttcaggaacttctccgttgacgactgatgtaaggtgagaaaatatataaacatgatgtcagtaacaatcccgttagttagaggatgacaccaatcatcatacctcgttgagctagaccttctaagatggcggtctttccaactccggcaggaccaaggagtaccgggtttgattttgttcttcgactgagaactgtaagttgcacccgatcgatcagctcagcaaagaattgaaaagtcaagacaatataggtggcgcttactttgaattgttcgcttgatctcatcgtctctgccaatcacagggtccatttttccttctctagccatctccgtaaggtctatactctatttgagattgatactcagcatgagccacagtgccgccactcaacagacagaacaaacgattgaattagcacacgaacaaattgcttgagagcttccccttcttccattcctcctcccattgggttcatcttgaatcctttaaatccgccacctccagatcctggcttgtctgcataacttcttctaatagagatagaagaaacgactgattgtcgaccaagaggtactacgcggccagccgcgacggagggagcgagaaggtggagggtggccctctgctgaattactagcggcaatggcgacgaccgaaccgatggacggagcggaagaagcctcgatgggattttggatctgatcatgtcagtgtgcgtgtttgagtgtgggtgtacgtgtgagagtgtatgagtatgagtatgagtatggatatggaatgatgtggttgacgatcagtcaaaggctttttggtcgctcaaggtgattccatcttgaatctgacgaattcgccgagaactttccagcgagttctcccatcacgctaaccatcgcgacctctcagattgaccgtcccctaccatggcagcacaaccacagagacacagacagtatcaacagcatcagcatcatcagcagcagcagcagcagcaacagcatcactcagcccaccaacaacatccagcaattaaccaggccggaggagcagccgggtcaaataacccgggtgggccggcagctagtgcaaatcagccccatccacctcaaccaccggtacctcaacaggatctaagtgtcattcttgttacgggtggctgtgagtctgtgctggtaacaaaggcctattgagagattcgtactgatcgcgtcaacttgacctgcactacactatcttgcggatgacacagatgatcatacaatcaagttctgggaagcatggtccggaatctgtggtagaacgattcaaaacgcagattcagttagtcttactcgttccttctcttgatgtctgctttcacatgtttggttgatccagcttttcagactaaacagtactctgttgacctgttcaccgtttcgtctgtcttgtcttgatacaacagaaacaaatcactcggctcgcaatctcacccgataagaagatcttggctgtagcaggccatcatcacgtcaagctttatgatatccaaaacccatccaataacgctcctgttcgtattgttatgtcgaccacgctgtctgatcctctgtaggcgtaataggttctcaacttgtatacttgcttttccgtataccaaaccggttgatcgtcatataaccgtagctggccacattcgaaggccacactggtaatatcaccagtttagcatttcattgtgaaggtaaatggatcgtcacaggtagtgaagatggaagtctcaagatctgggacacaaggtaagctgccaataacccttgtctcgtctgttccaaagttgcagatccaaaattaggctgattggaagatgaaacctgatgtcttattcaagaacatctcatattcaacgtaactacgaccatcgctcgccggtcaacgatgtagtgatccatccgaaccaaggagaattggtatcatgtgatcaggatggcagtgtgaaagtgtgggatctggcggagaatacgtgcacacacgagctggttcgtttatactgtttctgcaaagacgctccggatgatgcaagttgtggatttctaaaaggtttcggtttgcctttatgggacaacaggtcccggatgcagatgttcccattcgaagtattgccatcgcctcggacggttctatgttggtagcaggaaataataaagttagttcaactgcctgctctccagatttgtgttttgcatttccgaaccctgtggttgtcacaaagatctggaatcactcttatcccgttctctctttattttcttcctcatagggaaatgtttacgtctggaagtttgagccgggatcggacactgatttgcagccagtgacgatgtttcctgctcatccagggaaatacatcactagggttcttcttagtccagatgtcaagttcgttcttccccccctcatccaaaattttgttgtcctgtgtttttgagatatttcacctaacatctttgcccactcttgtaatttattattaccttaaactgcgatcttcacctcaaatcttcaggcatttggcaacgtgttcgtcagacaaaagagtgaagatctggtcaacagagaactatgagtttaaactcgaaaaaacattagatgatcatcaacgatgggtgtgggacgcggctttctcggcggattcagcttatttagtcactggtgggttcacctcggttctttctttatttcctcgtgccttcacttttttcctttacaggccgctcaatactctttgttgttttcaatgacaaacagcctcgagcgaccatatcgccagactttgggagctcgccactggtgaagttgtcagacaatatacaggtcaccataggtacgttcttctcatccgctgttctctgttccccactcctttcacagcgcatcacaactgacatcttatgttatttgtgaccgtctctgttgatttgtgtacggtacggtgaacgacttcatagagcatgcttggctgtagcattgaatgatataaatcttgcctaatcaattcttttcatctttgtattcttaactacgaacttcacgcggcttcactacttggtgcttgtaggataataaaaaagcaaagcatgcatccatcatacacaagatagaatttgaggattaagttagtcaagtaaaataattgatcaccattcctggcatatacacatgcaaacggaagagtttcagacgtgaactgtcaagattcataattctctctacttcttagccttcaaccagctctcgacgttctccttatccgtactcaaccattgagtagaagccaacacggcctcagaggtttgagcgagcgacatatcgaattgagatgtatctttaccagcgaaaaaggattggatactatccagatcggctcgagtactgagtttgttgtacgtgatgccaaccagtcggtttagagactgggataacgcaagagtgttcatgaaccaggtagaaagaatcagtaagagctttttctggattttatattttaattgggaccaggagaaaaaaagaacgaaccatggtgttgttaaaccgcttgtagatctttaaatatagacatcgaaacaaagtaaaaatgcgacctaatcaacgtcggctcgatgatgtatacgatttatcaaaagtgcagcaccacgtacagcgtcataattggtttggaaatagtccaccaaagcccttctagactttgtattttgagcgagacccataaagaagaacaggacgtcctgatctttgacttctgtaatcagcatgctgaacgttctgccgaggagcgcgttgtcggtgggagccgtcaaagcgaccatggcgtcaaccttcgtacttggattagatgggttcttgtaaacctccttgactatatcgtaagcctcttctccaaggtggatgatggcgagtcggaaaattgcccgttgaatatcgggggcaatcgcattttcatccccgctggcaaactttcggaaagcctcagtcgcaaatttgatgacaggttcgtagccggcgattccagcctgagagaaagcgagcgttcggagttctttgatatcggggtcttcgtcttcgataaattcgaatctcagtcgatcgatcagaggagcaaagatcgttcgagtaaggtctttgatagaatttcgaacgtcttcgggctgttcccaccagacgctggataaatcagaaagggcatcggcgacaatagaccagacaactttcttttcctcattcttgaaatgcgagatcagatcgagcattccggttgttgacgaatatccagctctggctagcttgtaggcatcagcaacaagaccgactcgatcctcaggagagaatacgcttccttgcttggaggattctttgccgagaacgtcaagatgagaggaagaatatgcgacactggttcaagttcaagttcaaaacagagtgacacggtcagagatatgaaccatcctcattaatatagaagacgtgagcctataccggtagaaaccagtggtatcagcattgagcttataaacagtagctccttccaagtcgatggtgatctctcgctcagaaaggaccaggtccttcttgatttccgcctttccatctttgatgagaataagtcggaggggaatatgcctatgtaaaaagaggctctgagtgaagtcaccgaagatagtttggatagcgaataacacacgattaagcttagacttaccagatggtctcgtcctcctcaggttgaacgtttccggtagccaagaatcggttctgctgcatgtgaagcttgccgtccttctcagtagcggtgacgagagggtgaccgatctagatatcgaagcacaacgcgagcacacatgttcaggagaagggagatgtatcttgatgtataaaagtacataccttttgaatccaagcatcggcaatcttggggatatcgacgccggaagcctcctggattgctttccaaaggtcctgggtggtagcgttcgagtacgcgtgggttttgaggtaaaccgagacccccctcaagaatttatcctcccccacaattccagcaatcattcgaagaacagatgcaccctatcgtgaagttgtgagttcgatcaaaccggaaagctcgaagacattaggtcaaacatcaagtgtagtctaaatagagagttgacttgccttagagtaactgatggcatcaaagaattgactgatcttgttggcatcttcgaattcaacctggatggggtgacttgatcgttgtgcgtccaaatcaaacgctcggaagaggtgatcggttatgaaaacggatcggacgttccattcggggtaaagtctgatagatggcattgtgacgataagttgatagttcagttgggtagcgaaaccagatgatagatgcttacctatcaggaatgatgacctccccacacaaagtagctacgagcatagcaagaagcataatcagtaacgcgctgctgacgagataagacgatcttatgcagcttgtaattaccgaaagcctcgtttaaccagagctcgctccaccactaacaaaacaaaagatttgaagcacaaattgagaggaaaacgacggacagatatcggtttttcagccatcagtcagacagcattgaaagaatagaacgagagacatattctgtaccttcatggtgacatagtttccgaaccactggtgagcaatctcgtggctctgcacactggccacctgcttcttggctgccaacccactcttcttgtccaagagcaatactgaagttcgaccgagaatcaatccgtagttttccattgcctctgttgattatataggaacaagaaacggcaaaaggtatgatgtatcagctctatttcgacttcgcgacctgttcacatgagagaatcgtacgagcgtcaaagtcggctgtgtgaattgaataagagggaacaagagtgggaccagggatatcagtcaatagctatcaaagtcgtgaagaaatttaagatatatgacccactagcaactaaagaatcaagcttaggaagagcatagggaatatcgaagatttcctcgtatagtggtgtggctcgcttagtgatctctaacgcatagtcgacctgatggataatatcggaggtagctacggtggcgaacgcgtgaccaaagttgaccagatgcattaggattatacacgatgatgagaagacttctcaatcgaaaaaacatcaaagacaaaccatagattcgaagaggaacagtcttgccggtcagaggggagatgtaggaatcttttcggtactcaaagtatccgttagcaaacgctaagagataagtcgacatctatgcagcgcaggaagccatcggaatcagcatataggtctcctcaattgaattaatatgtgaagacatctggagagagaaagacagaacataccagaggtgatttttcgaacttggtaatcttccatccgacgttggctgctttttgatgagtcttgtcgatagtctttccagtcgttttagcggccacgtcgccttcggtcttcccagccgtggtctttccaatcgtcttgccttgatcgccttcagtcttgccggcggtagtcttgccgtaggtctttccgacaaggttgctgtcctcagtcttgccaactgaagaggtcgtggtggtcttaccgatcaagtttccttcggtctttccaagtcttagatctccctcggttttggccatgatcgtcttgcctgtcgtcttcccaactcccagatctccctcggtcttggccatggtagtctttccgacagtcttcccaactcccaaatcgccttctgtcttagccgaggtcgtctttccgacggtctttccaacatctccctcagtcttaccaagcggagtctgatcagtcttcgtctgaccctctgttgctccctgcgtcttcccttgcgtctttgattgaccgctgatcaactttccatatgtcttgctctccaatctgtcaaacacaccctctgattgaccctctacccaaggtcgttcgatcgtgaccggcatgtttgacaagttgacagtgtcggcctgagagatcatggtgaccgagaacgaagccttcatttctggctcatcccagcatggcatggcttttcgggcgtcggtcgcttcgaactgggtgagggtatagatggcttcttgtttcgtatctttatcaatgtaggtcgagatgtaatatccctgaatgttcgagttgaaacagataggaaacagagtcgaggccattttccgtttagcgtgaacgctcagttgcccggagattgggtgacaatcatgaccaagggaaagacactcacgatcatactctgacccaactctgctccccatcccaagttcaatttgatttcatctccgttcctccaattgaagccttgaagggcagcgatatcgaccacgacctgttcgttcttgtcgtctcttttcacagcagaatccgggatattgtacacggcctcggtctttgcggcgaacgattcaatgtgaagggagtgtatatggagagatgaatgagcgttgaagatgagccgcttgtcggacgcatcctgaactttgagtctttagaaggtgcgcatgagatagtccagaaaaagaaatgaagagagttgtccactttgtatgagcatgcctgggctcgatgtttctctcgaacaaatgacaaagagatacagggagatgaatgatggaagaaaccctcacaaaatggaagatgatccctcgaaagaacgatcacggagagacgtcttcagaatgatgtcgtaatgcaaaggcttgacgttcgtaggaagccggaaggcatcggtaatagcagggttcatagctaaacgcaatgaagagagatcagttctgtgtgtgagagagagaaggatagacgacggaacgaccaatgaatccaacagaagaggagatccgaaagaaaatttccaggttcatcccccgggtctatgcccgatgcatattgaggatacacgtggagaaacacgcgtcaagtgtctcatcccatcgaccctcaggcagtcgaccgatctcatacgtctgtgtttgatgttctcgaacaccctgtgctagtgcatgcctttctttgtgcatttaaagattctatgtcgagcaagggtgcgagtggctttgggaaatgttcttttctcctctttcttctttggccccttcgtccttggcacgggcgtcggccggatccggtctttctgatcgagggaattccagatatctcgaagaagatggacgatctacagataaatgatacagaaaactcgataaaaagacacttactcgaataagacctctttataacatgtacagtagtgacgacaagattagagtgaacgtttaagattctggagatagaagcccaggtggggatcaatctggtcatgagtaaaaaaacacgtgggggtggggagagattttttttaaaaaaggactggtaattctaataagagaccgtgtgggggatgtgagctcggtatcattccatctctttcttgtcaactcctcaacctcgctcatggatctaagcagctcattagagacattttatatatggtgaagtgaagaggatataaaacaaatacaactcggaaaaccatcacagagtagaatatagacatatgtatttctcgaccttatcgagccatccatcctccatcaacctacaaaagcacgcaggcatcaaccgatctgtcagattttgtcggggtcacggataataaacgacaaaggagaatgttcactcacagtcacacactctccacacacgtaatccgatccttttccggcgaggaacaagatggcacctgagaaatctgcggggagaccccatcgcttggaaggaattcgttcgaggatctgtctggaccgagttggatccgcgatgagagccgtgttcatctcggtcgagatataaccaggagcgatagcgttgacattgattcccttgccggcccaatcgttagagagccccttggtgagtccgaggataccgtgcttggcggcggcgtaggcgggaacggtcatgcctccttggaacgatacgagcgaggcaatgttgatgatttttcctctgtcttcgccttctttgcgagtctcgatcatgtgctttccaacatccctgtgtacatgaaagagagtcatattggacggtcagttgtctgtctaccaaaacttgatgaagagtgaacacgaacggacctggcgagggtgaaacacgtgctcaagttaacctgcaagacctcgttccaatcttcatccgggaagttttctgaaggatgtcttcgttgaatgccaccgcagttgatcaagatgtcgatcctctttccatctttcgtaacttctttgacgatctgaccgacagcttcttttgatgcaagatcagctacgtgaatcgtggcttgtcggcccaaagctcgaaccgcatcttgtgtttcggtgttttcagctgaaacagatatagaaagatattttttaagaaccgtaaagagaaagacaccatgattgcaaagattgagaacaatatagacctactggatcgctgaatgaggattatatcagctcctgccttagccaaagtaatggccagatgagcgccgattcctcttgttcctccactacaaatggaatgagataaatccgcttgtgtcaacactcgcgatatcattgtcgtagcgaagagggaaagagagaagcagtagagatgtaaagaacaaagattgaagatgaacaggacgaacgtgatgagcgcggttttacccttgagcgagaagagagactcgagatattcagacgtagacatgatgctcggtatagtagaaaagattcgatggagttgacaatgagaataagaagaaagaaagaagaagaaaaagaggagcaggaggagcagcaaggtttttatctttgaaaagacaaggcgggggaacggtcacttttcccggtcgccggtttccggtccggactgccgaagcttggttgttattcctttcgttcattcacctttttgagtacaacttccacaagtatcaggttgcaggggatcctttgtttgcgagaataagtgataacacattcacagctgcatttaattgcggatagagtcctctcgacggcaaattctgatacgcaaatatttctccgaagcctgcattttcctagggaccgtagatgaacatcattgagaagggcgggatatctcgacagtggaaatacgatgaaaatacatagagtggtcataaaaacaagacggtcgatccagatcaaagtgggtcatctatccctagttccttcttggtccagatccacaggtcctcttgaagagctttgtcatgactctgctcgctgctttcaatctctttgacgtcgatgacctgatagtatcttccacttgttcctacgtcttgatccgtcgccaatttggtcacactatcagcgaccttctcgacggggaagaaatcaggaaaccaccatcgagagaatggattgctcagaaagaaccggaagatcacgccttgtatccccgcggcccatcgatacagctttgtcgacatgacccccggatcgagtgcgacgaccgtccaaccgacatgtccttcggattgtgcgtgatgatgaagggcataggcaaacaagacgttacacaactttgacagtgcgtaccgacggaaaccttcaggctgggtgtccagtgccggatcggtaggaggatgagcggcagcctcggccgtggtgtagttcggcggaggaactcgcttgagcttcggatcatgagtcgaactagcaatgagaacgatccgcgcggacgtcgttaattgggatcgaagaaggaagaacaagtatgcctggttcagatgattcactgcaaacatctcttcgtacccatccggtgagatatgaaccttgtcgacaaattggatcgccgcattgaggatcaaacaagagattggagggaacccttgagagaggtactcatcgacaaacgatttcgttccctgtttggttgatagatcgagacggatatagaccacgtctgtttgaccagtgagtttgttgatctcgtctgccacttggccgttagatcgggagcaaatcacgatgaccgtccgggaagatcgttcggtgttggctcgggcaagtgcataggcggtcgcttcacccaggccggtcgttccacctgtgataaggatagtagatgtatatttcgtgtagtccatggtttatgagagtacgtgtttaggtgggcgagcaaaggaagagagaagaatgaaacaagattgtaaaaccccatcttccatcttacatcttaaacgccaaagttgatagcatgcccggttgtatgcccggttgtatgcccgatgtgcagtggatgtatccaatcccaggaattggtaatcgggtttcttgtcttcctttcctcttggcagactcgatatcagtttggatcaatacccttcatcctgtaatggaaaacgcaaagctagatggatggaaacatttgagaaacaaaattctatcgagaagcttctaacgctatgatgatttgattgtctagatttgaccctgctaaggtcttttattcggtctttccctttttttctccattctcacttgtagacgagactccgtcctccgctttccttttcagtccgccgttcgtacttgccgtcgtagagcttgtgcgtgtgtgtgtgtgtgcgcaaggagattcacaaagaggtgaaaggaatgtccaaccataccgggttagcaagccaaggacaagataagaacaaaagagagcaaagtcaaaattccattttcttctaatccaacactcaaaacgctttccatccaaacacgaacgaagacgtctaaagaaaagaaaagtctaaggaaagaaagggggttctctatgtccaaggacgaggaaaacttctaatgatgtctagtgttcataacaaagagaagaggcgaagaagaaaaatatattatacgagatagaaaagagtgatcttacttttgagcagagaagtactcgagctgtgtgaggtttccccgattacatcaaagttgttcagaaccagttcagtacaagctacgccgacggcgaaagagagaaacgacgtacgctgctcttgggatcagtcttgatggtagagttgttgctctcagggtcccagttggcggggcagactacgtcagaagaacgaacaagtagacaagatgatgagcaaccgcgtttgtcgacctatgatgaacggcaaactcaccctctccgtgctcgtctgtaaactggaaggccttgatcaatcggatggtctcctcaacggatcgtccaacgggaagatcgttaatggtgatcctagataaaaacgaaaggaacatcccgttcagcacaccaactctggaatagaacctagagaagaacgaaaggggctcactgtcggagagtacccttgggatcaatcaagaaaagacctcggagggcgattccctcatcctcgagaagaactccgtagtctcgagctaccttctgggatcgatcagcaagcaaagcaagcttgagatcaggtccgagacctgtcgttaaagagtgaacgaaaggcggaagtcagaatgctggatattgtgatataaaagaggagcgagaaaagcaaacgcacctccctcctgtcggggaaggttagcccaagccaagtgagagtactcagaatcacacgaaacaccaacaacctcagtgttcaactcagcaaacttgggaagagcagcgttgaaagcgaggatttctatgagaatgaatgaaggggtaatgattttcgtcaat

SEQ ID NO: 105 - DNA, 12030 bp, Xanthophyllomyces dendrorhous
gggtagaagaaaaggacgagcctgaccaaagaggaaacccaagtaaacaaaaagttgatcagacgtctagaacagtttttatcaaggagcaccttcaacactcctgatccctgatcctaagcctggaagactttatcactatcaacagtactagcaaaaagataagcgaacgcaccactttccctggaaatccttgagggcgacctcttcgaaatcaccgtctcggacgacggtacccttgaagtcgggggcgggtcgctgaacaagagccttggacattttcgttttgttgatctgagattggtgaaaagaagagacgccgtatgattgaatgaagagaaaaggaggaaacagaaggcaagagaaggaaaaggaaaggagaacgaagagggaggaaattgcaaaagaggatatttaagtcagtcatgtggctttgacttgagagcatccagataatcgacacaaaacgttaggctagtaccgcatgcttacttggagaaaggggtagatgtggatggtgatgtggatgaagagatggatagacgagagaaaaatgaaaaaacccggatgggcttataaagaaaaacaatccagtccgacgaaatcggaccggtctagttgaaagaagtgtggcgcgacttcttgcacctcattcgtcgaccggtcgaaatattgaccctttgagttattttctttcttggtaacaaatgacgttcacgattggaggagtagaggtagaagaaactctctttgtatacacacacaggcggaatgaaaaaagaaagagaaactaaagagacagaaacaagtagaaatagatcgagacttctcattcagacatgcttatacatctcactctattcatccgaatgatcatttcgaggaagaaggcacaatccatcatttgttagttttctccatacactttttgacatacgaatttgaacataataagggaggaaaaggtaaccccaactcaccaatgtctttgcgttctccttctcgagctcatcaatcttgttctgcgctgccttcatctttctcaacagatactctgacctagcgacgaccggatccaatcttgactctagtccaagtctagacctcaggcttgctacgaatggtagagaaaagctgaagatcgattttcgagaaccggtatggctgatttctttgagtgagagaagttcagtctcgtatgatttgatatcggccgcgctgagcccgatcagctcggagttaaaagagatcgtctgggaggcgttaaagacaggatctatcagacagagtggtatagatccagttagcggtatgctatgcagccaaagagcgagaaatgatgagtatcatagagagatacaaggacggaccttcaacctgtaagatggcaggaagtgcgaacaaaaagtatcagcaaaaaaagtcgcctcggctttcactccgattctacgaaacgaactaaccagctttcggaacgtggcatgcatcatcggtttaccaggcttgaccgtcgatggccagccttttatagtgtttggatccaagaaatcatacgtgagacacattgaccaacgtaacaaaggaagagaaaggagagacggaccattgacgagagtaagactgatgacttcggctgcttcaagattctttagcttatcttccgctccctctgatggcgggatcgaagaacagatgcaagtaagtcagtgaaacaaccatcgatataggaagcaggccaatggcaaaaactaggcttcactgaaagggaacgacatcaacagagactggtatgggatctgtccgattatcaataagttcaacctcacaatttcgtcaattcaaacaaaacatcacagataggaaaggaaggaagactcaaacgtacatcagatttcttagctagagagctaacgatcttccaggcttgagctcgagaccagggtaaactctttgcttcttcagaatcatcaccaaatacggattttcgaagttccacctgagatctctgtagaagatcttcgacagattcgctctgtttgtaaatcacatctcctgttgtcagctgaagaagggagggagcatgaattgatctggctcgaaacgtcggatactcacaatcgacagtccactcctgactttgttgatcaatccttccaggtcatttaatcgaccaccaaacaacccgatcaaccttgcttcctcaggatcaatccctcttcgttgtccacttaataaaggcccagctgacgatctgtccaaattgagtttgtcagccacaaacgaaagtgaggtcgcttgatcggcatcggctaaagagattgtgttaatcggtttggaaggtagagctttggccagtgattttgaggcggacgtattatcacacaccacaatcacttgcgcgatctgagttccaagataccgatttaatcagcagccatgtgagttatgtagaaaggaaaagtaggaagaagaaaaaggagagttactctgttttctaccagggaagcactccactctgcaatcgtgctccacaactctggctttcgatcgcccttgctagcgaaattcttcaagacaacgacaggcagggaattgatcgaatcgttctcactctccaactggatccgatctttctccttttgagcctccatggccactgctgtcggtgaggagagagatgatggtaaggcctgtccgagaggtgaaccaagtgtggtcgagccaacggtggaaagagagaggaagagggcatcttcctcagtaggtacatccgtggggagaagtcgttcgattccgtagcctgtgcatgtatgtgtgtgcatgtttaaactcctcctcgtcagcagggctcaaaagttgtatagcagagcaacaaggcgaccccatgaggagtgaaagaaataataaagagacgtacccaactcgctcatgatcccattgccagctagatcatccaatctaccatcatgccacccaattctcttcagtctttccgcaagctcagttctctctgactctcttagcgcacaaagttctttgcgtttgaccccgcttgttcgttcaagagtagagtcttcggagacatgcttgagtgcagaggacactagatcaaggatttgtttgagctgggtagggaaatctgtactgaagccggctgtgaatatcagatgagatgagttggaatgaagggcagagtgcgagatcgggcgtcagtgatctaagaggtttgtatcaggagaatggtcaaaaataattcctacttttttgaccgatgagaccgacggccgccagatcgatcatctggttgaaagatgccaagaatccaaacattggccttgatgatgatatgggcaggagtggtgagcatcagtatgaaaggaggctttcgaggaagataatgatagagaagaggaagaaacaaaccaataaccagtctgatgagcaagaattgaacacatctcgccatcggtctttcctttagctattgctttacagtcaatcacaatggattttctttacgcggacattgagagtaagttcaatatttataacattaacatccgctagcttcattagggaggcaaagatatcacatgcgcaagagagaacataatggacaaacttttgctcggcagagaggatctcgtctacgagagcattctttccagaccctgctggtccggtgacgaagatgaatccagagggatattctttcagccatccttccgtctgtttgacagcttcctgtctctccctccaagcagactgattgacaggttcgcctctcataatttctccattaccggcgtcgataccgacgtttgcgttccgtccatcttctagatcaaggcctgtatcagctaggttgaccggggaagagatgatgaaccgatcggttggttgagtaccaggtgctggaggagagatcagccaggcgggaaggactgaagacgcgatttttctagagtactgaactaccgaataacctggaaagtgatattaggtaaaggaaccggattagctgagcagtgaaagaaggcaaagaggggagagtgaggaaggaatatacgaagaaagaaatcttaccctccagatcgaaccggccgttgactttggatacaacaaagaactctctgatagggtcaaagaacgtgtaactcagggttcctagcaaggcgactagaatcgggagagcaattctgggatgggaagagatccagtctctagctgcatgtgcctggataggggattggtaggtaaacgctaaccgagttaacgtgcccggaggagcggatgaagagggtgggatagaaattccgtgaagctagttggaagatacaagacgatgatgagagttgaggtctagaggggcaccatactacagaacgagagaccttggccagatatctggcgcgacaaaaaacagactcacacaagaaacagcggcggtactagaccgtaggcgagaaaaaacgagactagcacttctgagggttaacgggggcacaggtgtgggtggtgtgatggtggcaagatggccaaatggtctcaacaggtcgtacagtctttcttggttgacgtccggtccttcgaacgagaccgtcaactgggatgaggggaaccgattcaggtcttcgtaccatggatgaccaaggaccggatggatcttgcccttcccccaccatgcccaggtgcgaagacctccgaactgatcgattgcttgctggaaagcgtgttgaatttctttgagggtgtgtgcccggtcagaaaagccttctgattcaccagacgatcgcccttgagagattggccgatcataggaaaaggtgagaaaaacaccacctgcttttggctgtctttctatcttgagcaaactaaatccatgagcattgacgttggaagcgatcaaggagaactggtctaacaagtcgtcctttctgagtgaagccagtactgggcgagggctaggaataaacaaaaggtcaatacggtcgctagaactactttagaagatccatatggactcactctgccttcccgagctggatggggaatataccggacgcataaaactgagcttcgacccgttccaccggcggctttggagtcaagtgaatccgaattgattttgatcgttcgatattgaattagctctaggatttctattgaacgctggtagagacgattaaacagaatctcacctcataggcttcgtcgccaccaaacgattttgaattggtctgagttggatcgtatgacgagccgaattgaccgagtgacgagctctggctttgtggattgatcgttgtctctactgcttcagaagcaaacgttctattgaacagaccaccgagtggccgagaaggccgatatgaccgagaagcaaaccgggagacgaccactcggtgcatgtgattgtggtcgtggtcgggaagtattcacgttggacaatcagatctgtctttttaacaagcgaattacctgaaagcagagtaaaagacaacgatctcgaggtagagataaaggtgaaggtgagtgtagatgtataggtgaaggcgaccagagattaataaaaaaactctggtgacgtcatgccttgttttgtccgaccggcttggcccaaggaatcagagaagaagagacatcaaagcagagtgcgcgacggagagtaaacacaacatccgagatgtataagttgatcgatgacaacatcaaaagagagagaaggatgccatagatacatcaaatagagagatacacatgcacatgagggagagatgactaaagaacagttacgccatctttcccacggcgagaagcgagtaagtatctctgttgtctcttaaatctcttccatctcatggtcatggccagggtcatattaaaccctttctctcatctctctcgatcctttttaccatcactcgctcgctcgcactcgtatctgcatctacatccgcactcgtattcacacttccctttatcaaactctataagacgagctatggctaacgacaactccaggtcgtgagtttttctctgtttcatctttgggcgacacgatgttcatctactcttgtctgctttcctctctcaccatatgaaaacaagcgatatcacgaaatgggccagcagtgacggccagttcaaacgacaggtctcttcctttagggacgttatcgaagagggtggcaagtttcagccagaagcaggcagatatcatctgtgattccttttttcttttcctcgtgcataatctcaatcgctaatggctaaccatttgccatcacctctctcccatactcgataggtatgtctccttggcctgtccttggtaagccctttcatcttgcaatgtttatccatctatttatccatccttcgcctgaactggggcacttgctttttttcctgatattcctgcagggcccatcgaacgttgatcgtccgaaagcttaaaggactcgaggatattattggtgagtcctattcgttccctctgctctcggtcactctttgcctattgtattcatcttctctggtctcatccgctttctctcatcagacgtttcggttgtccatccgcacatgctcgaacggggttggtcgttcgaaacgtccttccccggtgctacaggtgataggctcaagctcggtggaacccatctccgggacatctaccaccaggttcagccagactacaatgcccggtaagtgttggtttctttcttcttctcccgctcttgtcttctccctcttcccgtctgctttatcctttcttccttcttcactttcttctcctccgcctcctgtcgtctaccctcacttgagtattcaataatctcttcttcctctttttgctcactgcagatacaccgtgccgacagtgtatgacacaaagacaaagacgattgtcaacaacgagtcgtctgaagtcatccggttcctcaacaccggcttcaactctattcttcctgccggctcggacaagcaagcactcgatctgtatcccgatcacctgaaggcccaaatcgacgagatcaatacgtggatctacaacgacgtcaacaatggtgtctacaagtctggtttcgccactacccaggaagcctacgagaaaaacgtccgacctctgtttgctgctctggacagactcgagcagatcctcgaaggcggaaagctgtaccttgtcggagatcagctcacagaggccgatgtcaggtatgttccgagcatttcagttaatcgtaagcggccctacgaaatttactttgatctggtctttcttagactcttcactactatcatccggttcgacccggtttacgtcggtcacttcaaatgcaacctcggcaccagtatgtctacttttcttttttgctcgatcatcctcgagcgcacaagttgacatacgagattcctatcttattcctacttggtcgcattctcagtccgacattcattcccgaacctgaacaactggctcaaaaacttgtactggaagaatgatgcgttcaagagtaccaccgattttggtttgttcatttcatcatgtctcttcattttcaatcgttgttgttgttttcccaaaactcaaccttgcgaaaactctaatcaacagatcatatcaaggagcattattattagtacgttctatcttctgcactgtcaagtttccacagacaaacctgtcgtttcttgatcactgattcttttatttcatcatcaccatagctcacatgttcagatcaaccctactcgaatcgtacccgtaggcccagtaccccacatcgagcctctttgataaggttcgatgaggcctcggcggttttctacgtcgtcctttcttattttcttttttgggttgtgtatgcacttggacctgttccgaaagggtctgttgtcttcctttatagaatactactgaactatgcatatcttctcctgctcaatcgctcttacatgaatcccttaattacttctatatgatctagtaaaaacctactctgaaaaagagaacaagtgtgcaaaagaagagatgaagggtttaagaaaagagtgaacaacatagtcaaagtctagtactcaaaaagattgtctgttatgtcaggtatatttgttgtgttagggttatcgcctttcaccgcgactctcttcgtcatcgattcccatccatcaccttctgtcgcatacatcacctgttctagtctacgtctgattgtcttttcgcatcaagtttatattccttccatcgaaggaaaacctcgcaaaaccgatcgaagcaaccgaacaagcaacaagaaggtcgggaatcaaaatgacaaagacggaagaaaaaacccgagatcaagatcgagatcataccaaagaagcaaaaaaagaagaagacgccgaaccaagcagaacatcacttcctgcatccgtaccagtcccgaccatatcatcgatccatattgcaaaagatctgatgaatgaggctgtcttggagctacgtatgagttggtccggcaaggttcgttctcattttagaacttttagtctggatgaagccgtcagaattagagacttgtgctggatttccagagtcagcgaaagtcctcgacgggcaatgaacttgtctgagagggagagttatctagcatttggatccaaatgagagataactcatagaagtttctaatcaagcttctttgtatctcacttgaatacatccttggggatttggaaatagatgttcgaacttaaagtaccggagcaagataggtccgttccttctcctcttcctctatcttccatatagtttaatgcagtggtaatacataaatgagaagatctatactgaaaaaatcatccgggaaatgaaaattaggatatgggacctcaagaacctgatctggagtctgacggaagtcccgttggaaagaatcaagctcatcgggctgactacgacgaaggcaggaactgggttggaagactcggtcgttataaaaagtttagggctgaagagtgggaagaaatttatgatgctcggttagttcctttcttcttcatgtatccttctgctatgggactctggaggaagaactgccggggttcgttactgatgaagctctggaactgtagggacgagtgtggagaacagttttaaagagtgagcctccttccctgtctaacctgatgcaataataaaatctcagagattaatgacgaattggtcgtgtggaaaaagtccgacgaggcttcaacaaaaggaaatcatcgatgattttgatatagattattcaagcgcgcagatccctcctcacgaggttcgtgctgtgtcttttactttcgaatccgtggtcacaccgatcctggatggagacgatgttgcttgacttatttgagaggagtttactcaattagcatgtattataaatttcataggatcctagaaatcagcggaagatcaaggaaacattcgagaaactccaaatcaatgttcgatctatccgttcaatttctgtaacttctagaatgatgaaagagtatcttttgaagctgatccagtgcgcacatcttccctttcttgttctcaagattatcaaccctcctcgaccaggaaagaagctcctcgtattggacctagactatacactcgtcgacactaagcctctcatttcaggctcgctccctccgctagaatgcgctcgaccgaatctacattcgttccttcaaagagtctaccaggcatacgatcttgtgatctggtcccaaacgagttggcgttggttagaaagcaagctgacagagctaggtatgctgggagatgaggcagagcggatgggattcagaatttgttgcacattagaccgaggttccatgtttaccgtctttggggaaaaagatggaaaagaatacaagcgtatgtctgagcgaaagatggattctagatttgatcatccgaagccgtcattgactaagtcttgactttgaaaattcattgttgtttgtttcccacagatgagtaagtctggagacagatctaatttacttttcgttgtatctgttctgaacattcgtaactatttttgcttcgtcattactcatgcttcagggtcaaaccgtgagttctatacacatacacagcaacaagagtttctcttatctctaagtactccattctttctggctctcttgacaaatccgacaaaacagtctagagcttctctatctccaatttccagagttttcaccggcaaacacgattcatatagacgatctcagtcgaaattttgcttgtaatcccagggaaggattgaagatcaaagcttataaatcagcagaagctgtggctgctgaggctgcgggagggtcgaatacatcgacgggagaggaacatggggagccgaggagaaagagggacaaagagttggacaggttgggtggttatgtacgtttgccacattttgatttctctcttcttccttctttcgttccgttttccttgacagtcaggtcgagagggaaatgatgtcggtgaaggttgatgctcttttctttcattacgtgattgggatgtactggacgtccgatagctcatggcgctctctagatcagacaactttagaagagatgtagaccacaacagggtattctatcttttctactttttcttcttcttctcgttatctatgttcttttggagagatggaccggtcatgttgacctactgatcctcttccattcattttgtgtatgtgtgtgtgtttgtgtcacgagtttaggattggccggcatacagaagacttgacaaacagaaacaacttccaccagacgggaacttccgttgagacggtttcctattcctacctgattcctttatttaattctgtttctcatgtcttgacaccgcaatgtatatataagcgttctggaagacgtttggagcaatgtattctaggtttggataatgctgagaatcggtttgctattgcatgaaacaaaatttctctttggctccattaaataaaggacccctaaaaaaacccaaaaactaccatctgggatctcagatgagacaacaacaagagaagaaacaggagtgcagcagtacagcaggtacagagagaggaaaacggatggagcgaaaaattagatctcgccaacagatttcagaccggtctccatccagactctgctccgttctcgatcagctatgtcctgcgcgctcgctctgaaaaaatgtttactttcgtttccattcgtcgattcatcagtcctgttcgttacaaggattttttcaaaatccaaaaccacaatttaggcatcatgattttagatggtatgaagggcaatgagggatataaggagaacgagagcataagataaagaaagcagcgaattagaagaaggacgaaccatcggacatgtttggcttctttgtcgaggataactttgacggtactccagctgaatctgacgagagaagggtatccaaatatcgggtggagagtttgacgaaggaatgatttggtcgttgggtcttttttccgcattattgcacaaaataaaacaatcaaattcaaataagaacgagatgcaatgataggtgaaaacaaaggtggatggaacaaaccagaggggtacccggaacccatagcaatctcttcgcccttccctacttcattctccgactcaaccgtcacctcgaccacgacgttctcctcttccttaccatcctcttcctcctcttcatcatcatcatcttctatagcggatcccttcttcttctttcctccctttcttacagctgcctttcgttttctacctacagttccatcaagtccagatgaagatgtagatgtcgcagtcagaggtgccgggttggatttgatcctgtatggaagattttcctctggatgaatccaatgggttatccatcgatctcttgtgatctgatgttgaaagaagatgtaagaaaatctttcagcaaaccaaagagcagagagaacaacaaagaagacatgaataaacagaccttggctgcta

SEQ ID NO: 106 - DNA, 29722 bp, Xanthophyllomyces dendrorhous
gcctttggacaaactgtgaaagaaattgtcgggaagagcgcagaaagtttcgcctggtatggtccacatgcacctagcgcatcgacgtaacactgacaaacgggaaaggaacgagtaagcagaagcacgagaacacgaggcgtaaagaggagcatgaccaacttcagctagatcaattccttttcgcaagacatcacctataagccctatagtagcttcctccgcctgtttgttcaggttcacaggagctattcctcggagcatatctttggagatatcaccaggtgataaaacccgtgtagcgtaatgcaattcgtggtaccctccttcactatcctcgccgcctttgtcaaccgagggaggatcgttcgggttttggaaaagatcaaagagatagtctcgagtggaatgtgaaagaacttttgaatcatcgaacccaagcgtgtcgagggtagagacaaaggacaacggcgcataggcgcaagcgtataccataggacctgagcaagagaagagtgatctagtagtcagcgatcaaaaggccaaagggtctgatgtctgatgtctggtgtctctagattttctgcgcgcacctagaacaggacctcgacctgcttcatcgatacccatcacccatcgctctctctctcgtttagttcccttagtttgagtctcgctctcggctttggtgagttcggtgtccttctctgtgtctgtctcggaggatgaagtgaggaccgataaggtatctctctgatccggcaagtcatatttctgacgagtccatgtcgaaattggagaatgatatgtataagagaaatgcagaggtcgcacaggctggggctgaatcgggtcagtcatgttggaatggatgtatagtaggtctaacgagatacagaaattaagaggatagttcatttaatgctctacgcctcacgcgtcaactcttcaatcgaacgcgtctgggagacgcgtctaacatggtaacgactgacgtcatcagtctgtaacccacggtcacagcgttttcctcggctcccctatcgtcatcggtcgatgggagaagagatgagccagtcagacaaaagtatccccatctctttcttttcgttcttctcctatcaactatcatcaccctagaacttcattcgcaatctatcaaatctcataactatgtctaacaaggaagccactgatatctcttctgctgctggatccaagggtaagtggtttacttgtgtctgtagagaacatgcgttggtcgtccgaccaggtgctgatcttactggttgcctctcatttttcttttcatcttttggttgtctatacatcaattgaatttccttcctaattctctcatttgttgttcattctattgaaccaaacgcttcattaatcaggactcgaggctgccggtggagtcgccggagctttggagaaggagagacagtaccgaggagccaccgagggcgagggtggtgagtccatctccggacatatacacctacgaatcaagttatcatactgacattcaagctgattcggtcattcttccggatttctttcagagatgaaaggtcaggatgcgcacgctcaggaccacgatgtgactggagagcagggtagcggaaccggagctgccaactaggcggtttccttccctcattctgatttttaatgatcgatccattgtaatctcttattgtctcattgtagctgttaagatgcctatgcgtgtatcatgaatgctggcctttgatttgatctctccctatcgttattcctcttgatctcacacgatcacctttggggagccacaatatctactgcggaaagctagcaatgacatctgatgagtcaagcaccgcgagttcacgccgcacaacgtccgaaatcgttcatacctgtcgtcgtttcagtcaacagccactttgtcctacttggtttcctctgcctttccctttccattcataccatactattctctgcagtaccagtattagtaccagcaccagcatcaccatcactgtcgccaccttgactgccacgttagccaattacatcatccttaatcccgttcatcgagcctggacaatcattcttccacagacgattgctgccagaaccatatcaacattcaaatgcaatgaattacctttcatccctcccgtcatacttctcctcatttggtctaccttctttcccgactctgagcctacctcagaacattcaaaaacggttgtttgcatatctcctcaatagatcgataggtcatctcgttaaaggcggagaagttgacccagaaaggttgaccgctcaggtcagacagggcaaggtggagattgaagggttggaacttgacgaagaagtacgtccgttgtttctagtccaccatatccttgatcagtccgttatagctgatatgccaactttgggactgtatcaaatattctttgtgctgattatcacctcggtaggctatcaatcgattgattccactttctgtgccactggtgttggaatcaggttctctgggcacattagccgcacttatcccttggtccgcttcctccgccaaacccacttcagtaaacacagcagatccgtcttcaacaacagcttcctctccaacatccgggatatccatatcgctttcccatctacatctcaactttgtagttgcgtcccctgcttcttccacacctctatcgaaatctaaaacttcagcttctcaatcaaaaatagaatccgaaccgatcgatctgactcaaagcgtcataagcgtcaccgaagacttcttacagtctgagctgaatccccaggagtctagggatctggccaggagtttcgcaggggttcaagatgtatcgattgatctttcctccacaaccaagaacatcgatccgtttgccttggaagaaggcgaaggattacgggaggacgaggaagaggaggaagaagaggatggggacgaatggatgccccctggcgctatgccaggctccaattcaaaggccagagggggtggcaaaggaaagtctaaacttgcagcagacgtaagcgaagaaggaaccaagacctttctcaaaggcgttatcagcggcttagtaaagcgactgaaagtcgatgtgaaggatatcagagtcaggatcagatacgccgatatgccagaggacgactcggggatagaattcgagtttgcggtcggaggagtgagatatggtgaggaaggagagtccaactcgggacccttgggttcggcggctcaggagttgagagttagcggggtttctgtatctaccagacactcggaatcttctctcagaacatcggattctcactccgattcagccgtctctgcatcatcaccctttacgtcttctactgaatctgattcatcagaagatgaggatgacgaagaggtacatatgatgatgtccaaggcaacaatcgaccttcgacagagccacctgagcgaaaccatctttgctagtgcgcgagggggatctttctttgaatcgagcgcacagatcacaagagaacattcttcaaacgtcggagagaagaatgcaactttgtggggagagaagtgggaaagattgatatacgttggaggagataggaaagaagaagagcagaatggaggagatattgtgttctccatcagatctcaagagagagggggagaagggagcgcacggctttccgatactgggctatcgatcaaggtgaccatccctccagtttccatcctcttacttcctcttaccatacaatccatactctccatcacctctctcttccaagcccacgcgtcttctatatctccctcacctgcgcccacttcatcaccagcaccgtcttcatccatcaaagcccttgatatccatctctccgtccatcttcaaagtttctctacaggaatcgtccactctgccaaatcaccttcggaaagttcgagagccacattctgggcgtcgaacggaaaggcaggtttagatgtggattggctggagcttggaacggatgaaacggtcgtcgagtgggattcaagaagtttgggactacgacccgtagccgggtctagtagtcgggcaaaaattagagccactgttcaagacgtgtatatgtgggaacatagggaggagaaagaaaatgaagagatcggcgataaataccaggggggaaggtatagcacgatctatccgattggagtggtcaacccggagctcgaaagagagtacaatgtgacgggactcggagggtttcctcagtttgcttttagaaacgaaaagacagcaggcgattacaactgggaagaatggaggagcaggagaaggggaggtagagggagaaaggcaattgttttacagcaaaagattgaggacggagctggttagtggtcctttctaagatcataacagtctcgctttcatctgttagtaggcactgatcaatcaatgtcttgataatctttggtatgaattgtccgtctttaggtttcgagttgaatcttcctccaattcatcttttctgcgatctctcgttaatggaacggctcataccatggcttgaccgtatttccgcctcttcttcgcctcaaccgacccgcgcttcttatcaacccaagcctgttcgaacatcccgtacacaaatgcccgcttacaagaaaccacttcgggtgatcgatgacttagaagcttcaaccgagctcaatctatccgaagaagtcgaaactgatcggcctccggctctgctagttcatatctctgttattcgcgtagaggccaagtgtccaacagcgtctactcattatccatcgacagacgctttcgacaaacaagaaaaacgaagggcgcggtcagggacattggttttggatcttcaccaagcgtccttgagcatgtttgcgtcccatccttctcttttgccttcatcaagctccgtaaaacaaaacgggtatcttcccagattccgcgctcatggctatgagcaacctaaacttgaaactccaccttgggtgaacgctgaatggacaaacctaaccttgttctttgcaggtgcttcggatgacaaggctagagcatttgtgattctgggaccattaagagcgggaaacgacggacttgacgaacccgagctatcaccagcaccggtggacgaagatgctttgttgcccagaatccaaattcggttggatgacttaccatcgaaccgatctggatctacggtcaaccatcgatctggaccgaatcaaggaagacgatccaatccaactccgatcgaacttgaaagaagggagaaaacaaaatcgatcggttttcggattccttcagtcaagatggacttgaagaagtcgacgatggatggcctgcagtactttgcagatgacctgaccaagtggtcagctgagactcttgcatccgtatcagcaaacgacgcagcgaaagaagagggtgtgtcggaaggggatgtcagattgatgggaagtaagttttccggaatgaaagttgttgaggaggaggacgaagactcggaggctcgtggttcgagagtcatggaagagaacgagggagatgtggggttgaaagttcagttggatgttttcgatggtgagcatgtgtggttcccttcctccaatacatcagttgagcccatgaacttacttcagatctacggtatgatgtccgaatctcaattacagtggatgtactgttgagtgttttacggtcaacccaattgcctcaacttcaaccagaccgaaagcttcggatctggggtgctgatttgagcgtcacagccgaagtttcttctgttgtcaaagtatgtaatgtcttcgttttgcttcggatccaaaacatataccgacaagattcccccttggttaaattttcagaaaaagacgttgatcaatatcaaaatcctggatgcgttgctagaggacatctcggaggtgatgaaaccagtcactatgttcgcgcgcacgaccaatcgaagcttggtatgtcgttttcaacatctgttgttcatcgatattatctcaaattaactttattcgcatgattttctgcgtgtgtgtggcttcttttccaatttaattgatcaaaggatcggctttcaaagccattgttgtctattcgagccatcaacacttcaaacctggactcatcttccaaagagacagatctgcagatcgtctcttccaactgtatattgtttgaaagcacagatatctcatggcttacggaactatcactcttcatcaaaccaccggaaggggtgagtcttctgtctttatatttgatcagctcacacttttctgaccttgtctcacgatctgtgtatcatataggcttttaccgatgtagaaccgactgacgtgattcgaataaaactcgagatggaagacacatctgttcatctacgagcgccatctcttccaggcgctctagttctgacatttggcaacgtcgcaatttctacgaaacttttgggagaatcttcgaaaaaaaccgtcgatgttgctggctcttcgatccggctgttcgtgatcgacgatgtcggaacttctgttattgaacgtgagggagacagttcccgaccaatcaatgctatgactcactggacggtgcgcacttttataattttcttactattcatctatgtagtcgactacataactgaggtctactctttcattgcgttcatcatatgtctcatcacaacttttccacctcagaaactggggtttgctcagatggctcatctctcgacgatcgagatcatcgtcgacatcgctgaagaccaccctcggatcaaagtgggttttttagattctgttttatgaatagagatagttagaggtttggttcacgaaccggttgccttcttggtcgcttgctgcttactttcaggtcgatgttcctatccttcgattgcaagttatgacttgtcctgactctattccaacaattggagctataattggagatatttccaacgggtttgccaggtaagttaaataaaatgtacatatgacatatgactcaagaccaaactcacaacacatacctgcctccaccagcaccgataagaacacattggaaacgaacccttctcctgccacaagtagcatcagttctagtcggccggatttactttgtaagatacttcatcacccagtgtcaggcagaggctcgtgtgatgatctcatatatgatttgaaataccacagcgagtattgatgacgaagcgttccgtcaaccaccctctctggtcgtcgatgcggactttatcaaagatgatttgcctcagaacgccgactatctacatacgtatcggccacctaccgagcctctcgaaccgttgtcatctttcgagacgattggaccaggtcttcccttcaaatcaggagtcatttcaaatatcgatggagagacgattcgtattctggatccaagaggtattcagatcgtcgaggattattggtcaaccttgttaacacagcaacgcgaggaggtagctgagacgtgagtacaatttccgtgaccgagaacacctaaatctcttattgatcacactgtttaaccttcattcgtcagaactgctattccaacattaaaattccgacttcgaaattgtgacgtgtccttttgtcttcacgatgggttcgattgggttcatactcgtaagacaattgagcatgaggttaaggttgttcgtcgtcgactggagaagattcggcagcttctcgcctctggtcaaactccggacgaaagcattgaacaggccgggactacactctttggatccatctatgtcggagcccctcagttctctactgactttgatgccagtggatatctgggggcgcttgcagacgatgatttattgcatctcgacctcaccgataccgcaagtcaggctacctcgttccaatctatcaaaggccgaccaagaggatcttcttcagcaccatccaaatctcgttcgaaaaaacccaagcttacccgatccaagcatgctaggatcgtaatcaatctacaacaagtcagggctgtggtcaagacttatgggttaggttccgaacttgcggctaacatccaagttacgatccaggatttggatgttctcgatcaaatcaaaacatcgacttggaaaaagtttttgacgggtatgcgatcggattctagggggaacactagagaagcggactcgcatatggtctctatcgagctgaaaaacgtcaggccactacctgacaacccctcggaggaaggccgtctcaaggtacgtcgatctattgcaacaggtgctttcgatatatgggtattgttcgactaacgtatcgcttggcttgcatacgttacaggcaaaaattctgcctttaaggctatacgtggaccaggatgctcttgactttctcaaacggttcttcgctttcaaggatacccgatactcttcttcagctcctcctgattcaaaggagacttactttcgtgagttcgctacgatcaatgactctgccttatcaaattgtcctaacataacctttttgtatcgtcttgaatagaacatgtcgagatcttccctgtagagcttaaactggactacaagccgaagagagtagattatagaggtctccgagaggggcgaacgattgaactcatgaacttctttcattttgatggagccgagatgacactgcgcaagattactctcaatggggtccgtcgccctctttttccacacagttctctacattattgttgctgaatcatgctgatggttgtctgtatggcttggtacaggtcactggatggccgcggatctttgataccctcaacgacttatggactccagatgtgaaagcgaatcaactagcagaggttatttctggagtcgcaccgattcgatcgctggtcaacgttggatccggtgtcgctgaccttattcttcttcctatcgagcaatacaaaaaggacgggcgtatcgtccgtggtgtccaaaaaggaaccacttcgttcgtcaaatcgaccgccatggaagctcttaaactcggagcgaagcttgctactggtacccaagtcattctcgagaaggctgaacacgtccttggtggcaaattcggtcaacccatcgaaacggagaccctgcaagacgatcctttacgtcattatagatcagagaatgggggcagtagcgatgaggaggctgatgaagtcagtcgatacgctaatcagcctgccgatgtatccgaaggtatctcgactgcctataaaagtcttagtcgaaatttcaattcggcagccgagacaattttggctgttcccatggaagtttacgaacggtcaggtactaatgtaagtgaaaggaatattttgtgctattcaatgtctgtgccttttgtactgaactcgatcccttcgatctctcgcttttttcagggacctgtacgtgccgttgtccgagcaattcctattgccgtcttgaagcccatgattggggctagcgaagctgtcagcaagactctcttcggacttcgcaacactcttgatcccaatgccattcaagaagcagaggataaatacaagtaattgcatcctttgttcttttaacttattcgctattttcgcgcactctttttttgtttcctatattttctctctttgtctgatttttacagtctcaacattgttgagctttcatagggtttatgtgctttaccctacattccctctttcctgtcatccactgtctttcactcattttttcaccaatcagttgtatcatccaatcacgcttctgccctaacgaccacaatgagtatctagttcatcgtttacgtatttgtttccccacagtccactactcagttttgcattcgtttccatcaaccagcactctggctctgcttgccatttacagtttcttttctcttcgcttcttcaagtttgagatgatttcttcgggatgtttgttgcgatgaatataaccatttatcgtttcgtaattcttagagtgtgaccgcattagtctggactgagagccggtcaagcttcgacgtgactgaagagattagttttgatctgttgacgagagaacaaaaacacatatttagaaaagcgctccacagagaaaggagtatggattgactgatacgagagcaagaaagaggaacattgacttactctgtagccaactcgtcttccaaccttgcaagctggtgtcgtccaagagctgcattcctacaaaacgaaagaacatcattttctcggttagtagaacagtcacttggtgccagccggaatgattcgtcgaccatgaatagaaggtaagagggcagatatcaaacaaactgtttttgcttcatttctttgtgttcgagagctcgagctcgcatctcctccaactgaggccgaaggacgttcaggtgattttcaatctgatattcaagtatgtgatatgaaagattaattcaagttagcaaaatcgatagcggtctgtcgataaaggaggagaagacacgcacggtagcgactctagatctcaaaccgccttcttcttcgcccaacgtctttccaccgacctcctcgttcagttgtctcagctctgcaaaccaagccttctccatatcggaaagcatcggctgatgacgatccatcaatccctgcaacgtcttatcgactcttgagatcaattctttctgaacattcctgaccctttcaactctagcctgaaggccctcctttgatccatgttttgatccaaatctcatcgaagctgtgagatcttcaatcttcatcactttatccatctgtctctcgagctctttgagttgaagatcgagtctggcctgaacagctgagccagcagagagaatttcacgggtagatgaccggaagctctggattgtcttgcctagatatcgaaggttatcaggtgtgatgctttccaatgtcttggtctgtccggacgggggaggcggtagagcaattcgtgctttgagcggaagtgaagatcgatcttcgagtatggtcgggacgacaaacggatcagttcgaaggtaggatgtataatgagacgaaggggatggaggagaagaggaagaaggtgtaggcgctccgagggcgagaggtacaagagcaggtgaggaaggcgtggcaactctgagagctagttcgagggccaccagttgtagtgacgatgttaaagtcagaagagagtaagacagatatacgtcgctgattatggcgaccgactggataggagccgacgttctggaaaggattcgcaaatatacaagaagaaattacagatgagcatcgtcctgaatttttcctctccctttccatttttccgttgatcagatatgattttgaaagtatcaaaacactcactggccatcctctgagaccgaatccactacgcagccgaccaaactaccgactcctcttccgacgaccctccctaattcgacttccctcttgtcctcatcctctagccctaatgccctacccaacggacccatccagctcttcataacgatacaatgcacaccaagcgcatggtgtacataaacggtgtcttcgtacaaggggtccacaaagaatgatggggatgttgctcggagggctgttcggagagatgaaggtagggatctaggagaaggaagcagagtgatggattcgtataccgataatgtagggtttgattcagaaataaccttaagggccgatgaaaggaggacggccgtcagttcaaccctagtttgtaatatatcaatctgttgacaatcatgagatgagcacgtaccgttttgcctccgctccatacaccttccatcttttctacctccagacagacatctactcttccatccttccacacgattcccaacacccctaaaacttcgcccttcttaccaatctcttcttcagcagtcccatcttcccccaacccgaccatgaacaaatccgtcgcacttcctgtcaagtcctcctccccctcctcgtcatcgatttctttcgggggcggatcaaacaagaatggaccttgcacggcggttcttttgagcgatcctttcatgtcctctagcttcacctcaacaggttccccggacgtctcttcgtcagatgcatcttcgatgtcggccgaagggatttgtcggatgagctggtcaatccactgtttttgggcgtggtaacgagcaagaaggatcggatctggtagaacagtcgttatggatgaagtagaagaagaaagtgatggcgaatgtaagaacgatagcttttgagcggtgacagttgacaacgagtagatgagcgatcgtggcaatcgacttgaaattgacagcattgaggcccagaaggcgttacgttaatcatcttattcaatgacttctaacgtttggagaaggtgcatacacaggcacaccaaaggatgagcactcacgcaacgctaggtaggaatgggcaaattccatagatgtctccattttccattagtccgtagatactgattgaaccccaatcgccctcgcccctaccgagcgcgaagctaaccgcctccctactcccgggttcttcggccgcccagtatcctgagtttctgcctgacttcttgtttaacatgggaggtagtagtgaaacaacctgttggggctcctctgcatctttcagaggatcgtactctcgcagctgaccgtccaaagtcaggagcagcaacgaagagagcgtggaggataagggatgccagagtgccttggtcaagggagatgacgatggcgaatgatgataactgcctatagggatagatctatcgatcgagttgtcataagagtaattagttgatttaccgttcttgttcatagatagagatatgaaagggtgccggagaaaccaagtatactacataccggcattcgaccgtcggagtgaccaagttgatgtatcctggtcggggaagaacaatgaccacaacctgacgagatcccagaactgcgagaagtttgccagtaggcgaagggacgagcgacgtgatctcaaagtttagattgggggttcgaagtgtctgcacaaacagatgaatcggattgttcgaaacattcagtaacagattcaagttcattttgaaaagacgaaagaatgaaagcaaagacagaccttgaatgaacctcttcctccgctcttgacctctcccaagctacacatcctgatctcatggtcgacggccactatcagatctcctcctctgacaaccatagtggaccgtttggcatgcttgcccagtcctcctgttgggttggctgctgtcgaagaggaggctacgccgaatgcttgagctggcgcggagggaagagtaaagatggaatgggaaggaagagcagtcgaaagccaagactctgtactcatcttggaatgggtgagagtgtgtgtatggatgtagatgtggatatgctatggctcgaccgataaaaacgagaggtttgatcagagacgagatgacggttgaaggcagactcagaaggaaacatactcaacaccatcagttcgttggacctcgtttacagatgagccctccccacttgacgatacatcatccactcgaacatctcacagagtacagaatcaatgcgcctgacgatcgttcgagtcagggattccttcttcttttcctggttggctcagtcgttggatctgtagcatggagctcaagggtacggtcgattcgtccatacgaccttcttgctttcgaccaacaagaggtcagcctttctttctgttctcactcgcttcatcttgttggtaaagatgatgggttgatacgacctcgtcttatctcattctcataaggtatctttttgaatctgatgaagcttcttttaaaacgaacgatacgtcaacaagcagatcattctacctatgggccttctcctgtttctctctgcagtcttcatcttgatctgtattatactcacacataagtctcttctatccggtaagtcttccttgtggtactcatctcttcgactttatgtctcgtgattgagtgttgtttgcttttcaaaaactgaatatcacgacagaatccataatgcccatacctaatctgggcatccttcttacctcgcgctcgcgttccctcctcgctccaactccaattgagaatgagcgcctgttcattcccatggaagacgtagagcatatagtgatcaatgaagccctatctagattctctgtgattggatttttagagattctaagaagaaaaggaagagagcatatcgttgtcttccctgtacgtactcccgctcccctctactcgctcactatcagaaccaggatcgtaggattttgaccatcgttctttccctgttcttctagacgctactgcctccaacaaaatccatcatcccaatctaccaagatctccaaatcattatttcatccaagtcctgagatctgtcatgttcatcgttctgtctggtgcgtgaatcatttgccaccatcctttcagaactccgccatactatatggcttccgcctattcagccaccgatgttccttcagcgtctttcgtgtacaatgccaagagcatggcgacaagggagaaagatattttatcaaatctatcgactgatgtaaagaagagggatactcggcgtgaggagcgcgcgcttattctacaataggaaatcggtgtggttgtatatcaagagactagtccaactgattttcagtatataaaaagatgaaagaaagataaaaacagatgaaaggagagaaatgtcaagaacaaaacttgacgtgaatcatattactgtgcgaaaaaaacgctcagaatcaacagttgctcagatagagatatcagcgttgattagtccggctgtcaaaagaagggatacagtccatcagaatctcccgtgtgatttagaatgagaatagtaggagataggcaagaggatttgaaatcagacgaaccctgagaagccaaagagtagaagatagagtccttctttgacaacaggttctccggtgtatcaaactctgcaacctgacctttgtccatgacgaggactctggtagaatgcataatagtatccaatcgatgagcaatggtgattgtagtcgtagctgcaaagtcagggcctcgaaggatctcctgtacagcagcatcggtctcaagatcgatctgaacaatcaaattcgtgaccaagaatcagtacgaatgcaaatggcactcataaaggagtagaaagacatacagcggaggtagcctcgtcctgagtcatcatgggcagggttatggataaaacgtcagattgaacctgtcccaaagtaaaaaaaattgaaaaggagaagcgtacaagaactaaaatcctgctctctacagatacaaatagtacaaggacgaagacacaggatgagtttaacatctatatatgaatacatttggagcagactgccaacaaacttacttcgaagcaatgcccgggcaaagcagatgagctgcttttgaccactggataggtttccacctccttcggtgacagttccgtcgagtcctccgttggcctcagcgtatactctaacatagatcagtgtatcagtcagatgcaccagtattgacaaggttatcctgagcggagaactcacttgagatgtgcgtggctcagtgcctcccaaattagcgtatcagtgtattggcctagaatgattaggagaatatcccaaatacaaggttgagagaatagcgatcagatcttcgtttttattctcagaaattgtagacatgattcagacgaaggcctaccaataggatcaatgttctctcgcaaagttccttcaaacagttgaggatcttttttttggcaagcgcacaaagtatgagtatctttactgtatcaaaactgggggatataactgaaaagacataccttgaggaatgatcgaaattttctatggaataaccatacacgatatgagaagagtatgaaaatcagatttcgatgtttcggactgaaaacagacaaacgaacgtacacttcgcaagtcatgtaaaccaattgtgccgatatcaactccatcgatgaagatacttccggcggtggcttcgataacctatcaaaataaattacagcgccgtatgtatctcagtacagttcatcacctaatcatcaggagagtaagaaaagacttactcggaacagagccaaagtcaaggatgactttccagcacccgttcgtccacagacaccgatttttctagaaattgtgtttgcaaaaatatatcataagaaactatcgttcagctataacgcacaagccaaatcagactcactctgcaggcttgatagaaatagaaacatcggagacacaagcgggtaaatcgggtcggtaccgagtagtataattgttgaactcgattgcgccctatttacaaaattcactcatgatttagtgtatactcgggcgtgctataggaacagcatgggacgcagacgaacctcttcgggccacgactctctgggagtggtctccgagatctcgtcaggtgcctcggcatccaaacgggtgtaattgatcatcactcgctcaacggaaacaatgtttgtctcaacctcactggcagatcgaacaacccaattgagcgaaccctgcagacaggtacgaaccaccgatcgacaggttaagttatgagtgcagatgaaaaaattaaacgatgctgataggagacttaccgttacagagaccgcgtaagacatcattagacccacgagaccagcgtcaacgttacgagagactattaaggcaaccacagagaccaaagcagccgccaacatgattaacgatcccaaaaactccagtcgtacagccaaccatctgatacggatttcggaaattgaatgtcagttgtgaagatagtgattgatgggaaaaaatatgcaaacgtaccgattgaccgacacagaaggtagataacaagcgttgtttcggtcgaggaatctgttcagacgataaaagcaagtagcaatgagtaccgatgtgaaataatacacttgagtcgatagaccacatggacctacgcttcgttatgagcagagaatcgagcggtttgggaataagctcggatggaactgagtccacttagagtttcaccgaaccaactaaagatcggcgctcgggacgtagagtctaatctcttcagctctcttgatgaagcaagatagtatcgcataatctttcggtagatgaagaagattgggatcacaccgatgagaatagaaggagctccaagaccgatgacaaacagaacaccgccaacactggctaaagttcggaaaaatccagaaaacgttcgaatcaagacttcgtcctatcacagttcaaacaaaacacaactcgatcaggactcgatcaggactttctgtctgaaaagcagagacgtacgataacatagatatctcttgagaaaacattaagaattcgaccctgaggagttctttcgaagaaactcataggacttctcatcaaagcgcggaaagcatcatcatgaagcttctttgagcaacgaacagcacagaaagtccctgtttcgcaacgaataaccaaatcagtcagttacggaaacaaaaaaccgtcctccatcagatgttgtagaagtctcacaaagcagaagggaggaaatcatgttcagtactgaagcggaagcaccagccagtccgtagaagaacagatagagtccgatggaagctatatgcaacaacagggcaagatcagttgaaccgcactctaggtatatatccgttttttaacattttacgtactagttcgatgttcgacaagattggcttcaccccagttccgcaaaattctgagaaatcgaggaaaatcaaaccattctttagttagctgcgctgaataaagcgcccatgatgaatacccatgactcacaaattactggcgatctgacttccctgagctgcaaacgtagcaaacaagaatgcgcatactccaacaaagctagccgaagagatatatcctttgtatactgaagagctgacttgaccacgctccatagcttccttaggcttagtcgaatccttcatgcgccggatggcctgggtcttgctctccttagcggatctgagtggaaagagaaaaaataagataaggatatgtaagccggaggtgaattattccaatgtgatcaccgagcctgaaaaatacttgcaagaggaccgcgttatcatcattcaagctcatcttggtctccagcttgtcggtcagagattcagtatcaaccatcgtggagccatcggagctgtctgctttgggagtcccaggcgccgagttaggagctgattgttttccgagggtgttgatgagattgaacaaagcggagtttcgctcctccataacctgcagagtgaagctgttatcaacatcttacagcaaccaagtgtgtcgaacaagaatgacttacctgatcataagtatcttgctccaaaacctcaccgcctctcaacatcaaaagtcgatcagtctttgccaagaacgcaacagagttggtgcacaggactcgagctcggtctttgagcaagcccttggggcctaaaacatgctcaaatagatctgcaaatagtcgagcatgataatcagtaaatcgttcatgtatgccggcgatagtgatgagaaacctatgaacttacgagcagcgacatctgaaaaaggtcgcagcaattagtcatcatcaatccagagtgattacagtcgcatatcttgaaaaaagtttccgaagcactcacggttgtcgacagcgcaaagaggatcatcaagaaggtagatatcagctcgcgcgtaaacagcacgggccaaggcaattctcgctttctgtcctccagatagagagactaacagagagaagatgaaaggatatttgacatcaggaaccaaaggtaacaacatgaacaaaaacaaaaacaaaacgaagtctttcaacatacctcctttctctcctacttccgtttggtctcccaagggaagaattgctaaatcaggaggaagcgcacaagcgtctagaactaattgatagaatttaggatctataatagaggcatacctatatgttagtaaacaagccttgatctaagacaatcaacaaacatgtagatgtagaagataaagtaccataggcgtgtccaaataggatgttatccttgacggtggcagagaggacccaagattgttgagagaagtaagcgatcgatcctcggacagtgacctgtccttctcgtcttgtcatttctcccaacgctgctgatagcaagctcgactagatcggaaaccaagaagggagactatatcgtcaaaccagataccaacggaccaagaagaagaagaagaatagacaaacctttccatcgccgactcgccccaatacagcgacaagttcaccctttcgggccacaaagtctactttcttcagagttgacgactcagcattcttgttccatgtgaatgtcccgtttgtgatctcaaccaacgagtcgcccttttgatactctgatggggatttaggaagtagaactgttcggctgtctttctgaagctcttcagcgtctaagaagtccacgagtcgactttcagacacaagcgcctcgatgatggatgagatgatcatagacaacatggccagtgctgttttgaaccggatcagagatatgctcatgagtcagttcaatagcgcatcaaacaccttctgtgtacactcttcactttctgttctttcaaatgtataaaaaatcgagaacatgatactcacggaattgaagcaaaccaaagagcgaaatagccgggaaaatcacatcactcgtcaagggtttcttactcgttaacgaatatgacgagaaggtggcgaacgccacgaggaagggggtagatgcccagaaaaagttgctgaatgcgttgacaataccaatccttctaatcatgacgagttccaagttgtttcggacgtccaagaccttttcagagaaagatttttccctataaaacaaaaagtgtaggaagaattttaaagcacagaaaccgtcagaatggatgcttgattgaaacttgaacataacaaactaaccaagcatagagtttgatagatttgatgtttgataataattcattcatcaatctcgtccttttatccttgatcttcatctgcttgacctgaagcttcttttgatatctgttcgatcacgcaccgttcggtcagttatgtgataagcttattaagcttgataccgagacctttttcagttgggacaataatacatacctagcaatcatcgcgttcagaggcagagaaactaccatgacagccacaccgcagaaagcagaccatcccagcaaactatacaaagattgacgctcacatgttaaaaccgagcctattcaaacgcgttgatcactcgaatataaacactcacttgtaaagcgacacaaacgccaagataatctgcaagggtccagagaagaccatctgtccactgtcaatgaagagatgtcgatgaaattcagcataccattaacaattatgagcaaagtgaaataaaaaataaaatcaaaaacgctgactattgcatcagatcagcgagacgcatagcatcaaccgactgatgattccataacagtgttgagtagtatgaacacaatggccagttaggacagaggtcgaaagcagaagagaaagggagtttgctacacgagcgtacctgcaagttaacgatgtctcctccagccctgccaaccttttctccattgctcagaacgagtgctttcctatagatcaaccagacgattccagtcttgactcgcatacccgtagtgaacgctctgtcaaagtattgatgcaacaagcaggtctggatgacagccgctaggaacatcgtcaaagagatggcgattccttgaatggcaggagcaggcgtcgaagtttgatacgtagcaacgtactgagacccacagcatttacgcgattgtgttagtgtgcagatctctcgtatgaaaacaataatcacacgccgcgctattgggagagaagcataactaacccgaagaagcaatctcaaaagctgaggctgggtgaatgacaagaggtcgtttaagattttcaagacagtcgcagtgaggtaaggccctccgtatgattttgcgagtacaacaaacaaagacggatgtttggccttttgaccttcgacctgtttgacgggatgttgagcatgatgcttaacccgagcggcctcccagtttttatataacttctctccgagaacatcggccttatcgtttggatccactgttgcagatgatagacgattatttgcggtagccatagccagaaagagagatggatcagtcggccgctcagcattagcgaaacttgaagaaacagatagccaagggtcacatacgatcgaatatatcatcttcgtcaatgaatcgttgactacccaacttcattaatggagtcagccaactgaatgtcaagatctcgaagaagtttgccgtcaatttcgggttctctttccagtcgctcgtccctccatcctgaccgtcctcgccctctggcaacttgactccaccactcttctccgggcagagacattccaaactgaacgccaagaggccaacaccaatgaagccgaagaagggcgcccatacgagagcggtgctagggtggaacaggaatccttggagataccaagttcggatcgtcagggcagacgcagccagaaaaatcggccagaacacgaggaggagagttgacgattggcgagttcgagagtggttcacatatgttagaggaatagaggcgagggaaaacaagaacagggtggccgaagacaacgtaaagatcgacaagaagggaacagccgaggtgaatatgatgcctatcaagtgaaggagagccaggatggtcgtgattgatagaagggcctgtggagcgtcgaatcaaagatcagccttaccgtcgtcaaatgatcatcacagcaagaagtaccctttcttgtatatggtgtgccttgcaagaaacgtgaacgtacagtcttcgcgtataggactcttcggcttctaccaactcttttcttcgcagtctgcgtcttcaataatcggagggtgagacccacagcggtcaaccccgcgatggtacacaatccggctctaagagcttcctcggcacaaggcgtgagatcagcctgtcgaagggaggagaacggaccccaaccttcactcgaagggcagaacccatcgggtttggcatgttggtgagaacgagtaaccaagcgatggacgctcgacgaatcgatcgatgcggcaagggacgaggatagattgagatatgacgggatgaacggatgaatgttgaacaggggatcgatccacgattggaaagaaggatcgctcatctcgactctatactcctagataatctttatatgcaggaactcttgactccagtatgagtctttgtcagtcgtgtagatgcctttttcttcttctcttctcctgttccctctgtcggtcgatcgaggaaagaactgaaacagacggaaggagctcgccaaagaaggcaggatagaaaggccgatatgcggctgagtaataattgatcaaaatgactaattggcgaactccgaaaagctgtacttagtcagctgtttagaacccttcgaggtcggctacacttcatacataattctgatgaacgtatcatcaaactggtgaatggatactcttgacggacaatctattgacgtaggtgtcaggaataggtcagtggcttggaggttgagtcgtcttgagcgtctcctctgatggacagtccctaccttatggggtacagaaatataaagacagccttcttgctaatgatattgatcggatgcgtgcagagactcgatatccaagacgaacatatatactgtttcacatgtatcttccatagagaatgttggaacaatatggcatagagaacaaacttccaacctgttgaaatccctctgattaatttttcggaggacatgctacctccttagacagcttcccaactgactccacaaccacacccactgcctttcgcctgagggttgtccttgattctgaatgccgagccaataagctcggtcgtatagtctactttgcatcctttgagaagcttgagtgacggcgggtctatcaagatgctgagtggtcggtctgatattgattcggaggagagtgaaggaaatgactcggatggatatggattgaagacgctatatattgtcaacagaggtagaagtcagcataaaggggacagaaaagacgatcgatatatgctccagtgaagaaaatccgtactaatcatctagctctttgtcattcgtgaggtccatcttgtattggtatccgtgacagcccccactgtccactgcgactctaaagtagagcgttgggtccttctctcttcgtgcgatcgctgtcagcctctattgaatgttgaaggttgttccaccgggtataggtagtaaaagaaccgagagtcacatagaaaatggccaaacctcaaacggtcagtgtttctgttcctcaacacaacccttgggctgggtacaaagaaaagagaatctctcgatggagaagaacgtacgttccaagctgcttccgaaacctcaatccgtgcctcttcccacgggactagctcagcctctactccattctcttcttccatctgcttgatggcttcttcactaggtggcacgacctcgatagaccattttgaaggtagagttgttgtcgatattgatgtcgatgttgttaacgaggatgctgtagagaatgtggacggcgagggtgagggaaaagaactacggagagctgtgatagcaaatgaacgagaggacaccgtagccaatggcttgagccaggaagagcgggcagtacaagaataagatgatcgagaaaggattgaagggttgacggatggtgcaagggtagaatgtatcggtaagaatgctcgagcgatcgttcgtcgatagacgagaaatcgagggatgctcatggctgattaatgtctgacttggtatcaaacggttgtgtgcgagctgttggagactaagattaaaacctgatgtcttgtgtatgaataatcgccagagaatggaaaagatagagaaatgatgtggtggtagatgaaatggattgaaagaaaggaattctaatggaggtctctaatcacagttcgtcccgtgccaaaacggcccaattaaaccggcccaataaacatcagccgaatgtatcaattatcccccaaaccttcgccgctacaaaacgctatcttttatcattgttctcattcgaacccagagtattgacaagataggcttttaagtcgacatgtgagggtttgcatcgttgagttcatgctgtatgtactcgcgcggtgttgaatcggacctcattcacgattaacgccgagcagatatattggagctgactctcaccgcggtgcgctcatccgctcgtggttgtccaatcgtgtcgactcttggcctgccatcatgtcctctgccatcttcttttttgtttcgtattgggcaacttaactagtcgggctctatataaagcatcactagcctctctacaaattcttggaagtctgatatatgccttcccatatttccatcctttgcacttgttatcaagtttatatttctctttgtcgttcgtcgcagtcctttcacaacgatctgtacttttcacttttgatgatcgtttgactacgaatatgtcctaagctaggtttcatgagcttcctttgtccactctcattcttctcgatctatcgcagttcggggcacttctagtgtaccacaatcgagagagcatgatggctcgttgtagttctgttcctcagccgagtcagtgaacgtcatcagagacccgtatgtttgacattcgcctctcttgaaaagagaataggtcgcatcaacgagcagctcaagatgtttctaaaaaaattattgtatctgcatcctgattcagaaattgttcttcaataaatcttccagccctgccaatgaacctgctcaaaagatattggaaagacgtaaaaacatctttttgagaaggaaggacaaagagaggaggagtataaagtcgggaagatacctacgaagggagaaggttggttttggttttacttgacaggagattgttttcgaagtcgaaggtggaaaacggtttggacattttgccgcatctagacggatcagatatggtcaagcagaagaaaaagataggaaagatgagttcaacaaacagtgacaaatgtggatcctaaagaggaagaaaaaggggaaacaatacgaacagcgactgcgaaatgcctcatccagtttgcccttctgatcctcgcccgtttcacagggtttggttcgaaccactcgtactttttgatatcggttctgatcgagtttctcgcgacgataccgttaagtttattcatgtgcctcgtggcggttccaggctcaaataagaccgttcgtccagtatacggcgtggcaggcttgatgtttagagcttgcctctcagcagcggtggaagcagacacggtagaccaacgggtgaatggatctgccggcggaggtggtggaggaggagccgggatagatagagccggagatgacacagagctgtcgaacaaaaggtcaccagccgtggaactggaagggaaagaagaggaggaagccgttgaggatgaggacgatgagggcgaaggagcaggggtaatattgatgctgaaaggcgtagcagtagagacagaatctgctggagggagagaagcagcatcgacagacgaagaagcagatggcttctcatcttgactcttgttcaaggactcgttgacttcttgcttcacctcctcttttggttcttgcttcgagtttcggccaagaaggtaatcgagaccccagagagcttgacgagaaggcccagaggagatcgatcggaaagagacggaagtaggagaaggaagggatgtccggggtcgaacttgaacgatggccggttgaaggaaccgacggccgcaagatgcagctagcgcagggaatcgagacatccttacttgtgtgtttctagaagagatgaagaaacctttttgaagaattaatgagccaaaagaaaacaggataaagtaggtgtacttcccggttggaagcacctattctctttttctttacccttcgttaatggttactcgaagtgggcgtgacagcaagggttagtaacaggtatagattcacacagcccatgtcacgctttgctcaacgccacatgtttagatgtgagctggcatctgttgatctttcatctcgttttctagaagaaaaagataaaaccttgcatctccatcacctcgaccattctcgtcttgcctttctttactctcttcctatctcacgttcatcgtaaagaatcatgaagactgtttctacgcttgctatcttgtccggtgtggccactctttcatcccaggtggctgctgagcctgttgagtttcaggtgggtgttgacttcgttgttcaacataaagattatacagtgaaagcagttgagatgaattgtcaaaaatctcacaaacgcttcgtctcttgtttataggcctctacgatcaaggctccttttgttgagcagttcactcctgagtgagtaccgaaccaaacatagtccgaaagcaatcatctcgtcctcgatctgaccacggtgctgtctttgttctctcttgttttcagctggcggtcccgatggtccccgtctcacgccacaaaaaagtctcctgtaggctctggtgagacgttctcctacgttggaacctggtcggtcgagcctccctcagtttacccaggaatccctggtgacgatggtttggtcgttaagtccaaggccgcccaccatgcaatctcagccccgatcgagggtggaatcaaggtcgaagagggaaagcctttggttgttcaatatgaaaccaagttgcagaaaggattggagtgtggaggagcttacgtcaagcttctctcgttgggaggagagcaggagggtgcagagttttctgacaaggcaagtctttgttgttctcacactcattactcgtcaagaagctcgaagcaagtactaaccagtacagctattgtctttatactcacgaacagactccattctctatcatgtatgattcttggttatgatcttatacttggttgtgttacccaactaacttgatcttgttacttcatcaggttcggacctgacaagtgtggtgccaccaacaaggttcacttcatcttccgacacaagaacccggtgacgggcgagtttgaggagaagcacctcaaggccacccctccccccaagatcaccaaaaccaccgctctctacactttgatcgttaagtaagcaaccaaagagaatttgtctcaggattacaaaagtcgtatactgattcttcttacctctggtacagccctgacaacactttcgagatcaagattaatgacgaaaccctgactactggatctctcttggaggactttgagcctgctgtgaaccctcctcgagaaattgacgatcctgaggatgtgaagcccgaggattgggtggacgaagccatgatcaccgactctgatgctaccaagcccgatgattgggacgagagcgccccggcattgatcactgatgaggaggcaaccatgccggaaggatggttaatcgatgagcctgatttcattccggatcctgaggccgtgattcccgaggagtgggacgaggaggaagatggtaagtggttattccattcaaaccctgaaaacaaaaatcacaaccttttatcagatatactgactggcccttcgtttacttgtgttttgacaggtgattggatcgcacctcttgtgtccaaccccgcttgtgaggaggcccctggatgtggtccgtggaccgctcctcagattcctaacccagattacaagggactctggtctgctccgttgatcgcaaacccggcttacaagggtgtctgggctcctagaaagatcgcgaacccgtccttctttgaggacaacgagcctgccaagggattggagaccatcggtggtgttggtttcgaggtctggacgatgaccgaggacatgctatttgataacatttacatcggacactccgtggctgatgccaaagctttcgcggacgagaccttccacatcaagtaccctattgagactgccgcggagactgccgctttggacgaggatgtcgaggataaggctgttgcccgaaccggactgagcaaagtcactggcgtcatccaggacaggatcgattttgttcgagacacctggcctgaattctttgaggaagccgtcaaggattggaggagcgctatcaagacataccccgagtttttggccaccgtcgtcctttctgccctcaccatccttgcaacccttgccactttgttttcgtccctctttggaggagctcccacgacgatccagtcggcgcccaagacaaagaaggttgctgtcgtgcctgctactgaggtcgagcccccgattgtcggtgtggaagtcactgcatccggagtagagcgacgagaggaagagctaaagcagaggaagggcaagggacgagagctctaaatgaccgaattggccttgcccatgatctgatcctgctttctctcccctttttgacgtctttgttgtgtttatgttttcatgttttcaagttttcgatcaaaatatatcttgtgcttggaccgtcttgccgtttctttgctctccatatgacgcgttgttcgtgtttctcttgatcatttcctttcgtttcttttgtccttattttgggagatcgggcctctgtcctctttatttttctctttttacccttacaattctcccttcctcccagtagcttatcatgtgaatgaagatgagaatgcttgataaaagttgtgtgaatggtctgatgtcatgtgtgaaacaaggagaaaacatactagggactatgcggcgggcaggttccggaactgattgcccgcttgtttttttttgccaacgtttctttttcttttcatcccattctctagttcagttcatctcttcaatcgtgtagccggtcctctttgcttttcaacctttgctctctttcattctttttttttcttcctcttctacccctttcctttctttctctcttatagaaacgatagcctgctatttgtgtcacattaatctaaatagatctgcacaatataccggtaagtgttttccttcaagcaactactctgtaccctcggtctgctcgcatgtggcacaaaaggggtattccatactctggtcaatgtgccatgcttgttgcaggaatgcactccaaggctttttagcaaggacatcgcaccatacacactcgcctgtaggttggacacgcagccttgtgcccaggaatgagatcaggcaagggggagcaatgtgggaatgaattgattagcttgcgtttttgagactgagctgatcgattcggcggccgatcaaaccgatcgagtgtatctcggtgtgtctgtgtgtgaagggtctgatcactgacttttccttcctcctcttcttttctctgtgtgtgtgtgtgtgtgt

SEQ ID NO: 107 - DNA, 12450 bp, Xanthophyllomyces dendrorhous
tgtgtgtgtgtgtgtgtgtgtgtgtgtgtgtatgtcggcacatatgcttatctgtgtgtctatgtatatgtgtctggttgtatccatggtgaaccaaacagggacaaaatagaagatttggattgttggtctctgttcaacttctaggcatcatccatcgaccttcgcatccacaatcgtgattccggatacctcgaggcatgttcccagcacttcttctggttgaaaattagttcagtctccaaacgcttccttctcactaaccatcgtccttgcccttgctgtctcctgtctctcgcttcctctcctccttccttctcccttcttccctcttttcatccttcccctgaaacacagctagatctttgattgtgttccttctccgttcctgacatcctctcgatgggtctatttttcaagaggcgtaatcaacctacgtcctcgctgaacaaggacgcgagtctctctaccagcactggtcatagcaacacaaacaccggcaacgctacgcaggtatcgacttcatcagcggtgtaccttcacccgttaccaccgccgccatcatcgatctctacccgatcctctttttcgggcagtccgtcgtcgtcgtccttctcccccttgccttcacctcgagggcccctgaattcaatcccattggacggtcctacagaggttctccgatcagcgtcatacgcccagtttacttcacactcatccttgtcggtgaacgaacaccagaacggattgagtgatgactctcgtgaaaaagaacctgcatatacccaaccatctcctgtgcattcaacatttgtgctacctgatctttccctctcgcctccaaagttggctccgttcaggttgtcaagaagctcgctctacgtggacgacagtcagagttcgttctttggagaaggacggtcgccgaatgaaggctcgacctcgttgggacttcaggtggatatgaatcagaccgaacgtgttgtggttgaacctgaacggagagtggacgggcggttggataagagaaagtcgttcgatgtgacatcgagaccaaggtacgagtgagtgcatacgttctatgatttttgtaatcgaaaactcttggatcaacacactgacatgcatacgtatagaattaatccgccgccggtgagcgcgccgataccctctgttacccctcgaacacctcttggccctcctaccacttcatctctatcattgagtccaccacgaagccatcctcctctccgaacgaccccttccttcccgcttccagctcgaccaatatctcagagtcagccgatgctaacccagcgatcgtcgacccctatacttcgattgcacgtcccttcgtcgccttgtcaagaggacgaagatactcctgtctcgggaccttcagcgtcaacaacatcggtcctacaaggcaataaactgaacggccgtcgtcggtttttcggaatgttcggcgaggggaacactggtaaagaaggctctgtcaaccgtctcgcagaccctccttcgactcggttcgaagatcttactgctcagactgttccgagctcatctcctgtaaatactacctcaaaaattgcgccctctggaaccacagttgctatcccccgaccgttaccagctcagccggccccaccacgaccatcaacatcattcttcggttaccctctgaaactgggacattcctcaaagccatccgcttcagcagccgctgaggatggacgaccgccaagccccgcagaatcctttaaggttatctctgctaggaggattactacaccggacgatgtgaccaaccacttgtcgtcgtcatactttccgagcacaaacatactgacgccacctgtatcggcagtctcgccagggccgggaacttcccttccgcccacgtctgctacttatccggggctcaggatagaacaacccggaagtcagttaaggaccaagtcaaacgagtggtctagggccagaaaaagtagttacaactcagtcttcatgccggatgatgaggaaggagaggaggaggaggaggaaccgatggaggttgttggagaacgaaaagtctctgtgggcatctttagacgaagaagaagttcaatggggttggaagatctagcgagaggtactatcgaaccgagtgagaagatcgaggagcccgataaaagaaagaacggcctgccgaacgtcgggtcaaatgctgggggtgaaagcaatgatgatgatgaccgaccattggggctgatcagaaaatccgtcgcggatttctcagaaattagtgccccgatcccgagggccaacgctacgcgaaaggatggcttcatcgtcgcctccagagaacgaaggcagagcacgttcacagccgacgaatcggacggtccacctactcctgcgccttcctctacacccgtcccggtatccgctccctcaacgtcgataaacccccgtttcccaccttccatgaccctctctgctccttcggctgtagttcctctcccaaaatttgcagatgattggacgcaatctccatctggaattgatcatcccggaacttcgttcttcagaccgtccaggtcagtctccccttaccggcctctaccgtcgccaaagtccgagtcatcttctccaggtcgaccttcgacgaacgcaatacccagacggtcgagtcctttccaaccgcctttgcccgtagaaagtatgtctattggcaactcaccaaaagaactatcgaaattccaagggccatacagcgtatccaaaccggccgctcctctttctaacaaaaacgcgcgtaggtcgtctgcttccactgtagactcggaaaccgagtcggagagcgacagcccaaacgaggaggccgagttgtcgtcggcggatgctcatcattattcaaccgctcgaaaatcggtacctgctcttgcctcacccgggcgcaacgttaagaattcaagctccacggctaacttgtcgagagtacttcctgcccgagctaaatcgcctgcaacgtctatgctttcatctcgtccgaatgtctcaggccgattcacccctaaaccactagtgtctctcccggataacatgacaaagccacagttggacagagaacgctcacttgctactcgaagggcttcaggtggggatatcgatagatcaatcgatgcaagggacactctgcgacctcctacgtttaaacctgttcctgcgcgccgagggagcgagtccgtattaacaacatcggccaatagattgtctgcaatggagatcgatgaggatagcgatgggtacgggcacgacgatgatgttgtggctggccaacgtttcaagaaaagctttttgatcacgaaacctggagcagtcgttgttaatggtggggaaaatgtagagtcggcttccaaacctatatcggggctcaagaaggacaacaaagcaaagaaagtatctgcagaggtggagagcgattcggatgacaatactccgttgggaatggtctcccgtaagcttcctaccaagccgacaccaggtcctgtcccttccgccagcaaattgtcgctcaatgtgattgcttctacgcctcaagccgaaggttctgctcggtcagccggaacttccacgaccaccactactcctaccatcaagaacggatcaaaatcaaagttgacatcaacctcaacgtctagctcgaacgattcgttatcttcccactcgtcccagccctcggcctcatctgcactgaacttgtctgggagagtaacgaccagtaccactgctcaaccaaaatcaattcttcggaaaccgtcggcttccacaatatatattgccaacaatgaccagaagatcgcacaatatcgaggatctcaatacgacgttccagttctcaatcaagccaagccgccctcatcctctttgtctacttctccttcagctaatcaattcactcccagatcgcccaacaacactgagtattcctctcagggatcggccgtccttggaaacccaccccggccggcgtttcacaattcctctcaccagatgacttcttcgccctcatcctcatgcgcgtccgggataacgactggggattctagctccggtcaaatgccgatgactccgaaagaagtgtcattggacgacatacagaaaagtcggcatattaaagaggttggaagtgttaaagaactgggattgggaaaatctggtctgggagagggcgaaagtttggatgagaatgagattcagaagagaaggaatgagagaaggcggaatgaagcgagaaacgctatcaaggtacgttctattcacttttcatcgttccaagtgtgggattagttctaagtctatttgtttcatattctcccttatgatatctttctggcaatgtagctcggacagattgttaacggtacccagccgatcgaggaaacagacgatgatgatatgaccagtcgttatgctcccgttgatcgttccgcttggggaggtaatatgatgcaccatcctccctttccgatgtacccccctcaaggattttatccatctatgcctatgatgaatggggatccgatgatggcattccaaatgcaaatgtccatgcaggctcagcaggctcagatggctatgcagatggcgatggctcagatgccggggcagcaaggagaccctcacatgcagtaccaggcgatggttcgttctctccactttcgttgatccgtttgtcgccctctttctgacttgtgtgtgcttctacagatgatggccaaacagcagttccaaagcatgatggcagcacaagccagtcagctcgcagctgatcaatgggagacgatgagcatgcatatgggaggtgccgcttccgagatcggagggcccacatcttctttgcccagaaactcgatgcgaccgatgggcatgggtgtgcctttcggcgatagtgtctatggtgggggttatagctcgtctgcttatggtggagaagactcgcatcgacggggtagtgcatctgcaataggaggtggaggacctgcgatgtctggtgggaccgctggaggacattggtctgggtctagatctgaatacggagattcttccagacgaagtcgaagtccaactcttgtacaggaaggctcggccatgaggacgtcatcctacgacataaatctatcagttccttcggctcagcctcgatcgcgccgaccatctggctccggtgtggctcggttggttgatcagattccctctcaaccttacgctcctccgtcctcttccgtttcttcatcttcttttgcgcctgcgcatcgacctataccgggtcaacgacagagttcttcttcaaactctcaatacggacaaccaccggatcgatctggcatcttgggcgaatcaaaacaacctcgagcttctttgcctgatccatctcaccagcagcagcggtcagctaaacaccgaacaagcagtggttattcgctctcgatggaacctccaatggctccatttgcgaaggaggaaatgcgaagtaggtctccgggccgagttagtccgagaagtggttcgccggctggtcggaacccacccacatcttggagaggccctccaacttgattttatttacaactttcattctttcaagttttttctctttttttttccttcattctcgcccttgcgtcagacatcttttcagttttgcacatgacaacttgtcttttcgcaaaaggcctagtctcttctatatatcttgtttcaaacaccatattgcattgttcactcctttcttacgttctcatcattcctgttcatctgctttcgttttctttctttcctgcgcgatgcatcaccacggacttttctctatttttctgcttgtagaccctcattccacattcactctcattcgttcagccgttggacggttacctcaaagcatgcctctctttccgtttctttttctctttgttttctgcatatggatactctcttggttaccaattgttccccttctctccttttgtatacgttctttgctttgtctctatttcatcgtttaatcaatcttttttgattttgtcttaccatttaggtctctattcattctcttaggaaggaagaaacaatcacaacactcggcaacgagagaaagaaacatgtatattcctcctcggactaaaaactcgaaataccttctgtttctaaggaccgattcccatctgtttgtctatatatcacgaccgaaacctggcattagtcttgtgctctcgtctaaaaaacttcctcaagtgagaagagaagaggaggctgaccgtttgtgcttgagagagatttgcgatactttactcgacaccttgtcttttgcccatcgggcggatcttaaagctttgtattgatatttgccttcgtgctgtttccgtgacattcagggtcaatcaaggaagagaaggagttgttagcgagcaaagtcgcgatgaagatggcgatgataaggaggaaggatcggaatggaagaaggttggggaaacgtactgttattcttttgtttgaacttttactatagatgagagttttcaatcggccccagcccaagtcgagaacacacaaaggtcaaaggttaatgaaacccacacacacagatatgaaatgaatgagaggaagaaatgggaggcgtacgagctggtgccatcgtaaaaatcttcttcctcttcttcctcttccttcttcccgccttcgccttcaacgctagttcggccatctgcggcgcctagtgcattttgttctatatcatttgtgcctatgtctatacctacacctgaaagcgagcgatttgagatgtaagaagacctgtgatctctttggaacccgtttatcggcgttgtgttcgcccctgatatctcgtctgctctggtgggttgtacggagccggattggctcttttggctgatacgactgtctaaacgctcgaggggttcgacctccatcagttgatggcttggcatatccgatgtcgatcggagaacatgctgttttataccaagtagggttgtcgcttgtttggctataagagtttaaaaaaattaaaaaaaaataaaaaaaaaacgtcttcgataagtatagagtagatgaagaggtgtgaggacaattgggcttgccttcatgtacgaggttgagcgatcggtctttctttagtaaatgctgatgcgccttgatttaccaaaccccattcagattgattctgtcagtggtttgaaaccaatcgatcggcatctcttcataaggactttacctttcccagcccaggtctcaatgatatacctagaaggattacgccgatctccttggccctgttcgtctcgtttctggcatctttactgaatgcccagagaatagcttctgctgggtcggatgttgcaaatatcgggatggcaacgttcataaggacaccatcaggtacgtctacaagtctcaatacaccgataccctagcaggtagtgcgaaagatatgttcagctgaagatcacatcgaacctcttaagacaagtcgacggttgagaaaagggtagaagaacctagacgtacccaagtagtcgtttttcgttttattgatccttgcttgtttgagaatctgatgatcattgaggtcgagagtctgtagcagaccgccaacagaagcggtggttgttggatctcccaggcatacgttcccgaggctatcgcagaatttgcactacccgatctccgccgcgactcgttcgcgttcgtagattcggaagctgctgaggaggaggtagcgtaggggtcgctagagattgttttggagtctgattcagtatcgatcgttaccgaggacgaagcgatgtgttctgaagggacgtttgacaagtcgattgctttaactgaatgtatttccgcagagactatatcaaacccgctgattcctttagggaggctgatgtcaatgggtttccatagtagtgaaagacgtctatttggggaaagaatggaaaagacgtgatcaggtgaatccgtcaacgtgagtaatatatgcatgttcaactcttacaggacaccccatccaatacctccagcctagacaaagacagaacattgtcgattatagcagcgtattaagtctctacacatttcaccctgaaagcaagagagaaaagtacatactagaggataccacctataaaaaccaagcgaaaatagaatgcattagaacaagttttgaaccagcatcatagaaggacgttacacacctcgtgacttcagatttgtttccgaacacatcgcccagagttgaaagatcaattatccctaaagagaattcgatcaagaacaccgaggttagaccactcgatcaacaggaacgtcgttcgtgggtattcagaagaaacccctctctcaccaagaatagggtcatgttctctatctctttcatctctgacaacgatcttgagtcgttccatggtccaatctctgatgaatctttcggaagcagcattcacatagggcgcgttgttatgtcgtttcgttcttgttctgaacactaatcgatcgttgaccagaacctgacatccgaagaaataatgaatagattgatgtgtcaattgtgaagggtgtggaaacgggatcagagatctgacaaacctcgacataggatgaaaccggatcttcttgatcagcctcggtctcttgtttttcagccagcgcaggttttcctccggctgatgaccgagcactcttagtgaattctccagatgaaggtcggacagcgagctctggtatcgggtggaaaatcatgcgcgcaagcgttaggaattttttcttttgatgcatatatgtatagaaaaatggatttatatacctgagagctggatgatgttccatcttagaataccacctatccgatatgataaagccacccatcgttgtgagatatccatatgccttttgtgttctagattttaaagaaaaattagggaaggaagaagaatcaaacttacttcgaaatttcttatcgagggcgagatgattttcttggacctctctgtcctttgtacccaatagccatctgaccgcgtcctttctcctggcaagtctttctgtttcccactcgaagggttcaggtttgagaatgtccaacgctctagtcgcccattctgtctttttgaggatttctcctaaatgaaccaatggccaggctgtcgtcatcatctttcttcctacatctctttcttcctgaaggaaatccttctcatcttctttcgtctccgcggctagctggtttgctgacatattttcgtcgcctgtagcctgtgaagaatcagcctgggagggcccatgagcaaactcgggatcagtgaaggtggccaaggggtagaatcgaatactccattgaaggactccttgtggtcgttgggatgacttgtgtctggccggttggaagggtgaagagaactgatcaagttgatgttcgtctgttgtgggacctcgagaggagtaaagcttgtctcctcgggagaccatctcagccaaatcaacttcgacgatgcctagctgagagagatgaagaagatgtattcatgacggaatgcatacaaccgatgtcaggttaatagagaacgttctgtttctcttgatcggtttgaagatggatgggtataggaaagattcaagaaaccaaccgaatcgtctgcgttaaacctatctgaatcataaagctgtagcacgagtttttctccagtggtcacggcatcgcccggtaccaaaactaggtaagaataatagctgattaattaggtccctcttgttatgagatctatgtttagttgggaacgtttagaaactcactcatcgcagtctcttcccagacaggattcaatgttttgagcagagtcctggtggagaataagggcttgttcaattgttttccccatgcgatggcgatgtacgggtcggattttcctagatgagcatatgggaaaagagcagatgagaatgatccatgaatatacagacataagaatatgaagtcgcgcaccatttggatcggcagcccgaatgttctgtgcgctgtggagtctaatcatgaaaatgccgatatttttcgtccggaccatgccttcttgtccagagaggattctctgttttttgtaagccgatcgtttagttgcgtataaccagaatgaaaagatatattctgcaatacaatccagcactcacgtccaagtctagggtaaaacattctggttttacgaatgccttggctacgcgcgtcatactggaatgatgacatgagaagagagatcaatatcgaaggtatctgtctctgaatacaaatggacagtggaacgaaccagctaagaacatagcttcgaagaccgggaacgactttgatggcattcatggagccgagaccgtgtcgtttcaatggactggcggcgatatctatcactggtagagtaggaaagtagaacgttccagttcgaacaaaaggaggagatggatcaaggagtagacgcaatcggaggattccagtgacctggaccatgtcaatccagacggctgtgtgaacgaaaagaaaggcaaacaagaaatggtaggagatgagatggccattgataggtttgtagggagagtggaggacctacgcagttcgactcctccaaggcctttaagaccgactccaaaatagacaaggatgccggccttgtttgccggcttgtcgacggcggaattaagatcaaacgaaatctcgaagctctaagagatgggtggtggtcagcatttcttggcacctacaagagtttctaggtggatggggaaggaaaccccaaggcttaccacatagctacctccttgtacagcattcttcccatcgagctgaccatcgttgggtctgtcacccgggttgtcgcctcccatcccgtccccccactcgtggtctgtcaacggtctgagccagttgatcttcatcggcttgcttcccaagctcaagctctctacccggacgctatgaacgacagcaggacattcgagctgaagcgtatcctcgagaagatcaagcaccggtatgaagagatcctggttgatcatcggccagagtgcttcgatcgcatgattcacaaactctggaggcgggttcgaccgggcggtttcggactgggtctgttgaaccttggcggcttcgatctgttcctgatgaatatgtttctccttggcttccaggtgaacgatatacagagcaaacgagacaaagctcaggatgatccatggagatagttggcagtatgctagaaaggctagaaaggaggagaacaatatatgaggtatggtgaggttgagatgagtgaacgtagagtagcccatccttttcctttgtagattccagggccaggtagatggaagtgtgtgagcaactgatcggaactgtccaagcttatgaggtgtctgatctccttcttcccataagcatctctgtgtcttccggtcgacctgtacggaactctattggatgtcaaatggattcggttgatgttggtggctatccgttttggtgccttgagggattaacggctccggccggcagggcaaccctaacacagtgacgtcagcattgctgcgcaaggatacttaggcaagcggggctcgatcggatatttgatatctgtgtattcatctatttgtggccacccatctccgtccctccatttggccatctcatgatagccagctcacattgctggcagcgtacacgtatacatacacatacacacacacacacactctcacctacctacatctatcaaagatgcctaggctgatcagatcactcgtggtgctcggcctgacgttcatctcggtcgtccaggcagggacgttccaaaaaccggtggtggagattgggatcaaggatttcaaagacaaagttctcaaaccagatgttagaacaaacctacctctcttgtgttttgtcctcgacagtttccttactgatccttcgtatcctcctttttctgcttacacatcgcacttagagaccttctatggtggtgttctacgcgccctggtgcggacactgtaaaagccttgctccagagtatcaagccgccgctcgaggactcgacccgctcattccgttctatgctgtcaactgtgaagaagcggcgaacaagccgttgtgtggccaataccaagttcagggattccctaccatcaagagtttctccagaggtcaccgatctccaccaaaggactacacaatggagaggaagaaaggaccgttgggaggttacgctggtaatttggtcaccgacaaagtcaaaaagcttagagttccgaacaagggtggtgtaggcgcgaccgaaggactcaacgaggtccagggttttatgaacatggttcgtcgtccctcgttctttccttcttcgcctctcctgagtttccgca

SEQ ID NO: 108 - DNA, 2268 bp, Xanthophyllomyces dendrorhous
gtatatatatacgtatatatatataatttaacttgaaaccccttaggaggacaccaagcctcatgcgctcctcatccacccggtttctgcaacaattcctctcatgtggaaagttctctctcaggtacatgctggaactagcttcgggtacatccgggatgccgatggtgagctcaaaaaggcgctcggtctatctgcaagcgagggagatgataaaaagccaaagattcttctctgggagaagggtggtagctctacagaaggctggaaactctacgaaggtctgtttccttcttttcctttcgctgattctgttgtccctcttcctaggaaaaaaaagaaaaaaaggaagaaacaacgactgggaaaaaccactagattgagtgttgttccgacttaagaaagattcgtttaaaatccgtttgacaggcctgatgaagtacgatcacctctccgcccatttccttggcacgtctcctcctccctcatcttcctcttcctcttcatcaacccgatcctccccctccgtatctgcgtcatcttccgagcctgcgtcatctcctccaccgaatgcgatcaacctgagacgagcagaagaacgcgcaaaggcagaagcgaaatgggctgccgaagaagcgaaggacgcagctcgacgagctaagcttgaagcaaagaaactcgcggccaaactcgccagagaagccgaagagatcttcagccctgaaccgactcctgaagcggacggagatagaccgacgggaacaaagccggagaaaccggtcgtaccagaagtccctgcgagaccgagtgcgattgtcgatgaagactcacaacctgccgccgagcctcaagccgctcggtctccttctccttcttcttctgaaaaggcacatgtcgctgatgctgatgtgaatgctaccgctgccgccgctccggaagaaacgaacgatcgaaagattctcgactctgcccaagaatcgcccgctcttgtggtcgatgaaccgataggaggttctcacgaggaggtcatacccgaattcaaagtcgacgacggaacagtcgacgttcctccgatctccgaggagagaaaacgggacgaactataaggacgaaaagtaggttgagaacgagaaaaagagaagaaggaaaggtaaaacatatagcgtgtcgatctttcttttcgatcagatgttgttttgccaaaactcttgttttgtttctacaccaaacgcattgccactggtttagctactcagtcagccagtcgattagtacatgagaagtatcttggaaaagatgttactcttaagaggagatgaacaatcaatgggttttggaaaatagaaaatcgacatgatacatagatccagatctcccattgaaataaaagggggtgcgtggtttttttttggtcttttctcgattgtgtaattgcctctccaagaactgtccaaagaactaatcttcgaagcatggaaacgacttgatttgggaaggggaacaaacgcgcatgacagatttgaacatatgggtggagacgacgggggatgaaaacaaccatttagaaagagatggcggctcctgagaaagcacaagtacagaggagaaagaaaacgagcagaagaaaaacagtccaacacgatatatgataatacatccaaagaaaagaaaacaccaccgatagaaacaacatccgaaccaaaaaggaaacaagtacgttaggaacataagaagtgaaccagagaatatatggacaaaagacgaacccttggtcttcttgtctcctccaagctcgaagtgcttgcatcgcttgagggtcatctgcatcttgtactctgcggaaaaaaagagagaacaccgaagtaagatgtctgtttatgatgtctgtagttgaagttttggttggaaggaagaacgaactgcagacggagcactctgtttgaagaaaaaaacgacagaggagcataatcatcaaaagtctgcatacacaagaagaattcaaaataaacaaaaacgtacccaatcgaaggacgaccttcttggtggtcttagccttcttgtggaaaacgggcttggtctgacctccgtaaccggactgctttcggtcgtatcgtcgctttccctgggcgaagatggagtcctttcccttcttgtactgggtcacctacagaaacagaaacaaacgttcgcaaagaacatacaaggaggtcatcagggaatgtggaaaccgagagcaagatgaactgaagaagttgggcagggtggggt

SEQ ID NO: 109 - DNA, 10840 bp, Xanthophyllomyces dendrorhous
ggggtgggaggatgtgatatgtaccttgtgagggctaaatacaggtgtacaatcaaatttcacaggtaagtcacttgtttcaaaacggacgcgttgtccagtcgttgacaatataccatgaaagagtggagaggatgagcgacttacgtgtgcttcttgcaagccttacccttgcagtaggttcctatgaaagataataaatcaagccgtgtaagcttttccatacgtacaactttcggatcctcgaatccaggccggagattcccttccaaggcgagccatatcgtccagtttgtcttgatcccactatgatcaaacaaatcccgacttcttctgatgagtcctccgccacgtgatccccaagttccttgaccggctaagtcttccaaatctgtccatcgactctttcccttgaaactgtcacgtttatccacaaactctttcgatgcactggaatatttgtcgtctgaagagttgttgaaattgctataactcacgtcgagtcttgggaacgttgaccatcttgactatgagtgtgaagagaaggagggtagtcgaaagcggattaaggaaagaacgaagaaaaggagcaaggcggcagtcgagaagagatttttgatgataagtttgacggagattgatcgaacgttccgagggaagaatttatcgattgtcgttgcgattttcaagagagcagaaccagagcagtacggagggaatgaatcgttttgtcgagtttagaagatgtccaagaaaagaacattcagggttttccatccaacacaaaagataaatccgatccaacccaacccagcaaggagaccagcgaaatacaaggaaaaaaatcacaattttttgttcacactttcgtcagttcagcatgttctttcctctctttcaacggacaaatccatcaagacggtaaatccttgcacacaaaaagctagacgaacctgattgagacgagacttgaagggtggtgctgtggcctttctttcgcctgacaaagtgcttgaacccgtcgacgatcgagcgtgtatctgactttgtgggccaatctgactttttttggtgtgaatatatgaaagtgttggcaagtatttgaaaaattgagatcagtttatttaagtaacacataatcaaggccactcatagaacaccacacagcctcttggcctttggtatactatgctcaatatgatcgtcactcttgttgtcgtcattcaaatagctctttcttgcgcagactgacgctgtatggttctccgataataataagaagaatcccctggttcccagttgatcgtcaacacagaaagcatatctagttccaaacatacatatattccgttgatcaaaagccacagagaatattcttttaatcatgctaaactctatgtaagaccgacaagatggaaagagaagaaaaggaaggagaggacaagaactgattcgcaaggtttacataaagtcatcgtcgtctccgctgtgtgggtcatgcagagatagaatgatttgtagagggcaaacgtcagttgatactcttgtaggtacggccagttaagcaagcaatagacttactcatcaagcgcgtcggtgtaggctcgagtgtcagccctgtggtgaagcaggtgggagaaggcggtccatgtgttagctcatgcgaccagataatcacaatgtaacacgatgaagacacaatccaaacagaaaatcaagccacgcactgggagatgttcttgcttccacccaactgaggctttccctttgccggcgtcttcttctttccactagccttgtccctctgctcttgctgcttaatatttgccaacgcgttcaaaccagaggcggtctttcggacctcgctatccttcagagtctcgcaaagcgtcttggcatggaactcgacaaagtaagcaaagagcgggttcgagctgtgcttcgagtagatctcggaatacaaccgggcggagaatgcctcgagatcggccttagtctttggcttggcatccgcgagcgaaccaacggaagcatctgataagtgtaagtccgatgtttgtataagacaaacgagttcaaaagagcgacaaagggaaggaagtgagtcagttgagtgacagtacaagtgggacagggggcgctcagcgcgcatatggaccacttgagttgcttattctttctgataaatagcaatacgaaccaggcttgctggagatagtggtgtctcctaggagatcagaagcgtttgccagatcagcatcgagctccatctgcttctccaatcgtcgtcgctcctgaggtgtcaactcctcttcgggatcaatgtctccagcctcaatctagatatgattttattcatttgtttttgaatgagaaagagatatcaagacgaacagaaacaaaggctagaagtcagagaaaccggtgaattgaaagctagcgaatccatacaacaacgaaaaagagacgtaacgtacagctcgcgctcgctcggcttccttcgcggccaatctctgcttaagagttcccttcttcttaggtggggcgacgacggttggagcaacgactttcttcttgtcagaatcggaggcgtcccagtcgtcctgaagagttgataaatgagatacaccaatcagacggtcaacacgtcattcacccgacaccgaccaatcagccgctcgtttcagaccttgttcttttccttgcgacgcgaaaatgaacagggcaaggatcagaagagaaagtgatgaacggatactcactccctcgctctcctcttcgtcctcaccggcaaacctagactttctcggaattatcaccggaggcgtgttcgacgtagacttcacagctggcttgataggagcagcggtctcctcgttatcagaagcatctgatcgtttgtcaaggcattcagtaattcaatcgttcagcgaaggttgaagccgtacagaatagtatatgtcagttgtggttattcagaagaggatggagatgaacgcgagagcagagcgtttcacgttctactgtattcctctctccctctgttcttgccttttgcatggaaacagcacaaaggactgtaaacacagggagagggacagagaatatgagaaggcatcatctaatcattcactcaccccagtcagacatatctttatccttttcttttattgattgattttcttttttggaaagctaaagagtgttgattgttcttattatgctgacaataatcaagaaagctggaaggcaatcttttttctcttttttctttttccagtgagctggaatccattgtaacagccatgacgcgtgatacaccacgtggcataaagctgtacaccgttagtcacccattcttgaccatcactttcccgacttctggtcgttcttctcatttcttttgttcctcttcgctcgaatttcttttgttctgtcgggtttcgatttctgttctatttcacaaaatcaacaagtcgaagcaatgtcggaaggagcgtagcgaagagcagatcaaacgccgcaaaaccttttcaattatcctaccaaggaagatcttccagctcgatcaacataatcttttgtgcttatcccactgacggatgatggttctgagacaataaactcctgggacgtacagccagacttgttgacctcgtccatttgcttttgtctagatccacacgtttctctctagcccacagatatgttctatcactatttatgaacgatctctctttctttttaaactgaccgtagacaatggatcgaaaagaacgagttatcaataactttgcctatccctttgatgagctaatgcgacttgtggtccgtcgtgagccagccagccagccaccgttcattatcatccgtcggatcggccttccatctatacctgattgtttaatacagatataccctgtagggaaccaattccgggtggtttatacacattctctctctttgtcccttaccggcccttactatccgctcatgtcgatcgttttctccccttaaacccaaaaaaaagtgacaggttcctttttgattgacatgccgacattgacaggtttttttccttctcttcctagcatacatgggttttctataaagacttcacaagagtggcgagtctgtctcgttctctttctttcttctctttctttcatccacacatcccttcagtacaactccatcttttctttctaccttgcctgtccaccagtaagacagcatcaacttcgatccatctcttctatcagttatcgccatcgacatcatcgttccagcacccgatcctttcaccatggccaccgtatctcgtgctcctcgccgccctgcagcgatcgactatcactcatccactcccaccagtcagcctatgcaaacacctagtcaggttgccgctagccctcagatgtttatcgagattctcaaatcgcttggagaatgcgccgagttggtcgagcataacgctcatccggccgatacgatgtcctctcttcgccaaattatctcgcttgtcagctctctgagcattgccgttcttatgcctagcaattctcagggtaagctgtttagaagttgatcctcgctcccggttttggcactgactttatcgttccatctctgttaatcgtctccaggccccggttcttgcgttacgtcccaaaagaactttcatcggagcgacagtagcgtctcgtttgacggacatgagttttcaacttctgaccctgggctctcatacagccacagcaactccgagtctggtatgttcttgagcgtctggttcggcactaacgaatgtttgcgccagtctattcgttgcgaacagctatacttacatgtgtctctttcaaaaacaaaaatgaatatacaaacaaaacgaagattcttccgtctcctacaaatgggaacctccgtctccggcatcttcccctgcttctatggtaggcaagcatacggctcgagtcgttcccgggaccccttatcatgctcgaaaaccctctcgagccccgcttctcacgcccccaccttccgaccgtcaggtttgcaggcagctttctacccacgactctcctctgtttcctgcactgccggaaatccaagatcgcgaaaaggtcgataactcgctgggattgaagttaggattcgagtcgggagtgcttcctctcgggtttggttcgtttgtctatcttctcttgtccacatgtatgactaccttgctgacggagtgggaaactttacgaccaacaacagagtcctcctctattcctcaagcctctgacgccgatttcaatcatcgagcgacttttcacaggcaggctggtcgtggtatctccgaggcttatgatgtgaccttaaccttgactggatcgactaccatcgacggaaccgtgttccccttcaggatcactgatgcctattttaatcccgaggcgagtgatttcttttcaacgttattaaagtatcaacttggctaacactcagtgatcattccatttgtttacaaaaatagacctataactatagcgagagtttatgccgaacggatggaacaggtatcacgggttatagatacgacaaccggttagtgtcttctcttccacgcaggatgacacaaggtctatgtaccaacaactccttacgtacactttctcccaataggaacggatcaacatatattcgattcgatgagccaaccggtcctcgaacgtgcttcatggtgagagcttctattatgtgttctttgttgcaatatgaatataccatgactgatatgacttcctttttcatataataaacttgtaaagcgtcacacccaccctccccatactattccgccaacttcctcgtctagaactctccactccaccagctccccccagctcatccggcgtgcttctgacggttccgccaagggcaacatggccgtctggtctcccttgccacggtcccctgctcagatgtccctgactatgaagccgccaaaattcactttaagctctcccctggtgggtaacgacatgggcggcagtgcccctatgggtctctctgtgaaagatttctggcggtaggtactataccagccgctttgagacttgcatattcactctgtacacgttcctttctcttgctcgcgttgtagtccttctttcagtcctttccctctgtctctcatctttcttctaattggtagccctctgatggttcctctcatgttatctcaatctgctttacgatcttgcctgtctcttcccatatctgcccgaccttaccattggaggatatcttcttgttctttcattttgtcatctctttatctaaaacgtcgactcgatatgtcctccggcgacgttttgtagctttgcccattcatacctcgcactctgctgggttgctttctcgtgtgttagtgtttctcatggttctctacatgcaatctatctcattctctttacacaagatgtttgtggacttttttctggattagggaatggatacacatatgtatatgtcgtacaacgtctgatcggaaaatcaacaaaggggtgacgctctaggaggcgaaccgagaaggagcacagagagattcgaagaaaagggcaagactctaacggatgaaacgcactgtgggaacaaaaaaggtaggcagatcaacacaagcatccgaacaaaagacaaagatcgaagacggagaaacgtgacatactgtaggcgagtaggagagcgccccctcccgtggctgtttatttgtttgttcgtttgtttgtaggattgcagatatagtctcggtaagttgtacgattcaatggttagagacaaaagaaaggataaagaagcataacgtaccgacggtgaccatgtattgaaggatcgagaactatgtgtttcaacagatccgtaagagaaatagacagagcatgtttcttgtttgagtcccttacttgccggctttgggatgaacaatagaggatcgaacaaagacgaggaaggagatctataccttggcaccttgaatttgagttctcaaacctgcgatctcgctttctatccgagtatccacctgcgatcgtttccaaccgaatcacatgtccatgcaaggaaagaggagttatcactcagtgtttattcatatcggacggatgtagttagcagtctaaagaagaatcggatacagacctctttgatcttcagttcgtgaagggatgcttcgtctctgatccgacctggatgatcatcacacgatccgttagctatcgatcaatgacgacgagaaaagaaagaggaaaagaaagaggagacgaccaagtagaacagacctttttccagattcagatccaacctgacaccagcctgagttcttgtgatttgctctttcagctgttgtttcagcttttccacctcgttcatcaacctttcgttctctcccttcatcagattctggtcctgcttttccaagacctgaagttcagatttaagttgagagaaatcgacattttgggtgtaggattgctgtatacgtataagacaaccaagataagttcatgtcatgtacctgccaaaaaccaacacaacacgcatgacacaacgataaagacgaaccttttcttgctcacttctcgataccattcccgcactcatgttggtcacactctcgtcgatgacttccgccaaagcattcataatcccctctgcttgagttctaggaagaccttctcgttcaagcctgttgacgaacgcatgggtgtcgaaatgaaaggaggctccgggtgaagttgggtggaacgatcggctgattggtgtatgaagaagggaggaggaagacgctatacgaaagggctggttgagaagaggaatcgatcgacggagcacagggagcgacatcttgagtaagaggtatgacgaggtgtgtttaatataagactgaggacagggtagtatgagctagagatggtgagggtcaatatatattgtatatattgagtgttgggttcactggtcgatgttttagcgaaaaaggagaaagaccgtgtccaataacacataatacatcatcatcagcagcagcatccttagtcttaccatccagcactttctcttcctgcctctttcgtctctaaaaaaatctttgttcatatcagtcaaaagctaacgcagcaatgagctggacacctcctcgttcaaacccactcaagccgaaaccgtcaacgaaatcaccctggatcaggcgtcattcatttattggtttcggcggaccattcattgctttagtactgggaaccagtttactcatggtcaatttcacaagtaccaggtaaggttttcgctcaagctccttcatctagtagcttccagagcttatgtaaagagagagagagataccgacttgtaatcaacacgggagggaaactaaaagctaatgggcttgagagaactttttggtaagataatccaggtatgaactgcacgatcagaaacaaagctatgtacgttcaggtctcctctatatctcttttctcctcttctatctttgcctttcggtcttcacctttacgtccaggccctttatgtccgggagagagagagagcagatatatatatgaaatacatcatgaaagccgaagactgatatcaatggacatattttgccgcgcttagatgtcgaaagaggaactacaagcgatcgacgagaaaccttttgatatccgagaattctactacgttcgttcccttctctttcccgtgttttcttgtcttcaatgccggcttaaacatcttgttccttctctctcctgacgactacttgtatcagaaaatctcatcaaatacgcctatggatgacgatgtggtcctcccacctgctcgtccaatccgccctcctacaaagaggctgaagaaatccgagacattgttcgataaaccacctccggaggattgggaggtaaagcgagtcgaaagaccggttggggtggctcaatggggagagatgccgaagagcaaagaagaacaggagtttgagagaggaaagaaatgggtctgatatgtctatagtatggtgacttctcaactttacttgtcataggaatttggagttttcgggtttcggtgttcgtctctggctttcagacaaaaggtctaatatgtgatctttcaacattgcgatgaaagacaggaatggagatatataacaaccaaaaacaagccagccggctatgattgaaaaagaagatatagctaattgaattgtaacgaagaagaatataaatagagagaaatctgcatcccatcccttcccctttgggttctaaaatccctcgccgccatcgtcatcatcttgcctgttgatcaaatctttagcgatggcttccatgctttacttgacctccttgaggatcctgttaatgcaatcgcccaaacaactcagggtcagtcattctccaatagatgaggaggcaagacaagagaagaaaagacaactcacatcgactctcgggcagggccgtttccgatccactctacaggcacaccgaggtaagactcgatgaactcgatgtaggtcttgcagttctcagggagatcctcatacttctggacgctcgagatatccgacttccatccggggaaagtcttgtacttgacctcgaccttggccaagtactcgagatcggccgggaacccgtcgagctcctttccgtcaacctcataagcgacaccaatcttgatctcgtcgagtccgtcaagaacatcgagcttggtcaagttcaaggtatcataaccgttgatctggttcgagaatcgaagcacaacgagatccaaccaaccacatcgtcgtcgtcgaccggtggtaacaccccactcggcaccgacctcctgcatggtctctccaatggactgtcgagatagtaaaggattcgagcgcaacacacatgagcaatgcaagacatcagcctttgtcaaatgcttcaaacaaacacacaaacacaagttactgacgttcaactgctccgtagggaaaggtccaccaccaactctggtggtgtaggccttgacgacaccaatgaccttgccaatcatcttgggagggatacccaatccagtgcagactccaccgatagcggtagaggatgaagtgacgtaagggtaggttccgtagtcgaggtcgagcatcaacgcgttggcaccctcaacgaggactcgcttgggggtagtaattgccttgtggaggtaagacactccatcaacgatcatcggtcgcagtcgagcggcaaagacctaggtgaagtaagacccagaggaccgcgcgtaaaaaaaggaagagaaagacaaagagatgtcaaacttgggccataaaactgaaaggacagaagaaacatatacacgaaaacaaaaccgaccttatatctctcaatctcagcctcggtatcgtactcaaagtggccgtatcgcttgattcggccctcgacgagctttcggaacttggtagcgaagacctcatggtcgtacaagtgatgcactcgaagacccgatcgagaggccttggaagagtaagctggcccaattcctcgcttggtagttccgatgctgtatgcggaacaaaagtcgaccagatggtaagttccaatagataactctcaagaagagacaagcaaacgaacgaggatccaccgagctcgacctctttgaggccgtcaacgatttggtggaagtcaaagacgaggtgggctcggtcagagacgaaaagccgaccagcgcagtcaaggcctattctcagcccagatggtgtcattacaattgtttctatcagttctcatctttctaaaatgtccgcgatcga

SEQ ID NO: 110 - DNA, 12152 bp, Xanthophyllomyces dendrorhous
cgatcgacaaacagatgtaacgaacccttcttctccaagctctcaagctcctcgaacaagctgggaacgtgaacgacgactccgcttccgatcaaagcctgggcatccgggttcataagcccactgggaagcaagtggaagtcgtacttcttcttagtctctcccttgccgacgacaatggtgtgcccggcattgtttcctccggcgcatcgagcggtcacgtcggcatggtgggcgagaatatcgacgagtttacctttgccctcgtctccccactgggatccaagactgtatagatgaaagatattagcttggcagtgagagaaagagggactcccataaccgagaggaacctacacgacggtgaccccggacttggctacgactgaatataacaggaatcacagagagatagttatgattataccaaggaaaacggaagaagtcgacgaagagagaaggaaaaaaaaagatagaatggtaaaaaaagaagtcagtgaagcaacagagagtcatcttacattcccgaaatctccgatcgagtatgggactcgagaaaagagaccccggctcgagagcattccgtttttcaacagctagcaacaaagagcagtacatacggttatcagccatggtgtcaagtgtgtgtgtttgtgtttgtgtaagaagttcgcacaccgagatggatcttcttgctaaagagaagaagagagaaaggaaaaaagtagaatggaattggaaaaaaagcgaaaaagcggatgtacatcatttggggaaatttggggtttgattggtcaaaattggggtaggtctgggcaactctagggctgaacaactgtcggttactaaccgcacgttccactagtatcaacatcatctctcggttcatagaacacatacacaagcacttacagtctcgatcaaggactatcagatctatgcttccttggatagttcctttgatcttgttaacaccgctagtggtattctatcgggtatggtacattttacctcgaggatatcttcctcaaccctcatccagtcgtaccaaggatgtcaccaacatcaaggataagcgatcagataaagtcgttggtgtcttcttgggttccggtgagttgtatgctgctagctcgttaatcgtctcagatgcattgaccccagcgttctaacacaattaataaacaaacaaataggaggtcatacatacgaagctttaaaaatactagacatcatggatgcggccaaatatgctggaagagtgtatatttactctgctggagactctatgagtcttcgtaaagccatggagtttgaatcatccttggcttcagctgagatcccatcacaccagctcaagaagagcaattctttgcaggcattcttgacaatccctcttccgagagctcgtcaagtcggtcaatcatatgtatcatcaagtacgtcgtgtttctggatgcgcctctatccgaatttacgtgtgtctcaaatttcgttttactgctctccaatgatcagtcttcacaaccctgcataccattgttcatactctctatcattttactataagtacggttatccattcgcgtcggtcgagtcggaagaaacctttcgcagatatcctcattctgaatggtccagggacagcgacatgccttgtcttggctgtccttacctctcgcgttagtcacattttccgtctcctgttgactccttcgtctatgcgctaagaccgtagtcgggatgacttcaattcgaaacctgtcatccctagtttctaggtcttccaagtccgaggacgatatatatcgaatcgttcgctagaacaaactctataagtctttctgggcggatcttacgacctctggtcgataggtttcttgtgcaatggccgggtgcgctttcaccagagaaggaaggcctacccccaggaagcaaaggggagtgtgtcggtgttgttgtttgaggcttgaatccataaactgggcgtttggtacaacatagccgtcgctctcacaaattgtaatcaaaataaatcataatggataggcaacagagaatcatgagggaaggcaaagaaatgagaaaatcgaaagtatgtttggtgctcataataagaatcgaaaacaatgaaacgtgacgaggtgtaaacagggtatatatcaggcaagaaagaagataggtgttgaaacttgagggatatgaagtaaggaagccagtttcaaatttcatactcctactcgatggaccacttttttctattgatgagatcagatccagaccaccgaaacgtaggagtcagtaaactggccattgacatgtctggaacaaatttggagggatagcttacctgtcctgagaatctcaacacctctctcttctccattatatacaacgttctctccaacgcatgactcgaatagccctgtccgctcacgaactccctaaccagacttgcataactcgtgctccatccgattggtaacctcctcctgacttctctttcaatcttctctacctcttcgttaagctctcctcgtgtgagaccttcgacagaaccagcagagacggcgtccatggtagaatacttgaaaagtcgaatcgcctcgtccacatggaaaggttgaactgacgtcgtgagcgtcatcttggctagagattcagagattcggatgatagcttccagttgtctgtcgttggccagttcataacataacggtcagataggacgatgtaggacgaatatgaacgaacgaaatagcaaaaaagaaaagaaaagaacgaaccgaacggtgatagggatggaacttcgctcatcgttgtctcgctccacctgctgaacttgttttctcagcgccacgaaatgactacttaacatctccgacgcttcctgggatagccgaggcgcacacctcgatttacagtaggcgacgtatcgtttcatcttgtcgatatcgatctcgcccacagtttcgcttcctgtcggtcggttcatgtggatgttcatcacgtgttttgctatcgtctgcagccggcgaaagcaaagcagattgaaaaggtaagaagagaaagaaatatgggaaaaaattcgtcagtcagatggtccgcagggaaaaagacaaaaaagtgagaagggcgcactcgatctcgggattcattatgctcatctttgacaataaagatcatatcgaatcgagacaagattgtcgtttggaaatcgatgttctgatttgttcgagtgcaccaacaacaattccaaaaaagaagaaaaagaaaaagacagttttgttcagctctatccatctcgaccaatgcaagaatcgggaagaaagatagtgtcctcgtacctctccaggactcttcatatcatcataccgaccgaagaccggattcgccgccgccaatacgcttgtcctcgaattcaagatcgtcgtgataccggcctttgcgatcgagatagtttgttgttccattgcttcgtgaattgccactcgatcctcgtctctcatcttgtcaaactcatcaatgcaaaccacaccaccgtccgcaagcaccatggcacctccttcgaggaaaaattccctctaatcgtcatgtccaaacgtgagagcgaaatttgatatacgacggaaaagaaagatgaagagcaagattgcagcagtacagtcagtaaaggacgaggaaagatgcacgaagtaagaaagacagacgaacggtgacagggtctctttgtaccgaagccgttaaaccagccgcactacttccctttccggatgtatatacggagatcggagcgacctatgattccagacgaacaagagtgccgatatgatcattttccatcagccctgttgccgttcttcacctaactatctaccctgcaacgaacgatggtaacataccttttcgacgaacttcaacagttgtgacttggccgttcctggatctccaagtagtaatacattgatgtctcctcttaaacgcatcccgtccggaaggatcttcttacttcctccgaagagcagacaagcaattgctttcttgatatctgttgaacacaaatcgatgtttttgagttatgtttctaattctttggaaagaaaagagacagagatgaaggatgatatattgagtcttacccaaatttccgaagatactaggcgccacacttctagcaaatctttcataaagcccttctcctcgactgatctctccaaactcttcttcctcttcagcggtgaatcctctggagccaggggaggtcgcgagattggtatctaattcaagacctagcactcggaggtaaggagttcgaagcgctggagcagatgcgtttcctctctaacaatcacatgaacagtggtgttttattggttattagtgatctgtcgaatggtaatagagactagttgagtgaggaaagaagaatgacctacagtcttgccagcttgataggtcgagtagattccggtgacgatgactctggatccaggaacgactttgcctgtcaaatatctgccattgtttttcattaaaagtccgtcgatcagctatatgtttctgatgccttcgttgaagaatcaaggatcggtaaactgaaaagcgacagcaagaacgaacctttcggcgctgagctgcatatgtctaggcaattctcctactggaaccgcatccggtgcttcctgaagcttgatcatctgttgatcgacaaaccgacatcggtcgtgcatgattacatatggatcgagcgggcagtctttcactgttcctggcatggcttctctatcattggatatcaaaaggaacatcgagtcgtaaatgtcagtccattcatttctcttgagctcatacaggaggatagagataaagataaagagagaaaagaaaggaagggctacgaacgcttcgcatttccttggcaaactcctagctcctccatcaccaatcccaccagtgacggccatgaccttggtactccgacagcctttgcattgcaggtatagacttgtcgctcgagaggaaagtgtcgaagccgaaatgacgatccctggcagacgaactaatgtagtcaatgtgtctgcctaatagttcgcgcgtatatcatacaagttgacgagaaagattcaacacatgagcaaataagacgaaaaatgagagaagtaatggttcgaggagaagggtgaaacatacagtcaactctctgaactgaatcatgttcattccactcttcaatactgcctgcatttctgggatctccctttctgcgattcccaaaagtccatcagcctgcgttgcgccaccctgcgtaaactgttccctttctcgttgttgttgctccctttgctgagcgttcattgggtgaagaatttgccgagctgatttaagaatagctgattccaactgtcaaacatcaggtgatatcatgataggcaattagccacgaagaaaaaggttatcactcggtctaacatggaaataagttgaaagatcaatgacgaacgagaggaagcatgtcgcctggtttctcctgaaccatctgggctaattcttcattataaacgacaagatcccgaagatctatctcgacgacgttttgtcgagccagaagggaagagcggattcgatctctgcaaatcagagtgttatgtagacgaaccaaagaaggcatcaactttcaattcattcgcctatttatgcaacgttaagagacctgatacaagacttaccggtacttgaactctcctccaactctaaatccttggataaattcgaatagacttctctcgattgctgcaggtgcatcatgaggaccttggtgcgaaagcaccgatacggaaaacactcggtttgaatcaaacccagacctagggaggtgatgagagattagatatttcattatgagcccggttgaaacaagcaaggcctgatgagagaactaagactcacattcttttttaacacaaagattgagagaggtagtgatgactcttcgagcagatatacagagagaaagagttgctcggtgacgatgttaatgaatagaatgagaacagcggacaaggagaaaacacgcgcactcagttccatcgatcaacaagtcgcgttttcatttacgcaacgcgacgtgacttgattaggtaatcagagcaaccaaagattctctgcacgacaaagagccaagcttctgttgcaagaaggatggaagagcttcatttgaaagcagctcgaagatcgttcaagatagaggacatgagcagattcgaacagtctttcagtcgcgttctatcacatagccgaagcaccgattgataccaagttggtctcttgtccgttacgtcttctccagttcagcgtggcaagtagtggtgtatgatttagcacgtgtagtcaaaagccttcccttcctttgtctgatgcagatttccttatggtgtagaaatctcatcactagacttgttctgttatttcagaatgtaagtgagagtggtatatgatcatatattcgataaccagcatctgttggtttggctgcttcgccaatcaacgtgagacccgaggaacgaagtatttgtatagaataatgctagacgttctgatccgtggtccatgattgaaagaagggatcaaaatttaggcagaacagagctcaatcatcaatatcaccttccactgcaaatagctcacacaatctcagttcagacaaatccgtaacaatatcgatggtctgtaaacttgaaaatgaggaccacttaagatagagagaaacgaagatgatgtttgagatacgatcaaaaatcagtcgatagccggtgatctagaaaatgttgatacagaaacatgcaagatgaattctgccagacgatcgtctgtctatcaaaacacatcgaactggttagatttactcatttagcagcttgacccacgtcaagagaaagacagatgcaaagatctaatcatgaatatcctggcggctatgaggaagatattcgtcgattcaagagcgtacaagatgagtgaacgaaggagcagagataattaaccaaaaagtgatcaacttctgcggcatttctttacttctctccctgccttctcctatcatcttccgagacatcgctttggtctcatcccccttcagatatatagaaatcaatgccgacgccggctcaagacccgctccttcacgatccatctttcatatatgcttcaactcccacgctctctcggacagcatccgtaggatcagctcaacctggctctcctgcactcggcaggctaccgggcgcattcactcccgtagcaagctctatcccaggaaacctcaagaatgttgttctcggtagaggtagcttcggtagaccaccctggtatgactcaaatggaaagacaagagagtgttatgtcattggaatcgccggaggaagtgcaagtggaaaggtcagttggctcaatctatcacactttctttgcttatcctatacccgcatgatagatactgaccatcttcatgttctgacctgctgcgaatcgttcttcctatattgacccttacttcaatagacaagcgttgcgagagaaattctccgccagttgaaccatattccaaacgtattaatcctttctcaggattcattctacaagcgcaactcgcccgaagaaattgttatggcattcgagaacaacaaggattttgaccatccagactccattgatttcaaactattcagagagtgcttagtcgatctgagaaatggcttggccgttcaggttcgtatctttggttttttattctctagatatcagtcaagacagcaccacttgtgacgctttccgagtgcgctgccaatccatatgaagagctgacactatcttcatcgctggtcatgacatcattatacagatccgtaagttcttcttcctgagatatgcttctttctctaagatcgcaagtttaaagctcacccgtcgaatttacaatgaacacaatactgatgatcaaacttccgggacaacttgtagctgtttactcctttgttcaccatcagcgtatgccagagacatcatacctctatggagcatctgtcatcatcgttgagggaatcctggcgctgaccgatccaagccttagggatttgtttgatctgaaaggtaggtcttgtacatatgtcagtccgctaaaggagtatgttgcataaatggactgatcttcgttattttacccttttaatgtgcagtgttcgtcaatgtacgtcgtcatcctcatcaattatcttacgcgcatctctttttccttttttttttttggagaatgaagagcgatcagggtgtcttatttctttcatttgtgtgccggacatacgacattctatagtgcgatgtgggtttatcctcttttgctcaaggaaagggatactcgagacgtcaaactgatattcatcatcctttcccgtcaaatctcttctcatcagaccgaccttatgctcgcgcggcgaattcgaagagatgttgtcgagcgaggaagagatgttatgggtattgttgaccagtatcttcggttcgtatgcttcccaaacattccttctaaatggaagtcgactaactatgtgtctgggcggaaacaaggtttgtcaaaccgagttacgacaacttcgtgttgccttcatctaagtttgcagatattgtcagtggtttcccggtctgcattcgctgttattgtctttctggtattctgaacaaaggtatcggcaaatatactgtactgtcttgatatggttgtcagatcgttcctggcgcgcaaaacaatgtcgctatcgatctgatcgtgactcatatccgacgacaactttccgagcgctacatgcgtttccggtcgacgctatctgcccctgtgaccctttcttctcaaccttcctcagcaaagtcgctctcttcttcgaccgacccatcttccacattatctccgtctcccctcgcatcaggctcggataagactgatccacaagtttctgttaacggtaaatcaagggatcatccgaacttggtcctggtcaaccaaacgtcaggcgtgaaaggcgtagttactatattgagagatcgaaagacgatcagagaagacttcgttcattatagcgaccgccttgccactatgttagtattcccatattccttcatcagggaagccctcatagaagtcggactaatcttaaatgttcttttccaccgtgggtgtgatacttcgatgacacagagtggtcgaggaagcgattgggctattcccttacaaggacaaaaaagtcataaccccaatcgaagaggtggctgtcggaaaggtcttagatcttgatccaggcgtgagttttagtcctgttatgtcgggatgacggtttcgtttcatatgtcggaattaattgattggtttgggtgggaaaaaattgagcagaaaatcataggagtttcacttggtcgttcgggaggtccgttggagaaaggcttgaggcgagtcgtgttggacgctcgactcggaacgcttcttattcatgtgggattttctttcttctcttttcgttttggtcacctaacccgccgactggatggaggctgtgtgctgatattgtgtcccttttaccattgtctttcagaatgacgagactacacaagagccactgctttataacatggtccttcctggtttgcaggagcggtctttcgcagagaaagcttgggtgttgctacttgactctcaggtgtgttccgattgtgaggatcggtaaggcctttttatcagataattgatcatccttgtcgtgtttgtcggatagatgggaactggtgcttctgccctcagtaagtctgcttgtctgtttgcgaaaagatcggaccgttctttctttgctgaataaccgcacatcttccttttggtgttttttttttgcattgacagtggccatacgagtcttattggaccaccatgttccagaggatcaaattctcttcctcagtttcttagtgtacgcccgttgatttccttctcacctcttaatctttcctcatgacctcggttctatcgtgaactcattttgtctatatctttccgatgaacctaggaccccgcattctttgaaagcgattgaaagggcgttccctaaagtccgaatcatcactagtgcgattgattacgagttagaacagatcactcatcaccgacgcgttcatcgaggttctctctctgaatcaggtcagggacttgcatcaggattgggaatcaagatgtctgaatccatgtctggagtacagggaaagaacaagtcggaggagagggtaaaggaattgaaagaatgggtggttagacctggatgcggagatatcggcgatcggttcgtttctttcttcttgttctctcccttgactctcttactcctctcgattatatcagctaattgggatcgttttttgatcaaaatagctactatctggtctagctacctcatcacagaacctaaatttgatatatttgccaatctgggtatacagatgaacacatctgctcagcctacatgagtcgatgacggaaggatctatgaaatatgactagaacaaagatggagatctcgagatcaagatgggtgtatttcgatgtattgaacttgatacatttgagaaacaaacggcccaatgagtaaattagtgcgcgcgcaaaggaatggtaccaagcctaagtataagcacaaaaacttttgaagaaacgatgagaaatatggatgagaaaaatgccatgatagctggccgaacgatcacctctatccctcatctctagtatcgacttgtgtgtggacctggtgatgtttgcttctatgtcaatgaacggaaagtcaggatatcgagttcgttcggaaactcattcaaatgaagcaaggggaatggacaaacagatgatcgactctcgagaatgatcttccacaatcttgaatcatacccacatgcggtttttctgctgtatgaatggatttaacatgccctttcaacattaaagtcaattgcctatcttctttcggagttggtagacaacctgtcgtaaatttgcaggacaaactgtcttaagtgaccacttcgtctagcaagaggtgtatgagagggacgaatctcgtcattcagatgttacatagaaacataatacccaagattaggagagcctacctaaaccatttctgacagccctcagtagtacattcgaatacttttctctcctcttgttccgcatatgtgatcgaacctgtgcttcttttcgaaataaatgacactgcgatagacattgctctcggcattcttccaaactttctctttctggaagtgttcgatccgtggatgacagtagtaattgttcgagtgtcgtcatcggatctgacgatctttaggttgatacgcattgggtctgctatatccatcgatttcatcgtatcggatgttggtgtcgaagcacgtgaggaaaaaagagacagagtacgctgccaaacttgaggttgtacttttctggcctattgggtgaatactgttgaatgaggacgggattgactgggattcggcgcgcggttggtcatgacttgaggtggacctagacgtatgactcgaaagactggcagtattgtcttgcgacatttttgataatgaaatgcagtgttgatagatgcgactatactcgatgggcgatgaagagcaatcagttggtctgtttactcaatctttcggttagacattagaattctcaagggagagtgcaagattagaagtgaacaaggaagacaaaagtgagtaagatagcgaaacaaacaagccaaggcaatgttcagaggaggtttcgatctcttcatataagtattcggtaacacaatcagggtcagtgtcgaatccaatccttgaagaagaagacatattctcaaaggaaaatcaagagttgagattcaaagagtcagtcgaacgtcgtcgagtcggacgaggaggtgagctagcatgccagccgtaaccaaggtttacatttgatcggtaaccaactgtagattgatctcattgatttccttgtcaccttcaatctccccctgtcatctttccacttgaaggacctcgagcatgtcgcctctaccggcagcgattctatcgccatc

SEQ ID NO: 111 - DNA, 13092 bp, Xanthophyllomyces dendrorhous
  misc_feature (12711)..(12720): n is a, c, g, or t
ccacccactcgtccaccactacaagttcagtcgcagtcggacgactcctttcggacagcttcgtcttccttctcctcttttgctcgaatcaaacaatccatccccgccgagttgactccactctcggatggagatggtcaagctgtgaccgatagaagccttccggtagcaaaagctctaccaatcgtggaaacagacaagacgcttgtatcagagagattggaggccttgctgaaatcattagtgatagagaacaagatcaaagatggcgcggagaatatgcttcaggtaagccctcagttcagttacctatacgccctttggatttggtggatcttcgagacctatatacgcatatgaatccatcgaaacgccttcaacttccgattgggaacactcagttcatcatgtcttcatttccttcgttctcaggtccttgagtctgctgtagaaacaggatcagatagaaacgatcttcggaaagaggtcgagggcgaactgagagcggccaacaagatgattgtcacaatcttgaacgaaatccaagaactcaaagagcacccaggtttgtgtttagacaatgttcactctcctactctgtagagctctaacgcctgtcttgtcttatcttgtcttgaagaaatttctcgcgcgcttcagaagaaagtatcacagcaggcgtttccttcgaatcagtcgacgcgtcgacttccgccgaaactcagctctgctaacagcagtagtagtactaccaacagtcataacaacgtcatcaatcacccagcttcaacttcttcttcttattcggctatgcaaaatatgcgacatccccgaccgattagtccagaagatgacttccagaccatcttgactgtcgcaagagctctggtgagagatcttgatgtgcaaagtagggatgacggaaagaagtttgaggacgcaggaagactcgtcggagtcctcaaaaagaacagaagggttcggtatgatcttgcaggtcgagaggacgtcttggaaatgtgagtcgactctgatcatgaccgattaaccatccgtcttcaatcttatcattgatcttgcgcgggcgcatgaatgtaaacacagaatattcgccttgatctcggaaacaagctcaaaagaactacgagccactggatatagggtgtttagacacctacttgttgattcagagggatggaaaacactcgagcggatgggaattgattggtacatcattcggtaagtgtgattgttctcatgttcagcttgcatctctgtttctaagagcgcgcgcatatatgtttatacagaagcatttgcatacttctacaagctgatttgataaacttcaattatatatggtccatccgatgtgtacagcacatttaccagagatgtctcatgcgctcctgaaaagatacaggcgctcaagctgatccgatcggttttgaacctcccgccatctccatttaccccaccattaatatctactccttcgaggtcaaaatctctgagtgactatcgaaatctcaatgatctagaaagacgagggttcaggagaagcgcaaaagttccattgagtgattcggtgataaggacgttagtcagtttagcagagaacggggatgatccgtttagatttgttagtttagagaccttggcagaaattggtaagctttgccttctttcgcagaaactgttcgtacactattcagcttacctatcacatatctatgcaaaagcccttttggacatccaaacacttgtcccctcaaacgctatcagagttcttcttcaatgcttctcggagggaccacatgagttagcgcctgccattgcccatgtgtttctgtacgtcatcgattgtccggaaaggagggagtcgttaaatcccgggatggatatcgaggtctgtttcttctccgctctctgacgtgtctttctcttcttatattaactggtcgtcattttttttcttctttactatcaatcgatagatggctctctctggatttacagatgttcatggttctggcgaggcttatctgagcagacttagatcgagttcaaaggttgtttcaacattgctcaagtcatggtcaggtgagttcttttccctcttttctcggtatcccctctgccaatcgctcttcgctaacgaatttatatatcctactctgattttccttataaaggattcttatatctgtgtatggacgatcgaaaagcaatccggtccctagtcgattctctcagagtaccgaccgttcagatgagagtcagttcacgttactttctaaagcatcgtaggctaccactaatcctattttcttttgtttcgtctctcccgcgtattatgaatgatgtcataggaagttctgctagatatgttttttgatatctttcgcatcaaaactccgttttggtaccatgcgtttttagacgaccgtcgtttaacaagtgagccatctccttgacttatactttctagtctttacaatcacgcgtttcttcaatcatctctcgtcctcatgtactgattcttatccctttgtcgagaacatagtgtactcaaaagacttcaggtccaatgcttacagcgcatcaggaaaagaaaaggaggacccagacaaattgacattgattgatcattacgtcgctctcgtcctcagcgtctttatagaggtcggcttagtcgacgtatgtctctcttcgatatgtttgttctctccgtaccccctttttctactaagctaatacaacaggaaatattaattgatcaggcattaatcgatatcgtggaagaagcattggacatattgtcccgcaaagcaacattgttggtaggcgaacttctagcattgtccaacaagctccttccatcgaccattgctgctcggattcaagtgagaactccgttttctctccattttttttatctgtcgctgatgccgctatacttactgacttgatattcatcattaatacttaatatttgaaaacaaagtctcttcccaggttgttctctcatgccgcaaaatttgcgaaacccgaggagagaggtaaagcctcatctgctctgtcagctatcgacagtttgaacagaaatcgaagtcgattgagagacacgacagctgtaggaacaaaggaaggtagaaaacggtgggtcctcttttcctctttcgcccttctgctctgttgaatgatttctgagtctgatctgactctgattttttattttttattttggtggaaacggggacaaagatcaaatccaatacaggaccctttgttgagaggtcagcgacaagtagaaaatgtcaagatgagaatgggtcttcagatggatgatcggcagtttcaagtcttactcaatgatacacaggtctgcctctgttccatagtttcctattcagaaataactttgtctgacttcttcttttccttgatctgctctggctgaacatataggtcttgttctctcgagaccacaataagtggaattatgatgtcctgatggggatcattcaaggtccattgttgaaccctcgtcggttggaagaagctctgaaggcttcaaagtttggccgcaggttgctgtcattttttcatccattaaatcatcgattttcagatgtcaagaagacaaaggtacgctaagtcgatttttggcttctaacatggactgatcatcttactgcatgtgacttgtgttttgaatgagtgtagccgaaccttcgttgggtgaagctgggttgcgcgttaatcacgacattactatccaacccggacggtgtggcgttcttggcagcagataaactgttacctcagttgtacgaatgttttgcggagctcgatcatgtaagttcatcgatccatttaaacgtctgattatatctcattcccttctcttactactctctcttatctgtaccggcttgttgtggaatgtgatgggttcgcaagtatcatggctctgtcaattcggacccgttgttgtcgaaacaccgattagatgatacgctgacaagtggatatttcgagatgattggaacgttaagttcgcatccagaaggaattcggtaggtcattctcttcgtcgatgtatcctctttcctccatgaacatgccagatgattctcaagcttatgctattcacttgtttcttctgtcttctatctcttgcgcggcgcgcgatagtctgcttgaaaattttaaaatgtttaccttgttctatcacctgagcgacttgaggagtcgtgaagatcttatcaaagctatcatcgagaatctggattacactaggtgagtttcctcttctatacctatttctcttaagatttgataggctaataatactatcaccgttaactggacacagcgacggacattcacggatcgtgttatcaaaagctctcacatctagttatatggttcgtatttctcttttgatcttacaccaattgtagtctctattgatctattcatcattccacatgtctttccagcatatccgactttacgcaaccgagcatctcggtcagcttgtcctttcctcagccgatgccaatccgtggacgcttcgcctgttgatcacacagttatatgatccttcgcctgaagtctgtgagctggctgttcagttcctggaggaagcctgtgaaagaacggacgtgttagagttggtcgttcaaatgaggccttttttggatcatctgggtgatattggccatcctctactactccggtgggtctgtcttacttcgttcacttgctctgaatacggcagttttaactgatgggcctgaaaatcacctcgaatttaaaaagctttctttcgacttctgtcggatttcgatatctccatcaggttcactatctcaatcgagagttggattactggtttcatgtaagtaaccttcttgagctttgggggaaaagaatgttgctcaggtaatctgatcgttgaccactggtatatatgtctttttgttcaatcaaaaataaggaacgaaacgagttttatgtagtgcaggttgaggtttttctctctcgggcattctatcctgctgcaaatgacgatccggatgatcttatgtaagttgcgacttgctttccaaccattttatatcgatacaaatctaccgggaaagacgaccaacgctaagctgcttcgtgattgatttaaatagcgcattcgatggaactgtccctgctcacttctatggcgagctcgttaaaacggccgagggttgtcagatgctaagagagcaaggccattttggcgagtttgcagagtttgtaagacagaatgggatggagtgtgttgattctgatgtgatcaacaagttgaagagtgtgctttgggcggtggtgagtcctttcgttccatccaatatatctagtttcatacttatatttcttctatgatagggccatattggatcaacgagaggtggttttccattcctggaggaggaagacttgctcgaggtcattgtagacatagctgagcagtcgtctgtgttatctgttcgagggtcagtactagaacttcatccgaatgaacagtttctaataagaccaacgagatcttacgtgttggatatgtgtggacatggacacgctcttcttgcctttcaataggacatgctattttatcctaggcctcatatcgtttactcgcccaggagcggacttcttgatggagttcgattgggaagctacgaattcctctaccggacaacccacagggttatgtatccctattgattcttcaaagttttcttacgtacgttcacgatttttcttcatctcgcaataataaacgaaagagagacttatatttaaacgattaactcattattgtacgcccgctctttctgttgtatagatccaaccatggaagccgattcgaagcttggagccgtcgggagctgcgttggtgatgccgacatcaattgtcgaacagagcgtgctgagtgctataggaaacctgagcaaccacgtacaagcttctgcttcattctccattctttccaggtatgattctttttccatgttttcatttcccgtctttggtctcacaaatcttgatgcctgcttttttcgtttggattggtcaaaaccacatgtagactcaaacgtacacatcgagacctgttttcatccattccacttttttatcgagcgcttcacatcctctcatcgactcatttccgactgcccatccgtcgattcatctttgatctgtttgatatcccgatgacaccatctacaatccttggacttatcaactcctcactcaccttgaaactcgaacctgcattgcccgatgcttcgacctcgtctttgatgataggaggagccagatcgccagcatcatcttccacgtcaatgaagctgaagaggtcttcgggacttgagaatcttggcaggtcgagatcgacaaagagaagtctcaagagggtcggatcgaaattgtccagggaagacttcaacgtcgacctaaaggacccagatctaaaaccgggtcttggcttggtagatggtgagcggggtgaggagaagggtaaactcaagctggaaatagatctgagtgtggacctcttgagcggggaagaggatgaaggcagagagaatggggccgagaaagccatgacgcctgttgtctgttcaagaccagccaggaaagtcatcggttttgcgcctgtgcgatgatcaaacgcttgttctttttctttcctcctttctttctctttcttttaggctctctttgctagtttctgtgtctgcctctcttccttcttatcactagcttgccgagtatctacttcgtttctttctctctctctctctctctgtttcttcggggtttcttgattcttctttcacttatatcctcatcatcattcgtccaataaccagcggatgtcataccttttctccatacaacacttgtcctacattattctgccctggacatgatatctgtttgtactgctcttctcatcctccttttcgttttcttttcttttctctctctcacacgcttccttatacccatccctagatcatgttgtatctattcgttcatctctctctaccatgtgattgttctgaaccgaacgagagtttgttccacagaggtacatcccacttaggcccccctttttttttacataactgttccgctcaaccgagacgaggcgacagatgttgaaacttcatgcttagactttcggtgttctcattcgctcgctcgttaatcaggcacagaagaggtatcaaagaagaagatggagaagaatgattctatatggatttgatcattaaaaaaataatggatggatggaatggaagatgatagaagaagaagcagaggaagtaaagaagaaaaggacacagtgaagggaacacaacacaacacgaccgtaaagaagagatggggaaggaaaggaaaagaaagaagaaagaagaaagaagaaagaaacccgagggaaaccggaagactagtactcgagatgagcagcataagaggtctatagattgaggaagtaagaaaaagaaaagatctcgaagccgacttcctgtcctctttgctccttcgtcttctttagatttttgatcgcaacccactgccagcctgacccacggcgacgacctgatcgaccgtacagaccgaacctctgtactctggcaagtaggacgcttgcgagaacagactcttgaccacgggagaacccttgtagatgggtgtgagagatccggcacagatgtcaaactctgtaaagtgatcgtaggacgtctcgagagtgtcttgtgggtttcgatcgccttgggtgatgatcgatcgagcctgtagaaagcaaggatggaaaacaagaaagggagaggaaacccgggaggtcagtttttttactgcgagcagagaccgagagagagagacgaagagaaacgaacctgagtgacagccgttgggttcgtagggttcaaggcaatgagccgtctggcaaacacagcggcggtagcgtagttctgagccttgttccagacagacatggccgaccgaagggcgagctgaagatggatcggctggagtttacagttggcaaagtaagcggccagctcgagttgccgacggacgttttcgggctcttctttcgcgagtcgtcttcgctcgatctccatggtcattcctaggatgtattctcgacagctgtcgatcacctctcgaacctgctggacctgcgcatcggtgttgacgacgacgagcatcatcgactggaggaccgatctgaataaggtctcggcctctgcgaacttgccctttttgacaaagttgtaagcctcctgaaggtcggtctgaacgatgtggttcaacgaagatcgaacggcgggtaggatgtcgttcgtcgatgtcgtctgtgggttccgcctggcgtagagctttatcgggtcgaccgagccgtttccttggatgtacacatgggaagcttggtaggtcgaaaggaagagcggcttgaggggctcaaagttgacggccgcgatctgctggttcaagagcttcatggcggtctcgaacgaaccggcggcgactctgtcggccgccagaggcgagttccggatccagatgtcgtactcgctcgtcccggcctgagtgtcatcctccgggatggcttcctcgacctcggcctcctcggcttcggcggtgtgatcagggacgtcgttatcgagatcccaaccctcgccttcttcctcgtcgtcctggccatcgtccccgttcaacgggttgtccgccccccaggcgctcagctcagccgcgccagccgtggcggcctcgttgctggacaccggcagagcgggagcggccgagccgccggtgagcgttctggcgaaaaagttctcacccgtcgacttggacggccagtcttgtcggaacgactgagtgatcggcgtcgggggagccaaggtggatcgggtgaacgaacgcttgggcacatcctcctccgtcatccctgcgttctcgaggatcccttcggccgcctcctccaacccggcggtcttggcggcaaagtaggccaaggaatccatcccgacctctcggagcacgttcacccgttcctcgacgtctcccaagtagagagagttctggaaccgggccatctgatctcctcgcttgccggcgatggtctgcatcatcttgagtctctcctggttaccggtgatgaggtagaggaatgagagtcgatccaagttctttgtcttttggtaagcgatctccacgatctacagacagggtccgaagggatattggaaaggataaagagaaagaaaaaaaagaagaaaaaaaaaacagagattctcaacattagtcccaacaaacagttgaccatgagggtttctcctcaagagagaggaaagaaaaaacatgaagaaacgaaggtcgatcgcaccttctgagctccctgcttgagagcctgttcggccagtctgacccagacctcctgcttttctaccgcccgggccatctcgagagcgacgtcgaggtttccacactcgatcgccagatcaaaccttgtgctctgatcctggacaaagtgcagggcgatctcggcgtagcccttcttctggaggtaggcgatgatgctctgaccgacgaggttggaggttcggatgatctgtagcatctcatcaaagttttctttggcgagcgccagcttgaatcggtactcggtcgggtcaatctcgatcgttcgaggtcgaccggctcggtcgagacaatggacgatctttcctttgatcctggtcaggtagattggctgatccagggtcttgatgattccggtgtcgctgtaaggtataggtcggatgggggtttaggaagtagcaacaagttgaccaagaggtaaggagagtaaaaaagcacacatcagcttcgaagctttctcgcgtcttcgtgcaatcaaacagaaagaggtacatacccagaggtcaaggtgtacttgatatggttcaacgtggtgtagaccaagatacctgaatcgtcccaggcggccgacttgattctgatagtctcgtgaatcatgcaagactgatcgagactcttgttggcgatcgtgatggctgatcggatggtggtcataatgatggtgatccgacatccccgctttcgtcagctcgggaacagtttggaaaacaaaacaaaaaaaaaacaaaaaggaggaatagagaatagtagaggaaagaaaagagtaggagaactgactgtgcttgcccaacaaggcgacctggctgttatctgcgttccagatgacatacttgatcggctgggtggtcaactcgttcagcactcgctgctgctgcaagtcaaagagcgagatcgatgtgggtccggcgaggaggacacaggccgttccaccgtagaagatctctctggtctcgaccgggaccttgaaggatttgacgattgagaatgaaaggtctctgatctcgatggtctgttggagagaagaaaggcggggagggggggggcggaggcgaaagcgatcgcgcgcaagacgtcagccggagagttagatatttgagaatgaagaaagaagcaccgggatagatgagaaaggcagaaaaccagcttacctgggtggccttgttgaagacggcgaacctgtttcgggcgacaaagagcatggatgttccttgacctcgcttggcatccgtgttggaatcaccgacgataccctcctgtggcagtctgaaaaagtcaaagatcccaccgtccgaggcctggaatgtacgcggcacgcaacagacgggcaggcagaccgatcagtctgaatactaggcgacacaatggaaagagaacgacagagaaaagaggagaagagcgcacctcggagacaaggatggacttttcggcagggttgtaactcaacgtgagggcgggcgagtgtgccggtcctagtttcttgatgttcatcactccgatatcggaaccgttgctgagatcgtgaactctgacggttttttcacggacgtagaacagtttctcctggtacagactgaaagctggtcgttctctctcgagcttgaagacgatgactccgttgtcatgggctgtcgggcagaggcacgagggagatggagaaagagtgtgatcaggatggagaaggggtaaaagaaaaccaaagaaaaagacaaaagcagagggacgaaaggatccacataccagcagcaaagaggttcaactctgggtgagcgatcaagccccagaaccgatcgtgttctctcctaaacgtctggacgggcgtccgcttgcccatgtcccagatccggatcgtcttgtcctcaccggcagagaggatgagctcgtgcctgggatggaagagtccgacgaggacgttgttgaagtgacctcggcaggtgtcgacctcccaggctttggtgtccgacattcgccagagcttgatctgtcggtcgtccgagctcgagacgatcaaaggcaacgtcgggtggaacgaggcccagctgggtggtaggaaaaagagatgcgagagcgttcagctctgttttggttcgctttttcgctcagacaaagaaaagaaaaaagaaaaaaaaagataggaaagggactgactttactccacggtcatgtccttccaacacgtatttgaccacggcgtcggtacttccgaacaggtcggcctgaccggcattcgcccgggccatctgctcttcgaacgacatcggctgatgggacgtgtttttctttcgaagaccggagatatcccaaaccctgacggtaagatccatcgaggcggagacgacaaggtcctctttcgggtggaactgggcacacatcacgtagtgattgtgtccactgaatggaggggggaagagaaacaaccggggttatagagagtattcggaaaaaggcgcgacaggatgtgtcaacgggttgatttctctcgagaaaagcataggcagagggtagatctgatggaaactcacgtcaggatggcaatacagtttctcgactgccagttccatattctgatcgtttgatcatccgacgcagagatgatccaggggtactcatggtggaagaagacggttcggacgtagtcgagatctggcagatgttgaacgagggaaacaacccagctcggtcagccgagagcaaagaacggggaggcaggcagagaaagagaaagagaaagactgacggccgttcatggtgaacaagcacttttttgtcttgtagttccagaccttgatcttgtaatcatcagcggccgaggcaaagattggctgggtcggatgaaagcagatccctctgactgggccgtcgtgttcttcgaaccgttcgaccagggtacccatctggtagttccatagctggatcgttccgttgtgaagggacgcaagcagaagaggaagctttgggtctgtgtgaataaaaggaaggataggtcaactcaatggttctccatctgagatggacggtcgagagaaggtcgagaagaaacacgaacggaaggcgacgccctttactctgggagatttggactcgaactagcggtcggggggggggacgcgaaggttgacgacgaggcagcagtaggaaggccaagaacacgtccaaacgatgcaggcgatgatgaacagaagagttgagagaacaagaacgaaagaagaagaagaaaaaaaaannnnnnnnnnggagagacggtcagtcgttcttccttgggctgggagttgatggatggggggggggacatacctgatcgttcggaacaagcacagatggacacgcatgccatcacacaagcagcggcatcaccagcagcagcagcgacgccgacacaagcaccaacatcaacagaagaacatacacaacacaacacatacacacacgcaagagagagagatgagaggatgaaaacagagcgtcagcgagtgttccagccggtctcttctgttttttctctactcgtcctgaccgcctctgccggggcatgcatcctgaacactgacctttgtgagcatgcgcatcttggagagcgtccgagtgaagcaagcacgggggcgggg

SEQ ID NO: 112 - DNA, 1420 bp, Xanthophyllomyces dendrorhous
cgccccctctgatgggatggatgcggagggagagaaagagggaggacgacagaatgatggagggatagatggacagaaggcaaggacacgctggcgcacacaaaaagaacaagaacagagagacagaggcagatatgacggattctcattgcatctttgatccaacatacacatccacacacacacacacacacacataggcagcctcagtcttcgtcttgttcgatgatggtctcgtagcctacaccgatccagtccccacagccgtcacacccgatcacgtccacaccttgctcgagatcgaccgtgcggatgacgaacaaagcggagcatcggcagggatacgtgtaatacaccggctcgtcttcttcatcgtcgtcttcgtcgtcgtcgtcttgctcagtcgtcccgtccgtcccgtcctccctggcagagtaatgagacgtaaagagggacaaagagatcaccgtccgtggattcatcggttgaggagtgttggtctctctgtcggctgggcgagcaaaagagaacgcgatggacgattgtatgaacacaagaacaaagtcagtacacatcttgacagtgaggacggggaacaccaagaggagaaagaaatcgatagaagaagaaagagagaaagaagagaaagaaaaaaggacagccaagatacgtaccggagtgcgagtgcataggtgcatcaagccgaccgagtctgagctctcgatcgtaggtctccctgccgagcgggtctctgagagagttccaagcctgggtgatccgatggatgtgctcgttgtgttctccatgtccgtccgagtcctggccgtgtttgtccggatggtactgaggacggccggcgagcaaagcaatggccaaagaagaacacgaacagagcgccatcagcccacattcgttctccacagcactaagcaagacagacagacaaatgaacaaaccccataccttcaacaccgcgttcctccaggcggatcggatggactgttgggaggcatccgagggaacgtccaggatctcgtacgccgtttgtggacgtagaggtgaaatcgtcgggaactcttctttttttgttttttctcttttgtccttttttacttgattgacgtaaggcgcacgaagagaacgccgaacgttaaacgctatctccgaccaaagagagagcgagaggaagcgaaagaagagccaaaccggatggacggttggggagaaacgcaacgaacacgatcccagagcgaaaccgccggctgatagagaaagcgggattcagtctggccattgaacggatgatgacatcctacaacacatcctataacacatcaacccacatcagcaccagccgttatccgtaacacaccatcgggccagtccaacacggacgtggggaacatacaacccatcgagg

SEQ ID NO: 113 - DNA, 4024 bp, Xanthophyllomyces dendrorhous
ttccttcttctcaccatcacccccatcatccatcgttcagcccatctcgagctcgctcattcccacaggcgcacacagcacacgctcgtctagatctcctcctcgttccagtccgtactttcgatcatgtccgctcctaatgtttctcccaagaaggttcgtctcctccgctttcttccgttgatcgagcgagatccgttcttttttggaatcgtctcgccttgttggctcacttgattctttcgtctctatgcccatcgtttgtgtgcgtgtgtgtgtgtgcatgtcgctcggatcatcctcccttgcctctgtggcacgctcggttggccggtgtatagagggtgctcgtcaccggcggtgccggatacatcggtccgtccatctgcctggcgctggttctctccttccgacaattcctagaagatactcttcggaactaacatcgaccgtgatctcgtctcttttcttttcctttgttttcttttcttttcttctctgctcttctccctttggcctgcctccactaggctcccacgccgtgctagaactcgtgctcacacagagatatcagcccgtggtgatcgacaacggccacaactccaagtcagaggccatcaagcgaatcgaacagattgccaaacaacaactcgggttcgtgtcctcggtcgaccatccgtacactcgttctgcatacgttgactgacctagatccttgcgtttgctcttgccttgatccgctttgtgtgtgtgtgtgtgtgtgtgtgtgtgtcttggttgatcgatcgcctcagcgatgccaacgtagagccgatcgataccttcaacctcgatctcacctcccaggatgcagtcgattccgtcttcaaggcctatgaggggaagggtggcatctggggtgtcgtccatatcgccgttcgtccgaatgcttccttggttttgttcttgtcaagctcacgttcgttagcttacccggtcttctctccgtctgcctgtttcccgcttcctcggtcgcccgagctaggcctggaaggccgtaggagagtctgcggagaagccactcaagtactaccagaacaacgtgtcggccacgatcaacttgcttgatgtacgttcttcttgtgttccatgtagaatggatagacatacacgagtacatgtcctccttaccctacttctagcccatcactcacgcctttccccttctgctttgccgtccgttgcccgttcagtcgatgcaacgattcaacgtcaagcacatcgtctactcttcctctgccaccgtatacggtactccggagctgatccctatcccagagagctctcccatcaagccagagagtgtctacggacgaacgaaagccgtttgcgaggccgtcctccgagatctcgtcagaggtcggtcgctctgtgtgtttctaatgaccgcaaggtcctcggtgtctgatttgtttcttccctcttttcctttcttttcctttcctctctcctttcctcccttctcctctcctctcctctcctctctacaggtgatccggagctcaaggctatctcccttcgatacttcaagtgagctccttccttaccgaccggcatatcttgatcttgtcactcgccttcttcttcttctttcttgtgctgaccttctttctcttccttctcttctactccctatttccgcccctccgtcagccctgcaggagcgcacccctccggtttgattggagaggatccaaggggaaagccgttgaacttgatcccactcctggccgctatggccgtgggcagatacgtcgagggaggactcaaggtgtttggagatgattaccccaccgtgtaggtcattccttgtgctccgttgtctttgtcttggaatcatctcgctcacacaagatggaactccccccttctggatctggaccgaaacctcaacaagcgacggaacgtgtgtccgagattacctccacgtcgtcgacctcgccaaaggacacgtcctcgcgtgtgacgcgctcgagtctcccacactcttcaaaactccggatctctccgctaccgcctcctcgccagccaacaggccggcgcccaccttggcctcgctcccgacctcggacgactttgcacagggcatcaactttagggcgttcaacttgggcaaaggaaaggccttcagtgtgctccagatcatcaaggcgatggagaaggcgttcggcacgacgttcccctacgaggtcgtcggcagaagggagggcgacgttccggacttgacggcagacccgtcgttggcagagaaggagcttggcttcctcgccaccagaggcctcgaagaggcctgcagggatctcgagaagtggcagaccggaaaccccaatggttcgtcccggtagtccctttggttgccatcagtcttcacatacgctttctcggtctttttgtacttatcagtgctcatgttttgtttccttataggctacgactctctctaaacggaggaaacctggcctcttttcacccttcccccttgctctgatgttgtctacacaaactaatctcatgtgttggcaatcagctccgctcgtctctctttccttctttttttctctgtttgcttctcctctgcttgcagtccatctatggtcgatacccacgtctagagtatgtggtgatttccatcatcttgctttttttcttgtcgttttcttttctgatctctctctctctggttcccatctgtcgctcgccttcactgtgttcgtcgtctcatagacatcttggaattggtttcttttttgttttcaaactttggtcgctttcttggatgtgtttatctctatcgtataatctttctcttgcttccttcttttctccagaccttttcttctgccgctcaaatgcgtccttcttcacagacgggtcctggtcttgtcttttacttatttctttgctctatcttgttcttttggtcgttcttgcttcttgttctatattttatgtcatcttataatgcacagcgggcagatcgtcgtcgtcgtcgtcgtcgctgaaataagaatgttcaagttgacgataatttaccaatcccctccggctaacgagattagccggcggcttcccgggtttctctccatccgttcatctttatctgggccgctgcctagcttgaacccgataacctactttcattccacccacgacatcaagcatccaagcatccaaacggattcacgcccacgcgtacagaccgatcaagtcagaaagcacacacccaacgcagagagaatgccgctgatcacagattccctccagctacaagagatagacgttaacgtgtttacctcgctccccgggatactggagaaaccaaagaacgcaagaggagtctttggcggccaggtcatcgctcaggccgtcttggcagctacaaaacgagccccagaggggtttgtcttgcactcgctgcatgtgtgtcttcttctctcatttgatccttgtcatctttccgtctcttggcttcccttcgtctttcgcttttgaaccggatgaagatcggctttcggtaggcttactgaagaaccgatggtttctctttcggatagagctacttcctagcagcagcctcctcttccctcccactcatcttcttcacggatctcctccgccaggggagatcgtacgccacgttctcggtctatgccactcagaagggtgtcaagatcttctatctgatctgtagtttcaaatcgaccgaagacggcgcactttcgttccaggttcgtcgtcctcgtcttcttgttcttgctctttctgctggtttggccccagtacgctcaagtcaacgccgtcgctgatatcttccggtactagatgaaactgccggaaacagtcccgagaccgtcagactgtgtgctcagagaggaccgtctgcagacctttttggatcagagtcattcctggccttcagccgtcagagtcactctacagaacgtcgtcaacgtccgtgttctttcttcttcttcttcttcttctt

SEQ ID NO: 114 - DNA, 39310 bp, Xanthophyllomyces dendrorhous
  misc_feature (15398)..(15440): n is a, c, g, or t
  misc_feature (17445)..(17454): n is a, c, g, or t
  misc_feature (17545)..(17554): n is a, c, g, or t
ttcttcttcttcttcttcttcttcttcttcttcttctctttctcttgattcatgaggaactcggtctctcaatgcccaccctttcttgccatcctttggccttcctctttcggacaccaacaggaaaggagggactcggcgatagccatcatggatgccccgctccctgaatcgatgagaccccaacgggcgttctggctgaaggtgaagggtattgaggtcggtgcgctggatcgtgggatgcagaaggtgtgtccttcctttcttgctgttgcgctttctccctttctcttcccttgttgcgtttcgattttcgcgctaggaaggacgtgtctagactgatcgacaccgatctcggaacatctcggttgggggtttggggtatttaaaatgatatcaataaaaggcggtactagcatatctgtcagatttcttgttcatcggaaccgcccatagaccgctagggatcacaaattccttggagcccgggaagggaaagtatgagcttgggatgaacgtctcgctcgatcataccatttggttctacgagtttcgtccccttccttttcttgttctcaatccgcgctctgtctatgactgctgctgctgctgatgatgatgatgacgacaacgacgacggcgttttcaccgatccgatgggatcaacagtaacgatttcgatacatgcaactggctgcttcacctgatggaacccatcgtggggggtgacggccgagcgacggtgcacggaaagatctttacagaacacggaaagttggtcgccgtgactactcaggaaggtgtcgtcagacctaaacgaccggctggctcatccaagttgtagtctcgtccgggtttagaccttccggccggagggatcggacatacatacggggatgcacacgatcagtgttcttccttcctatctttctatctttctttctccctattcttttcttttcttttctctttcgtttctctactttcttcgtggctgtcgttgcaaggcacgcgcatcgctactttcgttcctaaaacagcatgcaactctctccgtctccccccgtatggtcactctcgacaagcccttcggtttctctcttctctgttttctttttctttttcttttttcttgtggtataagagagcaatactagaaatacaacagtatccaagactgaacgaccccagcccagacttttccctttgcttgttcttcgatctctgtctaatcttcacgtaggcgctggctgtggaactgttcacatatgcgtatgtttccaaacaaacggccgacagatagagatgatgaaagaacgcaaacacacacatatgcaggttgtcagatacgaaagcaagtgctccaagacgaccgaacgacattcagtcggacgctgtcatcggcatacaccctcatcagcagggaacgagagaaggagagacgtacgatatccttcatctgactattcgcatcgtcgaactgtttctggagatactttgcctatcgaaaccggtaccatgtgtggatcaaattggccggataaagcacgccacacattctctgctcggtcagtcggttactcaaacgtaaatagaatcatctgctcttgctctaaagcgagacctgtcggacggaccttcttagttagattggtgatctcgtccgagagcgcggcttcttctgtcgaatgggcttcttccagtgtggatcttggctggaggaggaacctgtttgtatggtttgtttgatttcatttccgtttcgttttttgaatcgagtacagacgaatgatttcgtccgtcagtgtttcacacacaagcatcatgtgtcggccgggaagacactcattcgtgaggtgggtacgcacatctttccgacccctttgtacatccgaacgctttcctcactcggaacatcgcccagctggcggacagtcagctggagcatcttccgttccctctctttcgcgaggatctgggcgttgacgagcgagagttctttacgagatttctggagctgcacttggatttgttgaaggacctaaacgaagaagaaagaaacccaagccgtcagaacggacaaactcgagatactcgaccgattccaacgctcacacgatgaatcgtttcctcgttgagaccggacatgtcgatagagctggtgcgatgcttctagaacgatgcctgtatggtgattcttccgggatgatcgctcacagatgtcgtctctctgggtgtgtatgctgatggaggccaagggagaaaaaggaggtggatgcttaggtaagcatatatcacgtgacatacttcttggttacgcttggttacacacgctcttttcccactcgctctctctctcttttcgtctcgctcgtcgttccgctcactctcacctccaccaacaatcttctgtgtctctcctccctccaatcttcttggatctcacgtctcgcaaatggatcagtacgacgaggtaggtgtattttgtttgtgtgtgtgtgtgtgtgctttgtttgagcgtctgggtgtggtcggctgatcgttcgtcctatgtccgaaaaaaacaaatctacttcctggtggaatcttgatctagtttggaaactacatcgttcgttcttcttctacttctcttcttattctctctttatctcttacttcctatcataacgtcatcaccgagactgacctggtctctgctactggccgctaaacgcgtctcgctcgaacccaacaatcaatcaatcaatcgataaagggaccggactctgatgattctgacttggagagatccgacgacgaaggagtggatcattccgcccccgggccggttcctcaacagcagcaacagcaacagcctttagaggggtttgatgatgataacgaagatcacccgatggatggtgcgctcaccgttggactcagtgcagatggtgagtcggacttgttctctttctcgctctacgtatgatcgagagaatctgaaccgtccgagcttgttcatctacgttttcctccattctttcttgccctttctttcgcgtcgctttcgctacctttgctgctaaactcgatcttcccgacctaatcagccggaccggcaaattcaatcgtcctacacgaaaacaaaaggtattacaagtcggccgaggagacgtacggagaagatgtcgaggcgatggttcaggaggaggacgcccagctgttgtccgagccgattgtccagccagtgaaggttcggaagtacaacttggcagagaaggatatgccggtgactcgatacgaaaagacgtgagctactactttgttagatcttgtttgtcctctttctttctttccttcagactaagaattcggccatcgcgtcgtgaacgtcgtcactcgaaacgcgacggacgatcagcttcatgttagatatgcttcacttcccggatatgatgcgaaacgtcgtcgtcgccggacatctccaccacggaaagacctcgctaatggatatgctcgtgttcgagacccatcagatgacttggaacgccgaccagcctgtcagttcttccttctgatcttctccctccctcttttccctagatcctgtcgcttcctttgtagtactcaacgatatgatcacaaatctgctcacaggaacgatataccgatacccatgttctttctcgatcacgaggaatctctgtcaagtcatcccccatgtcgctcgtccttcagaccaccaagggtaaatcccatttggtcaacttgatcgatacccctggacatgtcaactttgtggatgaggtcgctgctgctagtcgattggccgacggaatgatcctcgtagtcgatgtggttgaaggagtaagcatttttagtttcttgtgctttcttctctgatcgcgttccataggcaaaagagtttgtcttcgtttctcgttcgtcctatctaaacgtgtctttttttctttttcacctcgcgcgacttcttcctttgccaaggtcatgtccaacacagaagacatcattcgtcatgctctctccgaaaacatctcgctcaccctcgtcctcaacaagatcgaccgattgatcctcgagcttcgattgccccctcaggaggcatactacaaaatcaagcatacgatcgaagaagttaacaccgtcatctcgtccgtcaacccggacccgaaacttaggttaagcccagagagaggaaacgtcgctttcgcgagcacacagaccggatggtgcttcaccctcggaagctttgccaaattatactcggatactttcggtacgcgttttcgctcggctctcttctttctctccttttcttgcaaacacagagcgaaccatccgagacgtacgctgaatttcttgctctttcttctttgcttcttcttcttcttcctcttcttcttcttctctcctcaatttctggacgtgttggatgatgatctcgaacgtgtaatgaatacggatgggggtgtggatttgtgtgggaatgcgcatgcatacgggtggtgatggtgaactcgtcttaacaaatcctaggtccccttgatgttgaccaattcgcgcagaggttatggggaaacatctattacgatgtcgaaaaccgcaagtttacaaaatcggccggctcgatcgatactccaaggtcattcgtccatttcgtattggaacccctctacaagctatacactcaggtatgtcctttctcatgctgcatctcactcgagttggttcctatgcctgatgaaagagcgtgttttgggtcggataggtcttgagtgaagattccgaaaatttgaaaaacacgctggcctcccttgggatcgttctcaagccagcgacgtacaagatcgatgtcaagccgttgttgaaggtggtgttggatcagttcttcggcccatcgactggtttggtcgacatgatcgtcaaccatgttcctagtccgaaagagaacgccgccaacaagattcagcacacctacaccggacccctcaacaccgacttggccgcttccatgctcaaggttgatcccgaaggccctgtggtcatccacgtgtccaagctgtacccgacatcagacgcgcaggagtttagggcgtttggaagggtgatgagcggaactcttaagaggggtcagccggtcaaggtattgggagaaggttattcgatcgacgatgaagaagatatggtgatctctgtggtggacaacctttggatctatgagtccaggtcagtttgcttcccctctttcctatctctcttccaggtctcttgggtttcatctttttgctcatcgccgttccccgcctcgtctgtatagatatttcgtcgagactgaggaagctcccccgggttgtctagtgctcatcggtggaatcgacaactcgatcaccaagaccgccaccatcgtgtccacctcgatcgaggacgacctatacatcttccgacccatcaagcacatcacacaatccgtcttgaagatcgctgtcgagccgatcgcgccttcagagcttcccaagatgttggacggtcttcgaaagatcaacaagtcttacccgctcgtgtcgaccaaggttgaagagagtggagagcatatcatccttggaaccggagagctttatttggactcggtcatgcatgacctaagaaggatctttgcagaaatcgagatcaaggtgtccgatccgatcgttcagttcagagagaccgtcatcgagacttctgctctcaaggtgtatgccgagacccccaacaagaagtaagtgctcaccgttacttttccagcgacgcattgtctggcgagtgcaaactgatggttggcttgttcgaaccttcacttggcaattaacaacctgcaaaggaataaactcacgatgattgccgagcccttggagaccgggattgcagaggatatcgagaccggtcgggtatcgatgaggatgactcctaaggagagaggaaagcactttgaggccaagtaccaatgggatctgttggcttcgagatctatctgggccttcggaccggatgagaacggaccgaatatcttgatggatgatacccttccttccgaagtcagtactgttcatttcgctcaaacccctcctcttcttccgtgcctgttttgtttagacatttgtcggccttaagcttaccggatcgaatttgtctcttctctcttctttcttctgacgatggggatgaacgggcaacaggttgataagaagttactgctcagcgtgaaggagtcgatcaagcaaggattccagtggggagctagagaaggaccgttgtgcgacgaacgtgagttccgaacactatcacctttatttatctagattcctccgagtcacgtactcagacagattcgcttttctcctatctctctagcgatacgcaatgtcaagttcagaatcttggatgctactattgcacaggaagctattcttcgaggtagtggtcagatcatccccacagctcgacgagtctgctattcttctttcctcatggtccgttgttgttcttcttatttcttctattttttctctttcctacctcgccttgtgtgctctttcctttattgactgtctatgtatcgcctggaaaacaataaaggcgtctcctcgattgatggagcccatgttctctgtcgaggtccaggcaccggcggattgtgtctccgccgtcttcaccgtcctagctcgtcgacgaggacacgttgttagggatacacccaaggctggttccccactctataccgtcaaggcgttgatccctgtgttggatgccaatggtttcgagacggacctgagaactgccacgcagggtcaggctttctgcacgcaaacattcgatcattgggctatagttccaggttcgcttctctattttctatcttttctctttccttgttctcctcccccttgcggataatgcatttttggttctgatatcgttgtttcattacgtgtcgttttaacaggagacccgaccgatacctctattgttcttcggcctttagagccagctactggacagtctttggctagagatcttgttcttaagacgcgaaggcgaaaaggccttggtgatggaatcgctgtttcgaaatatttggagcaaggttcgttcatccaagcaaatcaagccgactttgtttccccgaggttgctgatgtttatatccccttatcgatctcgttcaatctctttcactcgcttcttacagatacgatcatcgcgctttcagcatcgggcaacgcagatctcctcggttaagtattatgttttcatgcaacaaaaagcgaatgcacagggtgcccttcctcctgtacaatctcgaactataacttggtcactccttttcatccttcctcatctcttggaacatcgttccttcttttcttgaccttcctcctccgtcttgcaatgtattacaatagagaatgaatttactcttctgtactgtacgaacgaacaagctttctgtgtcgatcacaatttctggagcttcatcagtgtcatccttgttctctctgttcgctcatcttttagaagagtcaaggaagatgggttaaaagagcgcctttgagacgagacatgaacatatatatatcaaagttcatcctcactatcgctccccatgatgagttcgctcacaatctttcccctcttacctttcgtcctcctccctttcttatcaaccacaacttcctcgatctctcctctccagaccttccagtttttttctaacctctcgatcgtacgttccactcgttccgcccattcatcttctttctcggacgcctcgacctctgccaggtcagcaggctctatcggatctcccatccttccttctgctagaccgaggacacagtcccagagtgctccttccgatttgttcagattcgactgatcagactcgatcaggatccgatcagggttacagcactcgatcgtttctggaagattggtcaatcgggggatctttgtaggtgtccgtgttggatagagaaggagtggagatagggataggtatatgttgggatgttctttctgcggtttatcataaagatgaagtcggtttaaatgaaagcggaacaaacaaacgagacaggacagagaatcggtgcaagatctttctgtctccttcagagaagagaacaggattcagtagaagaacgtaaagacaaacctcaaggggcttccaagcctgccattttaacccacaactatgtatcagcaccttgactctattcctccaaacgagcctgtctcctccaaacacatccatctcccaatatctcagcgcatcctccacccaagacgtcactccgaccgcgtggaagctgactgaacgaccccactcgacatctataggtgtgctcagaatgatatccttcaagacggccatctgagcatgaaggatcgttcgttgatgctccagcgaggtgaagaaaggtgtcagcttcatccgagtcagccttgccatatctttcttttccttctcttcactctccaagtctaacttggtcaatgaagacgtcctaagggtacaggactggtttgtgatgtcctcatccgatcgatgcgcttccaaccattcaaccggaaacgggaccctcgcctttttgtctagaccgacttctcccagctgagaccctgggaacttcgagagattatccttcaagccagggaggagactcgatagatgcgtcgggttcggaaggtacggtaataagtcgtcaagaagcctctggtgaaggagcggtgatttgttggtgagaaagacagagctatagtgatctcgtttggagaaactcggactgatgggcttgagagagatctgatgggtcgtccatgggtgataacctgtcgagaagaccttttcgagccatcaaacacccttctcctcttactcaatcatccttccatagccaatgaaacagattggctcaccgaaagaaggaatgactctatttccagctcctaccgctagttcgaccacctgctgttgatccttgaaatcagaactcatcgccgtgatcgagccaacattcaatccctttagaatctctagcgatccaggtgaaggcgtcgatgttgttggatggcaatgtgcatcatgcactgggtagtcggggggaaatcgacgcgatggtcggtttgtttggaaggtttcaccacgatcaacccaagcgattaatgaagaagggagaggtgagctcggtatccgtggcaaggaagaataggatgaactggtacaagctcacgtcgactcagaagtttaggatctggaccttggcttaattctcctgaacgagcaggacggtcagcgtagtcgatggacgggcacatactatagaacagccagtttgctttggctccaagaaagtaacctcaaccgatgatggttgatacatgggccttctggactagggtgttctcagaccacaaaccaccaaaatcgtataactcataggtttagtttgcccccgccgatgggggcagtgtcagcgtcggcatcagtcttagcgtcagcggcagctgtgttaaacaccagcacaattgatgatgcgaaagattgttctcctcacccgacttcatgggctttgccagctgttgagattgatgtctccttctttgtaaacaatttcgtttaatcggttcgactggctgtaagtcatgatgaacaacctggtggtggatctacagtccatagaccaaggcatatagagacaaagagaaaggaatgatatgtttgatcgagccacatgcagctgatctcagacatggcatccaaagtgttatgtatacaacagaagagaagagatcaagtctccctgctgaaagatcctccttctcctctaccgacacgtcgcctgagctcactcgttctcctcttctgcatgcaatgagtcatgtcccatctcgaacagatgatcagggatcgggatcccatgaaagttcatcacagcttgaacgtcaacctgagtttgaattccgaggtcagattccaacgaaacatccggatcattctgactatcctgtctatcctgctctattggttgggttagaccggaaggaatgacagacactgaagtagacccagatgggcgtgaagcatcagaaggagtcgacgtgaagtcgaccatctctgtgtcttctttcggcgacaataacgaatcttgtgtcgttcgcttgtctgcagaatcggcaactaaagctgtcgcttgatctgaggagacgatgtcttcttgagcagatctagtcgactggactgaacgaaacccccaaggagagcccgtcagaatttgaacatcatccccgccttcctcatgtttgacgtcaagctctggaagagtaacaggtcgagagactggcgacggagtgtccatcaccaatagatctagtatatcttcatccgagttcgttgtcgctttcttcttcgacttcgtcgtggtcggagtctgcgttagatgcgtggacggccttcctgctcctgttgtcgcgccacatggagaaccactcgcgatcttcttcttccgagactttttgttcggtaattcagcttgagaaaacgactttacttctaaggttgacgcccttgatttccctttcgataacgaagagggaccaccggcagagcctgttaaagatttaacatggggagtcgtgtgccgtactttggcgcccggctgttgagttctactttctgcagacaactcgccagtggatggtcgtctgacagccgcctgcgactgcgatccacgcgaaggaacagaagagaaagacgcgtcttgactcgactttgacaggtcgaggtctcccgatttctgagaaagatatcgacgcgattgggagcgcagtttagaaggagagacattcatgtctgggcttgtggttgaggtccgtggttgggactgtgattggagttgagactgtgactgtctttgggatgaaggtgagccggccggatgaggacgcgaagaagagtgaagaaaagacgaggtggaggtgacgatgatggctgccggtgcggacccagaagtcgacgagtcggcatggtatgagctggtctgctgagtgaagtcagacaacctaggcttcttgtgatgaccgagttgctctatcagagattctgttgctcatgaggaggtaagaaaacatgcagcagatcagatttctatatatctccctcaaatcgatacatccattcatccggtttgcattgagtagatccatcagaggaagaaatgtttctctgcgaattctataagaagctactcacctagtcctacactcttcttcccctcccctctgtaccatccatctcgaaatgttacctctaacgcgtctctatcgactgattctgaacgtttcagatgatcctcgacgtgtttctcaagtgagccaagcgtgagaaacgatagacggcagaatccccagcggcattgatgaaacgatgtgtctccccacccgctcatgttggttattagatgtgttcttgagagaaagattatgccctaaggcttggtgagagttacctcaaccgatgatggttgatacgtgatccttctagggttaggatgtcttcagaccagaaacctccaagatcccatgggtcacgtgttcaatttgtgccagcctcaacctcatcctcaacggttatggcaatctcaaattcagcctcactaaaaacagtgtcgaactctagcatccttgcctcctagttcttctcctggtgaagggctatatgcagcattttgcgcgacgcgtccacatctctgttccaccaagtctgagaacgaacagagaaaaacgatgagtactcgacacaatgtcctgaaacattctattagtgatgactctatcgtccatgaaaaaaacataaattgacaaagaaataaaacaaaacaaaacaaaacaaaacaaaacaaaacaaaacaaaacaaaacaaaacagaaagacaaggagacagagatgatattcttgatcgggccatgtgcagctgatcttagcggtgtcccgttagacgcccggtgtcaggtatacaacatgatcatcacagtggtcgaggcagccaatggtcttaagatcgttctcaatctctggaatgtattggctgagctgaacacatacttggatgcttgacttatcagactcatctcttcttctgtcagactcgctacctcaatgctgccaagtgttgtagatatggtgaatataagtctgagagtagaaattgatacaaaggatcaggttctgtacagttccttgtataaaaaccatatggcttcggttactacaaagcaacctcagccggtggtagtcgatacatgtcaatcaaccaagcgttccttgcagtctgtttgatccatgccaaagaacccttcgtctgccctcaactcgttcgttcccctctgcagatgttcgatccggcagctcgattgcttctactaattccgtttcaatccacttatcctgttgggttcgctcaacatcaatctcagtctcgagggagtggtcaagagaaattcgtgggggatacctcctcttgaggccttcctttggttggtcacgcgaagtcagggaacgaagggttgttttgatagaaagtgcagagagcgtgccgcctggaaaaaaggcatggtaagaagactgtgagatgtgcttcgagaagagaaaatactgactgtacgcaggagatattccagtgtcgatcaaaaggatcgctccatcacaacgagataccataccctgtacaacaaaggtggagagtcaagatacatatcgatatactctcgatagtcttagaaagtagaaacacacctcaaaattcggggtgtgacccatgacgagccttcggactccgatacggctcatgacctcctttgcattccgacaggcttctacatctggatccgtagcgtatcctctgtaccaaactgtttggggtgtgaatgtcaaaccaggaaggaataatagttgcgatcagtcttgagttagggattcttgatagccggtatgggcctacgtacgaacaccctctccaccccaaagatgagcttcgtctggtgtcaatgttgagggtaaaccggaataagggtagggcgggcttgggttcgcttgttcatccaatgctttccagagaaacgatttggctaactcattcagcgcttgagggtagggtgtcaggttcggtgcataggtcgggagaccggcatgaatgaaagatacggcctgtgccatgaagaacattagcatttggtattgccccgtaggcatagtgagagtgacctcaactgatggttgtcgatacatggcacttttggacttgggtgccctcagaccacaaagcaccaaatcagcaattgaggcaactggttaacgtacaggataaggagatgaggattctgaaccgagtttcagcggatgaagaggaactttggctgtcaaagagtagctatagactcaaccaaacatcagtaagaagtctaatgagcaagagaagggattttgctcttacttcgaaagccacatttttccaagctccccgcgtggcgaaagcgcctgtcgcctgttctgaagtccgtcgtatgtcttgatgtcatcatgtgtgacgtatcgccagtcacctgcataccacaatggaaggaaagtcacataaggatccggaccttagaacagtttgaagacaagacgaacccagagcgttcatgatttcatgattgcccaataatgataagaattgcccgccatttttgatagcatctgatcggagcgactccataaatctatagagctcgatggtgtcgtgtcctcgactgaacagctccttgtatcaggacggcatgtgttctgtcacaagtatcagggcgaacgagagagaagaaactcactcaacgatgtctccggtttgtacgagtgtaccattgccgagaatccatctatcctgacgatctatgactcctgccatccgaaatacacgcttggcggtaggtagagaaccatggagatctcctaccgcaatgatctggctaaagaaaattgggtcagagtcatccgctatcggctctttggcaaccggactgttggacggaagcgaggttgaaggggagagaatgaggagaataactatggctgtgagtacaaagagaatgaattgaattcttgtgatcataacggccatgtatgtctctatcgggacagatagagtgctaggttcagtgatagctatgaccgatgatggttgatacgtatcctcttggacttgggtgccctcagactacaaaccatcaagatcctatgggtcacgtgtttaccttacctccattggcaggtgttagagcgaaagctgggctgataacaggagggctacaattgaagtagccacagaaggaatctgaggttcaaagaaagaagctcaggcgcttggaataagggaaacaggattgatagaatcactaggtaacgaggacagaaggacgaggaagggtagaagtagaaagtagaaagtagaaagtagaaagtaataaagaaatcaggcttcagctatctatggacaactggtcgaggacgcccgtcttgtacatggttcttagatatcatgagctctgaaaggaatgtgcgcgcaatacattgcacaccgcatacgacacgtgggagacttgatacataagaaacaggatacgtgggaagccagagaggaaggagagatgagagtgaagggtctacgggtcagcctgtagaatgaatgatgctcaggcaacatccttgacagtaatcctctaaccctaacttctcgtcacacgtgactctttcggcgtgacacagtcacgtgatacgtaaaacttgttttattctcaaaaacacattttgaaggagtctacaatgttcccttcattcctccatcattcactgtttcaatctctttctgaagagtgagtcttcaattctttaaacgaacacacctatctttcttcggaggtgaagccaaggctctttgaatgatgcatacgtctatccatgacgctcaatgaaacaactagtcttgcacgacgatgatgttctcatgttaaccatctttcgggactgaaactcgagctcctggttccctcttcctccacttcccatctatttattgctgcttctatctgttttattgtgcgtttatccaaattccaagatctttttcactgactttttttccctccaaatattttgtcaacgaatgtagatgtcctaggttttatgattttatgattctatgatttaatgagctttcctgtcacgctggttacacagccaactgtcgcaaatgtaacattatgagcgtgtacttgagatcgttgagagcacgcgtcacaagtttccctcccttttttttttttttttttnnnnnnnnnnnnnnnnnnnnnnnnnnnnnnnnnnnnnnnnnnntccttaccgtcccgccttcttttcgttgcttgtctttttgtctctttcctgttcccgctttgtgctcttgttttagctttttcgtttcttccgtcttcttggcatcgacccagtgatatggaaggttggacccacaaaagagatcatgaaaacgtgctctgtccgataaattgatgcatgttcagtggaatagaccacgatcgagaacaagattgagaaaatgaaatgataggttaacattcatccattcattctatccgggacatcatgacgaaacggagacggttgtactcgtctttttggtcttttgagttttcttaatggtttctaccccttcggtgatttagcatctcaccaacttactggatcaaactgaggctgaggcgagtggccggccgatggttgtggctgatcggagaggaataggaacgagatggaggtaactcccgttgcgcggactgaagggtcatacagttgtcaaatatatgctaagattcaaagacgtggcgttttctttttttgtatgtgcgtgcctctttgttgtcagttaaggaaccgatgaccaagtcaaaggcacgatgatcaaacaggcgagaaggtatggagggtaactgagcggcggaatcaattcaagaagccgtccaccggtacagatagatgaacaaccggccacccaacatgcttttctcaagatggcgcatcaggtcggttcggacgacagatgcgtttttctattttgccttaatcgaatttgacttgaacattacgtaacgaatgaggcaatcattgtttatttatcggttttcttcctctcaccacttttcttttgatgtttttttggttatagactaaaaaagcttatcgggccggatgatctctcttagtgcgttttcttgcagaacccttttctgcgctaacatcttgtttgcccgtttaatccttcccgtcttccaagagcctttcgtcatcattggccgcggttgtatatttgtatgtgtgcgatgaatacgtgtgcatccttttattgcattgcgctccactcaaggactgttctcggaagagaggacgatcgagaactcatgattacagttgaggctgcctcaatggttttgtgaaactgagagcgaacacgtcaaggggagacaaaacaaagaaggaaagacaacgagtcgagagagcgttgttgaaacgctcttgaactttgaagaaacgaaaaaaggaggctgagtaaaatggaagaggacagcacttggtggtagtccgcgaattcagtcctaaacccacgcagggccaataaagcccgatgcgcccatcagtcctcacgctgcttcggcatatcccctctgccctgggtacctctcgtggtacctcatcccgcattccctgtcaagtggcaaccacgtcctcttgctctcgctgatcactactgagcgccctttgtttttatgttcggtgagcgccgccccgaaacgtttctggagtgctggtggtggtcggagaaacaacaacaataacaacagtcatcgttctcatctagaatgagcataccgagagagacccaaacgtaaaaacgcaatataccaaacaaagggagaggtacccacggcgtgcgcacctatgaacggaagcaagcacgcacatgggattcatctggcaaagacagtcaactcaatcctataaagcatcgtcctcacttgtactcactcttgctctctatcccgcttaacgtccttcaaagtcccttcgacctttcctatcaaaagccatcttaccctttcttttcctttcctctcttctttgacactataaaacatgatcttccctaaggccacccttgttacacttgctcttgcctccttggccgctgccgctcctatcgcctctgttgatcccgaggtacgtcatcgttcatgatcgcgacgaatattcaagcgcaatgttacatgaccaagctgacttgtaatgtccgtgatgtcatatcgatagtggcagaaccacgccgccnnnnnnnnnngacctcaagcgagacgtgactcctgagtggcagaaccacgccgccgacctcaagcgagacgtgactcctgagtggcagaaccacgccgccnnnnnnnnnngacctcaagtaaatatgtagaccaaaatctgttcctaagaatatgtcgttgtaattgtcagtcctagcctgttccctatctccgtcttaaatacaactccaactgaccttgatctctcaaacactcctgcgcgcgtagagcaatctgcttttcatcatgtcgggtctttactcgcctcttgcattccctgtttccttcttctatatagcctccaaactctgcttattgcctatttccggagtcgttcctttgttgccgttctgctattatctattcgttcctggtgcctgagtcttttgagagtgtcagaatgcatctcttctgaaaaacctttgtcctatacactcctttccttccaccattgctccttctttactttcgtttcttctcatttatcacccccaaaaacatattacctgccctattcgttcgtccttttgcccctccatacctttatcacttacctttgtatgaaatacctctttatgacactcttccgttgaattgggcgaatcagagaaaccaaaacataaacaacataaatatatcctttgaatttagagaactaacatctagagatcgtcgttctcttcctcgtcgatacagctttcctcctcttcgtgtactgattcaaatcactcgctttcgctttcgcttccactcacgctctcatcactataactcatatcactcccgctctcgcttccactatcctcatcatccccccctaggccggagagaacccttcgttcgacagcatacccgaacgtctcgaacgagtttgcgatctcttctgctttcccaggagcagacgtacaagcgacaacagagcttgctgggtcaaatatcggcaagatgtatttcctaagcgctcctagaatctcggatttggtcaccgactttgagaatacacacatgaagttagttcaaatgaagagacgcaaaaaaggcttctcatctgataacgctctcgggtttcaaattttgggacgaacctgcatgcgactcaaaagatcccttgaagaagaacgcttcaagacttcgttgttgaacgctagactacacgctgatgagagagacttctctttttgcgcgtatgcgaacacaagggatgattttgcggcttcgacgatgttcgaatccagtttgatctagtcatccccaaaaagatgggaagaaacgggttagtttgaggagaagctgcgcaaaaaaagacaaaagagagagtcgaaccgtctcatcggctagacctcgaataacacgagcaccctcctcgaaagctttgaatgcatcgggagactgaatatataccaatgagtaagcaaaagtaataaaattgtgagcacgataagaaaaaaggatgaaagaccagtgccgttgtatcaagcagagacagacgaagccactcactcggtagacataaaaaccaacggtgccggactcaatcgacagcgttactccacaaccgtaggcgaacccggcacctctgatatacttccaaagataactttccagagcattcaatactgctttcgtcacttccaaactcggtagatcggggtgatcccatccaacgacgcccttagcggtgtgattggagtaactgccctcgatactgggcaatgtgacaaggacggcctacaaagtaagtggaatgattggaaaaaaaacaggttaacgggttgagcaaatgaatacaagcaggatgaataaaagcagctgtaattactgatttcgaaggcgcctttccaagaggagagagagcatccttggaccaagggacagcgcctaattcggatttctgtttgaaaatgaggaagtaagaacgttcgcattcagattacgttggcacaagtagcaagcatatattcgacgaacaggcaaagctttaaagttcttgagccagctagacctgggctcagagaggttcaggatgtctcccgagacagctactctcaagtttcgaggagcagtgactgtgtcaacgtcacatacgtaagaccaaagaggaactatcagttcccatgaactactgacgtcacagttagacgggagaagaaagaagaggaatgttgacttactgatttctctgaacttctcaagatccctaatgacactctcaggatcgtccttcagtctggtagctacttcgggtaagaactccaattgcctcaacaacccattggcgacactcgtgctcttcccctcatccatgatcatcctctccgacacactcctcgcgaccgagcttccgtccctcttctgctgaggcaattcttgaacaagcttcgcgatggtgacctctaatcgatccttgacgaatgtggagccccagataagatctcgaatccaagcgatagtcgaaccatactggtgcttctccactttgatctgaattcgtagcagatcctggaaagcaccagcgcacccataatcggtgtagtactgaacagtttgacttatgaattaaattgaaaaatagcatgtcaaaattcacaagtacagtaagctgacaagattcgagatatagaagaaaagtcgacatactcattaagttgattaatcacatcctcatgactcaactcggaaccgttagctcgtttgataggcaatgagaaaaacgagtcttgccataaagaggcatacctgtcgcaacacgaacaagtgtatcagcatcggaagactcctttgtttaccataaccaaagccagtcaactcacggtcgaagatccgcaggtagatcagccgtagagagatacacattcaaggtaagaaagttagactgaaattaagttgaaaacatgtcagtacaatgtacgccaaataaagttacacatgaacgaacctggagatgactaaagtgaatgaaaaagggaagattttccccgtcgaaagcaatgcactcttgaacttggcctttcttcgaaacctttccatcgttgacagcagtttcaactgggatccacgaaatgctgttgacctaccgacccgtcacgagaggcatgaggagagtcagttggtgactcaaatgcaagttgacaaagacaacgaccagatgcttacatttgggatctggaaactttccaagatttcctttggaatttctctatcgttcgctgctttggccgccttcagctcttctcctttctgcctgagaccgtcctcgcctaggtcttttcgttgctgcttgatacgttccttctcggccgtctcgaccttagttgccagagcagccgacggcttaccaatgactgtgattgaaggagcagatgccaggtatctaaacgaggtcacgatgttcactattgagggtcatcctgatctagagagacagaagccgatgggagagaagaagaggaaagaagctagtcacttacttgtcgaggaatgcagaccagtcggtactggtccaggattccaattcatcatagtgtctcatgaagttatgggattcctgtagatcttctccgttagggtttccataaagaagatctagaacgtcgtcatataacatgtccatgtcagtatcaccttctcatcctgactagaacacaattatatagagaggacctaccacttatgacagcagcatcaataatcccctctctgatttgtcgggaatgacaacacatgtaccaagttgactggatcagaacaaggtcgttaacaccatagaaatgaacagaaagctcacggtttagcttcaagattgtgtagcgtctgtctcttctctctcctaaagaccatacccatcctttccatgtctataccttccttgacaatgttctgaaggaccttcttcaccattccactcatcttgtccaattgctcggcgggtacgtccgagagatagaacgccagttcgttaacggctacccggttgctagtgtaaagatcgattgatgtacataacggttcgggaatctctacaaattctttgttcaacggcgcaatgggcgagtcggtcagataagtagtcaaaactgatttttggtcccaataagaaaaaagagtgttcagtaagctttctgtgtagatcgaacacaaggaatcatatacggaccatcaatggcaaggttatcaatgaggttttccctctttactccttcaaacccgatttggacctctcctacactctcatctgcctctagaaattcaactacttcttctttctcttccgaagaccactcgacgggctcctttgtacttgtctcgaggaaaggccgcttccagtcagctggaggaaaactcggcgtcttggagagaatgtaaggctcgacgatttcattcagcgtatgcaggagtgaagggagtgggcaagaggaaccggtaatgagtaagtgaagattgtgagggagatagagagacgagtgatattctttgacttcatgacagcacacgttgaagattgccagtcagcatacatgtatacacaactgagcggaagacagacagatgagatgattgacttacttttctcgacagtgaggtccctaagtgcgcccattagacctccggtctcgcttcgataggcattagattgaggatacatgatccgttgcatcctagagatatacgagacagagccgagcgataacccgattagatggcataatttacgaagctcggttatgtttgactcacttgagcgccatcagatccccacttccattttctcgagcctgcatctctgcatagacaactccagcgttttcacccttctcattgacatggtgaacttccgtgacgaagctttcttttgtcaaagtcgggtagagaatatgatcaatgtaaacaggaagtagcttgagaaagccttcacctccagcgcaagagattgtataggctgtcatttgagtgtgtatcgtagtacattttcgaatacatgcatgttgtgttgtcagtttctggtagatgaaggtagaggaagatgaaagaatagcgcaaaccagtatgatcattgtcggtccatgcgttggttccatcggcaaacgacttatttgctaggttgtccaggatccccttgtaagggtagctcgaagatcccagaaagatgaggtgctctagggtatggggtcgtccggtactacataggagaagaaaaaacgaggtatacatcgatgcataatcagactcgttgatcatacatgtattcacttctattggcattttgggtcaaatacgaactcatcaaaaatctcggtaggctaacagcaaaagaaggggaaagacacgtcaatctggcaagctccgcttatactgtcaaacaattataggctttcaagacgatagagtgtgtgcgcaccacggtgaatgtcccgtttacgataggtccaggaacaccagcccaggtaacggatagaccggtctttgtcgatctccatttttgaatcggaacagtggaagaggggggagtaaacgatctgactgatctcggtcaagaagcacacatatgattccaattcaagatacgggccacagtaagccagtcgtgcacgtacaacgcatgaaaacaatggttctgatagatttacataccaagttcataatttccatagacagtctgcccttcctccatgggaagaggagtcgtggtgggctgagtgtgaagagacatccttttgagcggtgagtagggcgtagaaaaggaagctgaagaaaacgatcggatgaacaaagtggccaggtaaggtttagtgtgttggagtttgaaatttctgagtgagtactggagcatacaacagatggggctcaaataaacggatctttgattgaaagaatggcctgatcgctcggagagtcggtcgagatggtttgacagaatgttcagatgactggtggaggtagcgagatcaagacgttataatagagactacaaatatttctaatcaagtcagagtgtttgatagttcgtgacttttaggttcccgcgcgacgagaatttgactgtgaagtatcacagtctggactacggcattttgtactgatgagagaagctactgatcaaaaatcgacaggcagacgataggcaacggtccatattcgtattcaaccatcttgtaggtcaattactgatcgataaactcgagagagttcaagttgaaaccaagagttgcatacccataacacttgttcgactcaggttcttctgtgaaacaaagaaaaaagaggttctatataacgagtgatttgagtgggagaaatatcggactaggatcatcttatgattaaagagaaatcaagtctgaagacgaattaagcacggacattcgattgacgagcagcgacggcgaacaagaagttgaggttagaactcgactggactgatagagaattgatgttgcacacagctagccagaccatcttactgttcggaacaaaaatgggagaatcaaactcgatctacgcaagctaagagtgtgatgtgataagataacagcaataagagtgtataaatctctcccaaagaactttccaaactggtcgagcaaagatgaaactgaggagtttcgaccaagattaccattaacacaagaatacaaccgtttactttgttctatgtaagaagagtgggaagaacactgtatagtcggcagaaagaaagataatctctgggcaggctgagccaactcattaagaaaaatgtccatatcgaggtcacatagagaacagcttctaactcaacagatatatcacctttgcttctgtctcacctgaagagatatctttgggtttactctactttcaaaggtataatcaggaaaggacatgtgtgctgccatcttgataattctctttcgatcgcttatcaaagcaaaacaaagatctgcacgtgacggctcaaggcttacataagtacatcacgtgatcagggctggccctggcccaaattttttcttacagtttacagagaaatctttcttttttttccactttccttcttcaaaccagtttaggtctttttgcactcgacctcttattcttactttcttgtctccttcccctcccccctttacttcttttattctttaaaaatggctttcggaggttagttggcttgttctcccattcaatgggttgtttggtttgccgagatcgctaacttatgagcttttgctgctgtgattttccctccacaacttttccttcgcaacttttcgtcttcaaataaaacttcttaacacatacaattctttcccgcttcatcttccccttcctcaaacacccaaaatctaaacagaacgaggtggacgaggtggtggacgaggcggcttcggcggtgatcgaggtggacgaggtggaggacgaggtggatttggtgcctccggaggacgaggtggaggacgaggtggctttggtggtgaccgaggaggtcgaggtacgtttatgactcttcttccaatattcttcccaatgaattatcagcctgatcttgtacttcgttacaactcttttctcctctttatatcttggactcgtaaaatttaatctaccactcacctcacattcaactctcgacctttttactttggcaatcaataatttacaaatgactcaggaggagcccgaggtggggcccgaggagccgatcgaggacggggtggccgaggaggaggacgaggaggagcccgaggtggaaaggctggtgtcggcgctaagggtggagctgctgtgatcctcgagccccacagacacaagggtgtgttcatcgccaagggcaaggttcgttttaattctcttttcctcaacgcgcctagtttgttgctatcaacgcttctagttctaatacctacgctacatttcatttatctaggagcacctccttgtctcccgaaacttggttcccggagagtctgtctacggagaaaagcgaattaccatcgcctcccctggagaggatggtactgagaacaagaccgagtaccgagtttggaaccccttccgatccaagttggctgccggaattcttggaggtctcgacgagatctacattgcccctgggaagaaggtgctctaccttggagctgcctctggaacctccgtctcccacgttgctgacgtcgtcggacctgagggaaccgtttacgctgttgagttctctcaccgatctggtcgagatctgatcaacatggccaagaagaggacgaacgtcatccccatcattgaggacgctcgataccccaacaagtaccgaatgcttctctccatggtcgatgtcatctttgccgatgttgcccagcccgatcaggctcgaattgttgccctcaacgcccatcacttcttgaagaacggaggacacatcgttgtctctatcaaggcttcgtgtatcgactctaccgccccggcagaggctgtgttcgccgccgaggtcaagaggatgcaggctgagaacatcaagccccacgaacagcttactttggagccctacgagcgagaccacgccatggttgttggatcctacctcaggcacaagtaatcgtcggtgacacttactttgaccttgctttgcgttgttcctcacgtcctgtaaactttcctcttcccctccccccatctccccggtgatgccctcgtgagggtgttccttcttcaccctatctccctcggcctgaatcctgcgctctcgccaagctctgcatttatgttttcatctttcctactcattctctttcgttctttatctactgcttttgatttctttatttttcttttcttcctaccaattttttttccggaacgcacaccctttttctttttggcagttggcaggcgggtgtagaatactttcacgatcaaaaacaggaaaaagggaaggaattcttcatgtgcttttccccctgacatctaacaagttgtgtccgcaaacgcatcatccttcctcttggcgaatatttctcccctttcttttgcaagaaccagaataagaatgaaagagttgcctccgcagaccagcatcctgacccactgagcatgtagtaagtatactttgaaagacagaaagagagtttgtttccgagctttctattgccacgttctgtgtgtgtgtatgtgtattttgtcaagttttcttaacgtgtttccttcgattagctcccgaagaagggccatcaaggaatgtaaccatgtaaagaatcaagacgaatgcgcagtcaaagcctatgacgcaaatgttcgtaaaatacataattcgtggtgtgcccgtagtccactgtctaatcattttgcttagtgtgacaactcaaaccgtaaccaccgtctcagtttcgctctcgctctcgctctcgctcatcctcgttcctccttcttgttcttctctcgtggtaaacggctttctcaccttctctcttctttcttctccatcctttcttctacgccttctcattctgtcgattgatcagattctagtcgctagggcacatactctattcgatctggccagctctgtttgattggtcgactgtttgtccatcagttcttacctttctcgacaaacaggctctttccccttgtttttacccgatcgccctgtcagtcgtactctcaagctcggttcgttattctatcccttctatatctcctgctttgcctcagagtgtcaggtgtttgtgtccgttcggctagaagctctgcttgatctacttcgttagtagctttgcttctcttcttctcctctgacatccgccaaagggacttgatcgctaaacgtaccgcatccgaatcttctttcttgacagccatcagagaccgatcctgtacccgacccttgatccaattttgttcccttccccctctattccttacttacccgatatcttttggtcatctcatccacatcttgatatatctgaattcggtgtctcgatcatcactttgtcgctcctgcggttaactctcaaagttcctggtcggtatatttctcttccaactcatgaagatcataaagcaaagaaagaaaaaccgcatgttactcactgtgtctgctcttgtattctctcgttcgggattatccttgaaaacacaaatagaaatcttggcgacccgatcatccggtatattggtccatctgtagaatctcgacctaatccgtacgtacctatcacaaccctcctggttgactctcttctagctctgtcgtccctttcctcttcgattcgtagtattaggaaaccatctaatctccttgctgccctttcatctggcgcatgactgcatctcgtctccgcattcgaccctcttgatctctcctccatacgtacttcgtgatggataaggaagatgcctcagtcaagacctcgcaggacatcgttcagccagtcttcgggtggcagtcacggtagtggtggctcctgtgctatgggttcgtcctatctgcccttttcatctctcttatagacctaggagattcgttatgtttctagactctttctttttttctttctggtgatctcaagctaatactatgccttcaaatccctccaacgcgttctcaggttcagaagccacacctcctcatgtttcctacaacgcttacgcccaaccaccactctacccagttttacccatctcgtataaggattctgaaacaaaccagaacgcccatacgccgacgttctcatcgtcatctcctaaatccaactctcccatatcttcgccttccttccgagctttgagccctcgaagattgtcgatatcaaactcgccggatgggttgtatccgttggaaccaccgctgcctccaccagggtttcaaccgccggtggcatttaatccggccgcccaatcctatcttcaatcttcgagagagggtgaaagtagtggtagcccatcaagcgagcagtcaggaacaaatcgagaagtggtcgagccaagatgttagtgtcccatctttctcttctgttattcgttcaactgtgctgacaatttttttcaaattcaatagtgggatcgccgtctctgacgggtccaacaagctctaactcgtcgaccctttctcaatctcagatccgtctagctcaagcagtgtcagctgcccgtcccatatttcgaagggcgagttccggctcatcggtgtcatctaccaagtctaaccgttcttctgcagacaaaaattcctctcactcatcacccaatctaaaacattcgaaacctttgcaatctgacaacgatgggagcagtggcaccggaccctcatcatcgaccggcgtacaggaaacttcatccaccctgtccaactctgtccatccaccgatgtctcttcgattgccctctactctacaaagcttacacaattctcggttcaattcagatccctccaatgtccagtctagtcacgattcgtccctctcggacggcgtggtttcctctaaaagtgctccggtctcgactagtgcaagctctttagaacgactacactctagtatatcctccccggcctcttttatgcctgggaccccaagatctaatcatgacgcttgggactctgtctggcctgctgtctccccatactccatccctcatcttccatcaaaaccgagtagcagtagttctagcgttaaaaatagtccaccgaatactttaaacgggttatcctctcccatgcacatcgctctcagtccgtcgacgtcatttccacctggtttcggtagtctaacgaaccggacgccactttctggtcacgctcatcatcggagaacgacaagcatcggtcgagtgccatctcctggaacttctcctctactcgggatgtcgccgagcggctctcactctaatcctgaacgcccgtcaagtcctgcgaaaaggagaaacagtttgagtccttccgatcattatgggactgagaaccgaacattgggaagtccgcctccgttatcactagccggaggatcatccaccttattgtcaggtccggagattttgccgggcaaggacaaaggtaagggcaagtcgagagagattcatccatacaatggccacctcggattaggattggcggacgtagaggcggattcaagtaaagaaggcgggaaggataagattgattccgacacaagatcttctgacagatcagacaggcctctcttgttgatcgaagggagatcggtgtccaacgagtccaatgcaagtcaagacagtacagaaacagtcagacctgtgtcgtcagaatatcctatcaattcacccagtgaagaagataccacgtcttctagtccagtttctactagatctttaacaagccccgagagctcgtccaatcctttgacaccaccgccgccatcttcgtcgcttgacccatctcaacaaacacactcagctccccctcttacccaccgaagagcatcgtccccatccccgctccgctcttctcctactgtaaaatcgaaaacaggtcctttcgccccgtttccagtgcgggcatcatcacctctgtatcattcttctatgatgtcgagcgctgctcggagtacatcccccatgctcgaaaactcggccttggttcattcatcagaattgaaaagtccaagaccggttcgaattgaactgccactatctgatctcgttcatcggtacgaggaaggttacttcggggaagaggagaaagagaatgacaatgaacgaccgacagaggagaaagaggcacctccagatggaacaccaaatgatctggagtcaccgtctacgcaggaaaggctacacgagaaggaagtcttggaaggacgtaaccacttggcgagtgctagggaaactgtgccgatattgatggaggacaatagtgaagggttccactctccaacatcgctggctcctgccgaggcgttgtcgcctgttttagcttcagagaaaggagtagaagagaaggaggatgatgtagaagagaaggacgagcgaacaaaggagaaagaagaggaagtagaagacgagttggacccgacaacgacatttaccttctctgtgcctccaacgttttcgcctccaccttcatgtaccttatctagtgcgcatgtcatcaaaccgcgtgctttgagctcttccccacctgcgttgtctgtaacttcgttcccgttcagaggtccgctttctccagatttatctcctgccttatcccagcaaactcccggctcgttctttccacctcaacctccgtttgatccgtctattcaaccgacggacgagaccaatgtagatgtgatatttcctcagagtggactagtcggcgcacctgggccggcacaaatgggaagagatgggtatctggctgtttcggaggacatggaccttgaggatgaaggtctgaccactctcgaacggattttcttgctcagtaaaagcgagtttgcccatcatcggttcgtctttctcttatttttctttttttttcctctataagagaccatcatcattgatttcgaactcgagaaactaattatatgcggtatggtcgtccgatgttttgtcacctattactttcttttctcattgccgatccgtatatatagaatatttatctccaaagtgattggagactgggtggaagatgtggacccatgcgaaactgtagaatatgttttaccgttgttaaactcgttaggaactgacgaaggtatgtgtcaccttccttttgaatttagtcagatttgagacctaaagattaagggcttgtgtctgggtatttttatcttgttagacgagtctgtgagagaagcattggcacctagcctgcacaaaatcctctggtttttctattctgtaaggcccttcatttcatgctctcaaggccaatctcggacggtgttgacattcttcttacgtgtaccctctgtagtcttgccatctagtcgcggatgaggaggatccctacttctctgaacatcaaacggccgattgtgcgggtgaatcagctgtggttgtcacatcggacggcatagacgtcgtcccaaagccaacatccgaggaagtctcaacctactctgtgctggtttctccatcctctttggattcgagctcttccgaaggccagctgcaatctaatcactctggaccatcaacacagtcgacgctagtctcgatcgaatcagacgcaacgattcttagcgagggcagcgcgtcccatccgttcggacccgattacgataacaatggaaaacccaattctgacccagtgatgaaagatcgacctacgattaatgtccagacattcactccactcattggttcgctgcttatgagccagagctcgattgtgtgtgactcggctaaagcggctatcatcggtatcctcgctcggcttaggggcaaacagctgcccacgtttgacccctggccagaaagacatatcactataggtgaagagaagacgtgctatgcccagactggacttcatattcataaggcccaggaacttagccaggaggagaagagtattatcgagaacgagttggtccaggcaattgtcatcggaatgtctcggttggacgaaacgcagtcaccgtatgacggggactacgactactatcctgatgaagattctcatcaaagccaacaccacagtcatcactggtcagaaaaggataacactgggtcatccgcagagctaaattcagacgttcaggaagacggagattcacgtcaacctattcctgagacggattactttcccacatacgaccacgtttggaactataactctgacgatttgatagctggttccccagcgtcattagaggcagttccgtccaatgcggacagtactgagtccgacttggaggagaatgcgctaggcgaaagtgcaatgtctccaggaattgagtcgccgatgtctcgtgaaacgtacaactatctccaccccaacaccaggtttgattcacccagtgcgcctccggagaaccacagatcattgtctgaagaggagctctacaccgagcagggtatcgaggctgatgcgtccgacactcggtacttggatgagatggccattgaggcttcccatggtagacttctctcgatgaaccttatcgcgacggtcgtccagtgcggagtacttgaaggagagaatgaaatctataattctttcgttgcagaggttctgagggtacagaatgatgaatctttctcggttcgaagagaagcggcacttgcgatgggagaattactgaaagtggtttcttcagaggttgccactgagtatatggtgattagacacttattcttctcatagcagttttgcggttgactgaatatttctaacatcttcggtctttgggtctattcttgtccagttgcctctattcaactttttcgcagctgatgagagtcctcatgtccgtcaagccgcttgcctcgctcttcctgcattggccaagcatcttgttccacctgcatatcgacgcagccactgtaccgaacttgcgaacgctttcttcaacgacgagatcaaagaaattcagaacactgcactggaaattcttggagagcttatccatgctttctgtgagcaaaaggagaacgttcccgaggagctcatcgctcatttcctaggtcctccaacggacgatgatgacacccaatccagtatgccaaagacgttaagcctattctcgggcggcgagggtatgttaggatatgatgaggatcgcgattatcgacctatagtttgctcgttcaacgtaaatatcttccctatttggcactgtcttctgtgtaacgttcacaaaagctaaccactctatccatctatttatctgtgatctagtttcctgccgttgttctcagtgttggggttataggctggcctatgattcgagacttctatctcaagctaactaagaataagcaagtccaagtcaggcgaagcctggcggcttcccttcacgacatggcccagattttaggtaatgagatcacatctgtggatcttgttcccttcttttatcgttgtctggacgatgtaccagaagttcgggagcgactttgggaaaacttgcacgagtttctcgcagcactggatcgagagacctcatggccgctcattcgcaagatcggcgagctcttagtccaaggtcgattaggaaactggcgtgtacgagaacgattgatgtcgtttttgccaagcatgtcggattctatggttagggcttcgcaagggtcctacttagtcgtttctttacttcgagaaggcttgatcgaccaggtggcggctgtgagagaggcagctatgcaagtggtaagcgcatacatagacttctctttgttttggataggaaaagacgtgattcaaactaatgaccctacattttgattattttaggttccgtcactctataaagtttctcgggagctggacagcgcagacaccttgaaggctctggatgatgtgctgttctcaatgattaaaaaccctgcttatcgacagcggttgacctgtctccggtgtgtttctcgctttctggaccagaagtttgacatcaaccttctccgcgctcgtgtattctccttccttgttctcgccaaaggagatcgggttgtcgacgttcgtctttcattagccaagcttgtggcaagatttaccgaagcaggttcgtttttcaaccacttcacgaagatctatatgctctttcttctcgttcagagtgtagtgacaacgagtctgacggtgatttcctcgctttccgttctcatttttctttcgttgcatcagatggaatgtgccctgtactttcggaggctcctcctgaacttcttgatgttgctgagtcccttcggaacgacgaatcatttgatataagagaaatcatggcgaccgtctttcgaaacagtccccctcttcgacaaccttcaaccgtagcctccgtgataccaaatcgaccggcttcagctcaagcatcttcctcaaagagttccctccgaaccgttgaccctggaacgtctgtgtcgccagaccttgatttaccagctgtccttgagtcatcagaaaccgctctacaactagaaaatgtgcctcccctagattctgttcaggccatcagctttgaacaatcatcgaatcataatccgcttacagccgagccagcttctggcgatccgatctcttcacctccagaggcggacttatcgataccgttggtaggtcaaccggctccgaaaccgtcttcacacatcgtcggatcttatttttctcctgtaccagaaccgctgattgatcagcttccacgcttgcgtttgcgatcggtctctcctacattcattgatggacctggggactatgtgtccatcaatacgtctgggtcaaaaccataatccgcctcgtcgtcggctggtccaccgcagacataagctattctccagcatatttttctacctgttctttcactatattcatcttcttgcctttcaggaattcttacttgtttcaacccatgcacaacatgtctttacggttgtctttgcacgccttttgggatgttcaccaccacttaacttcctcaagacatgggcttcgcatcttcctccctcttctacactatcttttctcaatctccatagacgtagatctgtttgctcacatcgttcatgaattgttttcccttttccctatatataccttctttgtctttctttcttgtttccttttgtcatctgtttctttcaacctgaagtatccaacgtttttttatttggattcggattatatttcctttttttattttgttttccttgctttttcattcatcatccttacctcatcatccccttgatcatagtgtattatagtagtgggtcgtttccatttcctaaccaatctggttgataatgtattcaataaataggtaatttcccctattcaaccatgcaggatgcccttcaaatatttctcacttctgctaaaaggcggaagctggaagtactcgaacacaaggaatagagatcacttgagaaagataagcgcatatgataatcaattttccgtgtcaaggtggacttcagggctctgtgggatagcttctactaaagcggacatcgcgcttcggacctggttcatgaattcgagtaaggaaagcctagatttctctatgtaatgatgagccatcgtaagtcgcacgcagtcaaggcagaaagaaagtagaaggggtttcagtggttgatcaagtgcaatcgtaaaaacgatggaaggaagtcaagacggcaaaccctgcttctgttcttttgctctgatatgtgtagtctttagagcgattttctcctctcgctctcgaatcaatcgtctgttatactcctttgaccagactgccaaccaagaaaatatcagcgatgaaggccgacgatctataacttcgtagagagaaagctttgtctcacgttcgtattcgaggacgagaaggcaaagttcttaaagacacagatcaaaatggaagcttatcagctagagtctgacaacggcttttcagagtaagttgattaagaaaagcttcgtgcgcgggttctacctgacgtcatgtctagaatcaatcatagcagaagcaaaaagaaagaaagaagagaccatgagaaccagtcacgatatcccacgacaaggaagagaaaataaaaagaagaagaggtatgaccttcctgaaagtcctgatagtcattctcaaattggttgacaggcgctcttaccaaaccgtcaatatcgagaggttctgcctatgcatatccgcatcggagagatcacacatttgccgcatatgaagcaaatcgtaagcatgtaagtcgttctgcatatctcaacgacatatcacccgatgtctctgaccaaaggcattgtcagacatacctttacttctagttccccgctccatcctcccagttctctcttcttttctgttacatcttctgcttctgcttcttcgtgtgaacagtcctcaagtgtcagagtcttctcaggtggaagggatgaaccctcgacatggttcgactcgactttgttttctttctgaagcttgtcgtttctccctcctggaacatcatcatcgtctgaaggggaaagaccaaaatgagaaggaggaagagaagaggtgacaggatcaatcgggaaagccgatgtgtgttgcttgtcgtcatcgtttgtgacgacaagatccgaaggtttgacatgatgttgaggggacagggggtgacttttaggggatgggctaaacgacatagaagctgcgagataagatgaggtctagagcacgaagaatgagtagatggcagttgagtggaaggttagcagacacagatataaaagacgagtgaaagtctggccgcatatagtcaactgttcgtcctgtctgattttttgatcacctttggtcgcacgattctaattctttactttggcctacgattccttctgtaaattcattaataacagtgctcagaaagaacgaattgttggtaccgtacgaacaaagaacgcgtttaaagcccctttgtacaaacaagacgccaaaaagaaagatctgtcgtctaaagtctctgcgagggacctttttgggttgctcgctcgctaagcagactgaccccacccaaacctatctgagggactggcatgttgggcaggctgaccttggacgtctcaggtgaaatgggatgttcccgagcaggatgataggccggggatgagacccctgtagctgagggaatgggaccgacctcggcgtgggccatggcggcagcgccctgagaagtgtatcataagcaacgtcaaaaagaaaatcgaaggcatttagaaccaatgaagaccggatacgtacgaggtcactgtctttggtaggcaaggtaggtcgcttagagtcattctggacctggtctgaaatcggctttgggacagaaacttcggcctcttgtttgtcgaaccttccaatcaacgctctatcgacccaagcacccgaatacacaaggagttccgaaagtgagtttgatgctcctcaatgatactccaaaacatacaacgtacagttcttctagcagggtggaatgccggtattctaaccgagtgtttggaacattagtcttgttgatatcgtttccttcgacaccggggtaaaaccatttgtttccgatccagtgtcgcttgacttccatgtcccatccagactggagaacagagttccgagcaagctcgcacatatctacatgattgacagggtagaaatgcgcggaattcgattcataagtcaacgcgcttttcatcaacagtcagagaccaagtgacgtacctgcgggtgaaagcttgtagatttgagcggcgcaagaatactcctcgagcaaaggttccttagtgaagtggaacttcaaacgggaaaccccatcatgataaacggctcatgagtccatttgctaacaactagatatccagtgaacaacagtagatagcaagctcacctgaagaggatcgtccgtagacaatgaaacgttcattcccaatcggaagaagtcggtaatcctgttggatagacgaagtactaaatacgtcagtcgttgaacatgatttaaggggggaaaaccccataaccaatagaacgtacggatttcggtcataagtcaagaacaatgcgttgttgctcagcggagacatagccagcccgatttgtctgaggtagaacaagtattgcatgaccggtactctatgtataggaggaagagacaagactataagtcaattggctcagtttcacttgttcctgggtgaaaagacatactttcgaagcaagataccgtgagaaatagagtgggaagtaaggaaagcggaagagagatggtcggtatcacctgcctctccactgtgaggtcgaagaacgaaggtgtctggtattaaaagactctcagtcagtcgatgaagttaattaaaaaaaagaaaaagaaaaaacataagtttaacttactgaaccctctctctcttctgtaggcattcaagctagccatgttgataaacatgtagtatagcctgtaaccacgaggtacccaacgcaagcatacaagcacatcagtgacccattctgtaagggttaaactcgaacaaaccggacgatcaaagccatattcaccagtagttgtagggcgggctgtccttgatgttccaccccttcgcgttagggaactttttgtaagtccttcgctcagcctttgactcatcatccacactatcgaatccaatgactcgctgaaggaagatatgaagctcagggtgagagctggggtcctgggtgacctcgaacaatggttggaatagatctatcatttcgaagcgacggtcaggaaaaaagtgtcgacgtggacaggaaatactctcgagtgatgaccgacagacgtactcttgacgatatcctggaaattttcgatcagcccgccagccttgtatatgtcatacaaccgtgggacctgaatgagccatcgaacattgtgcgacaggagcttgttcttgacgacccattttgcaagcttgtcccattcattgacattcctaaatgaggtatgtcaaaagtaaaattcatgagtccactaatcaactgatcgagtaatcgtcttctttgatgcgacagacctagcgtaaatagaaatccgccattcgacgttctgagaagacatcaaagacatatttaatgataacgaaaagacgttgaactagacttcgtatgcgaactcaacaaccaaacttaggaaaagcttacctgatacttgctctgttctaaatcgctcatcaactctatataaatatataaatatatatatatatcggac

SEQ ID NO: 115 - DNA, 15536 bp, Xanthophyllomyces dendrorhous
tatatatatcggacagcgccgttagccaacgaacccagaatcttgccaagaatattatttcgagtgcgtaccttgagtgagctctgctaaataccgcccttcaatgtagttgtcagtcttcaggaagatctcccggaggcgggaggagccggtcgggttgtacttcaagttgaatttatcgaatctgatccccaaacaggtaacatatgagcgcggcctgctagtttctgcatttctagacttgaaaggaaaagaaaaaggacgaaccggtggtagtctccatgggcatgcatgtccatcgtgtcgatactcaaatcgtacgcggtgaaacccaaactttcaaacacctggctaagtgtgagctcgactccatcccgcacgcagacaatctcatccggcgagtgcttcatcttgctcttgatgaatcggagaagatgcttctgattcatactggctgagtgatgaatatgggtatcaacctatcaattgaaagagacgtcacgttttgtaaaagaaagagcacattacatgattagttaattctcaattgaggtacaggatgcaagaaaaccacaggacatacttttcggacgttgtagaaatctcgatgagggactcgcttcatatcagcaagttcttggtattcattaagaagagtgtagaggttccacttggatccaagatacttcagccttcggaaggcgaacgacttagccggaccgtccgagcaaactcgcaagactgtgaaatagcgaaaccacgtatagcatcagaatctgaagtgattgaaatgagcgatatgtcggttttaaaaaataacctactagattccagatcgataaagtattctcgtagagagggaagttctgtgatggatttcttctctgggtctaagacagaattagacgtatacgagtgatttatcatggtgaaagaaggtgcaggtcaatgagatgagagagattacatagtttgatacaaaaagaggtgcaggacacctcaaaatctggcgagaaatgaacgaaccatcgctctcaaagactctgtatactccatcgtctcccaactcccagcccttcgactgatcagatccaggaatcgggacatctttagcatcaaacttctcgtccctatccagaaagtggttgtccggatcattatcagacggcttccacctccaatgaggaggcggcggagagggatatatgttccagggctttctgtctgtcgaggatgagggaacaagtttcgcgagatgtgcgccggctggcttgagagaggatgcatcagaatactgggaagtcgggaaagttcaacgtcagataagcagcttatcacacgaggtgaacgtgggacaacctggacacggaacacatcaaacttacttgcatcgtctcgtcagtaaatcctctaaaatcggagtcgaaatcccgagggttgtcgccaattctctgataggagagcgccatgtacttgtctcgaaggtttagacacttctggaatgatttgctgagaagagtttgaacggattagtttatgtaacacgttccattcttgatctgaattctgaaacgctttgaatctggatacagagggataatatgagaaactcactaaagagcctcgagctcggatgtcaacccatcactgatcaaaacgtcgttggtattcccagtttgcttggaatctgcaaggcttgccttctcgttctttttgtgtctgtcatgcttgctttcaaaatctagttcatccacctcttcctccaagtcaagctcgtcgactccaagagcgggtgagagaggaggggctgcatgtttcaactccgaatgagttgtcgatgggctgacgggaccagttcggatttgatgagcaagatagtgagagtcggcctgaagattcgtcagagaccagtttggttgtgtttcagagaccaacataggaacaaagagaaacaagaaggaagctttccgttagttcacaatgagactagaaaaccatcgagagagggatggatagccgacgtgcatctcttaatctgtgttcttcctcatagtcaaatgtcgtgttgagctgctcaagcattggtgtccctgggacataggcaggtgactcgttaccatcttcatggaactgttctctctcggcaggccgtttaccacacatcagaacgaggtctagacagagatactaagatgtgagggatggatggagatacgatattctgtaaaaattcgatgatagtcagattctttgtatcaactcggctctcataagaacttcggctccggcatatccggatattgtgcgtcaatttcttgttcccctcctttggctggtccaacatcgagagtcttgcgtaatcatctctctttttcatctttcttggacacccaacgacatcatcatcatcgtcactaccatcctttgaacagaatgcactcgactgctcgcttgctctcccgttcggcttccttaggtttcatcggtctcggctcttctggccggcttcttgctcataatctcctggctggatccgctctcgagtcgtccaaacatgctaatggctctttcattgtttgcgaaccaaacgatgcaaattttggactgtttatgcacgagctcaaggagcctctgagagagaaggtcaagcgagtcgggagtggcgcagagtgagctatctatttgtcaatctggagtacgtggaaatagacaggtctgatgaaatgacgctcccggttctatcgttctagaatggctcctcttgcgtcggtcatccatacccgacttccaaactcgtcctctaaaatcgttcaatcggtctaccttcagccgccttcctcacttttggtcggactgaaagacacgacgttccctccgtcagagaatctgccgcaaggcatggacacattgttggtcgaccacacaacatatgacatcgatgttgcccagagcgtggccaaacaggtaggaagctggacgggaggacggaccggtgtggtggatgctgtctttttggaaggtagcttctctatcgttctgtctttcccctgctatttcctgctaaaactacaatcttgtttcctccttgctcgtctttattttattttgtttatacctccgcaacatgaatatcaggtaaaggagctatcccttcaggcaagatcaactttctcgtcggtggtaccaaacgagatttcgacgcggccgttccttttttgaactatataggttctagcgctactcattgtggtccttctggtgtgagtaatacctatgcaactttcttagaattctgaatggttacttactgaaaacggctacgtgtcatcgcatttggatcttacaacaggctggattgagtgttcagatcgtcaacaagtcggtctctcatcatatatcttcacatgtacagaaaacgcaagagaactcagtattagacaagctgatagtatcaaatgcaaacattcgtctacagctcgattctagcgcttaaccagattgctctatctgaaggtccgtttccatgttttcttttcttcgaccctcagtctatcaattgcaacatttgtctcatatgtatgtaatttacaacacaatcgtactctaaaggtatgctcttgggcagcagactatccctttgccccacccttctcgcctcgatcctcaaccgatcatctgcccaatcttggtcgtctgcccacaacaacccggatccgactgtgtcactcagtcatcaacctggttctaacggctacacccccattgggaggcatacaacctctgggttactcgctgacctcaaattggcgctcaacgtaggaacctctagggggtcacctatgccgttgggatattcagcggcgatgttgtatgagaacgtggtggaagagggagatctaccggaagcgaaggtaaaggacaaaggacaaaaagactttagtgtcgtttacgagtcagtcctttagtcttttcatctgtcttttctcttccgccctctttcttgtctgccaaacaaggtgactcacaccatccatcaacttttcctcggttttgcgttatgaataggtggctgcgagagcgagcggagggcgggatcgaaagttggggtcctagtgaagctgaaagctcaaagtagaacaaactcgaattatagataagctatatgtcaacggaagaaggaaaacatttctggtatcacatcaagaggaaacaaaagagaacgaccatgtataaagttctggatagaatacttgcataacaaaaatgagaagaaagaaaaacgacaaccgatcaaagatgaattcatccatctccaaacctgtttctaaacaacgcttctttaacaaacttaacaaccgactcccctccacacctttagtttcgtaactctgcaaagccgacgagatctatcaagataaaacccgcaaaatctcgacctcaagatattccctccccgggaggtgggaaacttcaaggttcaacttatagtgacttcactcgtttttcctcctcggccttggcagctttgacccaatgtccactctgatctttctttctaacggtgaaacaggcgatcccggtgtattccgtgctgtattcgtttaccatcaagcgagatcaacagaaaaagtcaagagacaaagtaagatctccatagaaaaccaggaaacagaatgaaggtggagacggacatttgccagataacagagaacgcaaagtttagatagatggccaaagcgacaaagagagagagcaggatgaagcccgaggattttgtttgggttgactgaataacgggagacctgtaagaatcaaacaggaataagattagatggcataacgggcaagaaagaccagcacaagaggtcagaagcattgacagtttggcagaaaggggaggaagcagggaagaaaacgtacacgccgaataagttgggcagattggcgtctaacgctccgatagccgtccaaaccatccatccattccacatcgggaatggcatcttagttacatgagctaggatcattgttcctaccttcagagttcgttaatcgatcgtcacggagagaagaagaagacaagaacaattccaatatcagcgacaggcagagcagagctcctccacgagaatgtcaaacacaaacagacctggtaagcgaacccgaatccaacgaatcctaaaaagtagaggaagttgtcagagtacagaattcgagtactggtcgggtagtcggccgcaagccaggcgagcaaggccgacagctggaccatgaaagggacaagtccccgaagaggagtatttatgggttgtccttttgatcggcgagcgacgacgacgttggagtagctgtaaatcattgacccagtcaatgagcaaatggagctcagacgtgagccatcgaaaactggaatgcacagcaatgtatgaacgtggagtgagagttacgagacatacctgccccagacgttaaaggccaagctgattgctccaaagatcatgaaactatcattcagtccaagatccatcagtcgcttgttctcaccaagagcgggaacgaccgagtcaagtttgaagaactggatgatgctctgatcccagaaagttgggccgtaaacgcctatccgaaaacaagataagaccagtgaagagaaagcaccgcgacccagaggtcagagtttctattctcgactgagtatattgttgggcagagacaaagacgaaccggtgatgcagtacaatacgcagatcatcagaataccctccacagggccagagaagactgagagataaagtgtgccggtgtggtactcctcccaagtggtcctggatatttgtgatagattgatgtaaagaagtgatcatatgaggacgaaggctggtcagtagacatgcttgatacagagtctacgctgtgatatgttcttaatcaaatgcaaatctcacagatagaagttagagagagaagcagcttggctagctaccgtccaccaacttctccccagattgagcgcatgggccgcaagaatgacttcgagctggatttgccaaaaagcgcgcgagaaaagaggagttttaggagatgctataggataaggaagattggagaaaagttacgaacagaagtgttcatcgcgtcacaaccatggtcaaacatctctcctaggggtcctgccatgccggttcgccgagcttgtttcctacaaaacacgtggagttttgcaaatctatttagtctgcaccttcacgtatcatctgagatgatgccgataagaaagtgagacatacccatcgattgcatccatactttggtatgcgaatagaccgataccccatctgtatggaagatatcagaagaaagaaagtttattattatttctgaaatgagaacgcgtacaaccttttaggctctctttgaaatagaggaagatattgtggacgaacgaccagtagacccaactcggaagcgcctgatcaactttgaactttgggtcgaatgcgagcattgtggcaaagttgacaaagatgatacatagaccggagaaggtgatctgtgggattgaagaagtacgcagattaacaacgaagctcaattgtaaagtctgcaagcacactcacggtgttgggcgcgatccatttcgggaagagaaggacaagtctattccagaatgggttcaagatgaatcgagaggtgatagatcttggttacgcagacaattgaatagggagacaaaagagcagaggtccatgagtatcatttgagcaatcccgggactctcgtacgaaaagacctacttgtcgataccagaatacttgctggatgattcaagtcagccaaccgaggtatcagcccaaggaatgaactctttccttcctttcatccgagccatagaataaagcaaaaaaggtgaacacaaaaagagaaagaagactgactactttgacaagttgtctatatgggtactcggaatgaatctcatgatgggccaagagctctttggcgtcgatgttcaagtatatgcgatatttgcttgctgctctgttgctgtttccttttttttcctctaaacagaatctcctatcgtagactgacgccagcaaagcatgcacgtgactcttgaaccacgtgacgtcacaactcacactacgagggttctagtcatacagggtgaagaaggatctctggtcaccatcatgtcgaacaatacatacacacctctacccgtatcccaagaacatctaggagattcccttgcgacatctcctgtcttctcgcaaaatcatgcagcaagctcaaatccagcatcttatccgcctccaccggtgcacgagacacctttggcagagaatctttgttcttacaagctcagcttgcctggagccttcacctctgatcttgacgtgatttgcacaaggggttcgagtaaagaggtttgtcctggtacacgctatctcgttgtatacctcacttgatcgttatgtcttaatcagatttggtacacacgcgctcgtttataggatatcgttgatcagctgtcttcaatctcttcgaatatactctcgcgaacgccgttagacaggatcatctttcagatacctgtaggaggtcaatggtctaccgttctggactctagttttgatgacgccatagtcaggggaaggccagatagagtcagagtgtcgatagccttgtcgagaaaagagtggtggagaagtaagttgtcgttttgtttcgcctgataaattagttggttctgatccaaactaatatcacgcatctatctccctctcattaaccatcacgatcagcttatggcttactactcgcctctccttttatcttctttttcttaataatcttatggggcttttggatgtcgtcatagatgtgcgatacaatacgataaatcttcaaagacgaactgattatatgctgttgtcacttactatgttctcaatatgcgatgtcgctctgaacatgcagcatgttctctcataactctagaccttgacctgatagaacggaaatgaaacttgtctctcacctgtcaacgacgattaaattttcactaaatctatttaggaagctgattaagctatgcgaccttattctctgtgcatctagattacgtctgacagcaaacctgaggtgaaaagcgcaagaaagaggagagaattacttctcctcgagctctcgaagcaaagcttcgatctcgtcttctcccacatctttcagtcctttcataagcttgtcaatttctttgtctccttggttcgtgttgacacttgatgtacttgttcctagagggctggtctcgtcggattgactgatagtcgtcgagagcgtggtgggtggcggaggaaagttgtcaactcccagaaattctcgaagacgagagtcttcaacggcatattcaaaatcttcgtatgactgtcgtggaaatgatcagtgatgattaagaagatagaactgcataattcgtgatatgcaggttcaagatatcgagttaagacgtaccccaacgtactgtatatgtatcaagtagcgcagaagttagacaagctcaaacatcatccgcacaggtcagatagatggaggcaaagttacgtacctctccgtcaaccagatatcctgggagcactccgttcgactttcccttccttctccaaactcgttttgcatcttcatctaacgcacagcttttcgtccgtgaagcccaatcacaatcagcattactgttggacgtgttgcagtggatatgagcactcactctgcctggttgaaaggaatgccgagaacggcgagcgttcggagaaggtactcttgttgcgttcttgctttagcttgcataggcaaagaagtcatctgtcattcggaaagggaagatagattcattcaggaccttgatttgtgcagaaaaacgagagcgatctgcatacgtatacggttactgggtgagacatcttgaatcgtccgagtactgctcacaagtcgtataaatcgttgttgtgttgaatgatgttatactgtagatgaagttgatatctatctctcgagattaatctgctcaagcatactgattgtcaccggctcagggtttatattgcaatgcgtattaataatttaaccctaaataatgacgtttgactgttgcaagctatctatatgactttacgttaacatcaccatcaccatcaccatcaccatcaccatcatcatcatcatcatcaacaatatgtcaatctttatcccgggctcgtggggtgctcaaattttcactcttgatcctgttggttgtcctttttgacaatgcccaagaaatatacagacactgatcatatctgtgggtctttcctaaaggaaacgatctatcctctctcagaaaaccctcggtcaaccgtatatacaggtcgggtcttacatgaatctcatgatggctgggtttgctgcaagactgtctcgttgggagaagaagaaagccctcactcaatcagaaaggaagctaggctgttagcaaatgtctctcatcctaacgttagttttggggcactttccctatcgtgttttccttccgtataactcaatcttgatgactctgctcgccaaccttaaatagatcatctccctcttgacgtccacctacacagtatcaccacccagtatcacattgttccttcctctcttagagacccctctctctttgatacttgactctccaagtttcaagcctgatgaggcagatttcatcggacaagcattatctattggatggcaatgcgtgagcgcggtagaggggctgcacgagcgacggatagcccatagggacatcaaggttgagaactttggccgtcaaccggatggcacggtggtaggtcctctttatttccctatatatctcaagtcaaacacaaaccatcttgcacacgttcatgtcgaactttggtctcttcttctttgatgtcagaaattattcgatctagggatcgcatgggaagagtctggaccttcaattcctggcgaaagagttgaagagagcaaagaggcactgatttctcaagtggggtctgggtaggttatgcaaactcaagcttctccctgctccgtcgttcttactaattagctctctggtaaaacaaaaccctcagcgagtatcgagctccagaactgctattctcgccacagaaatacgacccattcgcgctcgatgcttggtccttaggagtcgttcttgcacactttttcactcccttgattcgacctcgtccgttgctctctacgacttcttccaaatcatcctcagacgcatcaggcgacgacgacgacgacgatgacgatgatatggactatctgtcaacgtcatcctcgcagatcgaatcagatgatgaagacgatgcagaagacgacgacgaggaaaatggaaaaaattggaggagaaaatctctttttgtttctgatagaggagaaattgggctagcagccagcatttttcggatacttgggactcccactgatgagttatggcccgtacgtttatatcatttgcagtcaactctcctcatattcgagtccgttcctaatggctttccttgtggctgctctgtgtacgatcaggattttcatctcttccctgatagctccaaattgtctttccttccttcaccaggtccattaccctctttacaagagcttctccccaatctacccccgattgagccacttcgagctgaatggatagaacttctcggtggattcctacgactcgatccgatcaggcgaacgatgcctagggaggcattaagcttcaaagtgtttgatagtatagcaagtttcctccctgtgagctatcccggagccacattgagtagaagctgagggcgattttgttatctatttcgacttaaaaaaatgattcaagtgaaaagtgtctattgttcatctagttgtagacctatcatcctttgtaaatatatgaatgatatcttgagtatttacgttccattaaaacacatcgatatccataccccctccgtcgcattgactcaaaattgaacctagtccacacggaacaactgaagtcatgagatagaccatgtcttgcttgctcttgttgcacctcctggatcactcctaatctctttcgtccaaaagtttacggtcactttccacgtgcctactgcttcatccttaggaatgactacaactgttcgatcatcccattccggttgacgaacctcgtccaatgtccaggtgataaagaagcgttctttagtaaatgaaacgttccgataatgcgcgagagggaggagtgtcaggttgaacgtttgggcagggtgtatactttcagcctcggtcgtctcaatgaccgaaagactgtcgatcaacgagatcttttccaactgtttaatccaaaggtcctccagacaaaccgggcagaacgtaggtgtagcgaccatgcgcatcaagcagttctcatttgttggtcgataagtgacgttcccatacaaagaccgcgtaggaaaagctccgataaaatcaggatcagaattgaacttcttatctacaccgtactgagtgagttcaaccgaacagatttgtcgaataacttcttccctcactccttggtatttatcttttctgaatgaccgagagacaggcctttcggtatcgactagttcgaaagaaattacatgagctccggcagcgagtccatcaggaacaggatttcggatagatatccaagcccggtcgaccgagcctttccatccttctggtatagtccacttaattggtcttccatccagcttgaccaacatcctatcattattgtaagacgacctgttaatattctactttcaaagcgactcgagaaggaagaagagtaacccactcggcttcgtctctcaagccagctacagaaaatcggagcgcaaaatctgggtatctctcgattccatccggtacaaaaaacgtaattttccaggacgaagctgagagatcatgccatgggtacgcctgaagaggagtattcatatcctcttgacggggtttggatagagggtcggatagccaatgcgcccatttctgtttcacacaataaaaaaaaagatgccagacagagtctactgtctattttcctctccccatggacaacgtgatttggaacgaaagctcttaccgatgatttgagggacggggatgagttaactaagatagatgagagatagataaatgagcgcagagaccgagttttttgtgagttattctgatttcaatgcattcgtttccatcttcatcttcaaaacaaagtggtctataagcaaaaaaccaaaacacacctccagtgtagacaaatcctccttcgtattcctctcccacttcgatcagcgaatgctgtaggtgaaatcgatgttaacgaacaaatataccgacgacgacgttggcataaatcaagaaaagatcttactccaatctcatgccttagcaccaacgctccattgagcttggaggccgtggtaattctaaataagtagagagggtgtttagcttgtgaactgatatggtgagtccaagactcttagcgtgatataaactgatacagtttcagaaacatacgtaaattcccctcctaatccacctgcataaccgttcaccatcaaagtctaaatcagtaccaactggtcgcatcgaccaacgatggatatagaagaaaaactacaactcaaccataatatgcaaagttaccaacgatcgccatctgatcgcatcctccttcacccaaatacccttcccgaacaagtttacatgcctttctggcccgtcggcgatatcccgggtaaagcgcacgaagctcatgaccatctcggtatagtccaaatggagtcctaaaatttgcaattttttcaaggagagaccgtaggttggaacgtgcttatctaaagatacaatgtgaacatctaatctcacttctttggctgaccattagagcctaccccgctctgatgtgatcaagaaattagatgagaacaaaacacatcagtgaatgaacacagagcgaaggaggagaaagacttatagactactcaggatgtcggaaggagagttacctcttcagatggcacaaagaccccccaaaaattgaacagatcagccgtactcttaaacgtcccatcttccacgatcgagctcatcaggtgtttaacgtctttcatgaacttgcccctctcttccaggaggtctttacagacagcgcgacacacatttatatagagtcaggttaaggctactccgactaaacaagagatcaaaatttacttacaaccatccccgaagaaagcaatctacctcgagatcggacaattacagaatttccatagataaggtccgtcaaacattgtttggagtgaaggatggggatgggactgacgttaactcgattctcaacctttcctgataccctgaggggtataagctccataccgtctaactctccatccttttctccaagcacagcttgttcaggaggatctatatccgataccaccgacctgtcatcccagctcttgcaaatctcgtcaaatttcaacactcttcgatcggagggagggaaagtgaatcgtccatcggaaagaggaaggagagatgatctgtcgaacgcgagaatggtaatcaaacttgactcgagttctctccgtagaagagcggattgaggcaaccatgatccgctcttcaaatgattacaagtcaaatttaatgattggaaccgactacttgatcagtatatgtgaacgattcttcaaaccagaaaaatgattaggacaccaaacgaaccggtccattcaccagcttcctgacatcgacccaaactccgccatttgagcgaatgacctcgctcctcacacctcgcccacttcttatctgacccgtaaatggatgtgagacgagtgtacagatccgagtcgggtgatgaatctcgtatactaattcaaagatcggttcgttcttttcatcgatggacgacacaataactgatccggataactgtgaaagcaaaaagacagaaaggaggaaccaaaggaagattggcggaggacacatcgtgattgaatggactccagatttgatcaaattggatgaaatgtacagaggcagagaagagatgatttcgtaacggacatctccgaaaggtcatcatggatagaaaccagcaacaactccaagtctagcacactacatttcaagggatacactaaacgaccaagactggagaaaggggttggaaaagataagagaaggaacgataacatgcctgaggagagaacaaaataatgaacagaaggtcgaaataagaaacaggtaaagagaaaggagcttttttaggccggatattataggagtcggataccgagatcggaaagataaaaaaggtgatcctgatgaatcttttgtattcgtaagtctcaacaagatgcgacggtatggacgatacatcgagacgtaggtgtaaggcatcaatgacaggacagctaccacaaatagctgcagaaagaagttggatagaaggaaaaatgacaaaacgagaagaataaagaaaataataagggaacgcctacagacgattggaaggccagtaagaatctcgggtaaagaacaaacaaagagaagaaatagaaacgtggaagagaggaagattcctaacctcattgaatcctctcgtagaataataagtacgcgcatcgctctctgccaccgatctcccctgctctaccctctctagcagccgaatcagaaatacacacctcagcctcggtgacgggcacgactgactcgtcatcgatgtgcagccactggtttgtcggcggactattcgggccggataatgactgagagagcacagcagtggtataatggccggaggagacagtcggtccgtgatgatagacgacaccaaacaacttgtactttatcggcgtgctcgtacgtttactcggggacatgcaatcctcaggtatgatgagctctcctccgtagctgacaaccttacccatctttctcgcccctgctccaaatccacctgccgctccatcgtctccgacccaaccaaatcttttgaaggcgacgaccaaaacttttggtccaacctcgagccaacaccgcttcactgcctctctgccttttccaccggctggtcccatcacaaccccatgcacagtctcgggctcgaccaagtgctcaagtgctgtagttatgttgaaaactgacggcgaagcgatgtcaagaggtaaaggcgagaacggctcgagcgtgatagaaggcttgtgcgaaggggatggggtagagagtgagagggatgaccggagaagaccggtgaagagcgtggtgatcgacgtgggtgcagactccgtctgagagcatatgtgttgtagtcaatgtggtgagcagggcaaggaagagaagagaaaggacgatgagcatatatactaacagttttcaataagcttccctttcctttcttgcctacttcaacccatccgctatct

SEQ ID NO: 116 - DNA, 2025 bp, Xanthophyllomyces dendrorhous
cctccaccacctccgcccgatccagcaactcggagttcctcatctccttctgtaccgttgagagccttctgtgcaacctcctcctgaacgtctttcggttgccgagagagtaacccgagaacttcttcgtgaagcgtgttaaggaagaacccaaggaactcttctgcatcctcttggtgtccttgctatagagcgaggtgtgaatttaagcacattcacatcagtatcaaatgcacaacgaacaatctgaaataacaggagaagtacgaaccctcatgaacccgaaccgctccactcggcccatcgcctcataaacaccctcaggaacgaacgccccgaaaccacgatctgacttgtcgtccggtccaagcccggggaattggccttcggcaacgtaagcctcggtagccggagggaattctcgaaggaagttaatcctatatgtatttgacaatggtttttctccaaatcgcgataagtgtctgatccaggagctgtagaactcgggtgaagtgaaagacgtacatagattcgactagtgggtagtcgccggcaaggtctgccggcaaaatctgacctaggagcgaaaatagattatagaactcatgggtaaagatgagaacttgcaaaatctaccgtccgttgatccgtcgatgaaaacccatagtcagttgtgaaagcctattgacaatcctttctaaaaaaaaacgagcacaggacgaaatagatagacgacgtaccgagttaacgaaacacaagtttccgcgattgatcaaacctctggctcggactctcctcgccttatggtgaacctctcctttctttgcccctctcgctagcaattgagctaagcttgattttcctccagcagctcggcctcctggcttgatactctcagtagagctgccggccaattgagcggatcgaccgatggcatgtccgttcgaaccgcctgagacagaaacgacggaagatgccgaggacgagtttggactggctgacgaagttggtcgaagaagagctgcccaagaaacgggtggtggtttgggagctgctggggctgaagccggaaccggagtcgaggcaggggccaatttagtttccgagggcagctcagccgaggatgtactgggctcatttgtcgtcattgtcgtcgtcgttgaaaagaagattgaaggagaagccggggtagagctcgccggtgtagacgtcgaagtcttgccattgccattttcataagcaggagaggaagctcttgtcgaagatgtaggggtctggaatttactcaaagccggaagatgagcagtggatgtcgtgggagacggcttggtggaagtcgaagtcgatagaggggcagactgggtggccggggttactgattctgccaaaatacttgttctaggtttcaccttcatccttgcaggagacgaagccttggtcggttttgtgggcgatgatggttttgacgagccggcgtctatctctgaagcaggcttcgatacccgaatttcagaagcgtccgcattcgcagcttccccagacgttgtcacgcccgtcacagccgcctctgctaatgtacctgagaattctaggattgaagacgttgtcggttctgaatcagaggctgatggcacgataaccaccgattgatcgatcttagcactacttccaatgatggacccgttcgtctctctcaccctccgtcttctcggcattacatcttctttgacgtctaccatacgtccttgccactttccgacgccctttccaaacttgtctggcatttgcttcttgacctggatactgatggtcaagaacggtgcgtcagcggcttcactcggccttctgtcggcaaacagccaaggatgcggcggtggaggaagtcgggtcgttgtcgctcgggcaacaggttgagcagtttgaatgatcgacggctgttgattcggtactgacggagattttgagacggtcggtactggacttgaggaggtaggttgagaaagagtagaaactacagggggcgcc

SEQ ID NO: 117 - DNA, 24596 bp, Xanthophyllomyces dendrorhous
ggatgagaaaggtaataagattgttgaggttggaaggaggagtattgatggttcatcgaaaactgatgcggaggaggttggttatgagagtgatgaggttgaggtgatgagtgttgatgaagattgagattcggatgggcatggttcagctggggagaggcatgatggccgatatggtgggatggatagaacggagtggatggtccaggttgaggttgctgttgttgctgttgaggttgctgttggggatgcagattatggctatggttgtgattatggtgctgatgctggtgttgatgttgatgctgaggcaaaccgtatgaaggagcgatagatgggaacgtaggctgaaagccaatgtctaacggaaacgagagaaaaaatatacagagacatagaaagaagaccagcagattggagagatgaaccggaaatggtgatcagtatagaatccaagctctccgtacttgactagcgagagaacacgacagaggccactaggaaagcgacgaaggagcggaagaatagaagaaaaaaaagaagattattctccacactcagcccatcaaactgatgaccgtccttctcaactcttctcacgggacaatttactttcgcctcttttaacagtctgatgttcatctacctcggttccagccgctttcaagaagaagaaagacatcacttactgcccgattggtatatgggattgtagctgtaaggcgattgcccttgctgtggtggagggtaagcatgatggttctctccggcggacgatggaccggctataggatagaaggatgacattgattaatttttttccttctctttgctgtttgtttcgttctctatccggtttctgtaggattgtctcctaaggataaggaaacgaaatgggtgaaaaggagagaaggcgtccgaggaatagaaggtgacggtagagataaacctgaggagagaaaaaaaaagagattacgtgatggtcacacgaactgagttcgtcgtcatgttcatactcgtctaccttgcgcatcgcaagaggtcgttcaccatcaccatcgtctccttgttggtacgatatgtatagtctatagtgctgattaatgtctcatagtgactcgttagctagcctacgccacggtacaaggctttactctactttttgaactcactatttcgaccagagtgactgctctggttacaccacagaacactgtgatttcattctctagtctacctctagtctacatcgcgcatcgctgaacatttctgcacaaaccatgaggtccgagtgtgtgtgtcgaagcaggacctcaaaggaacagcgtatagaggcagacatggtattttgtttgatgactcgtggggaaccagagcaaggatcggaagggtttctcgacgactgattggccgctgtcggtgtgtcttgagctatcacaacatcaagatacaatttgtccaacattactctttctgcttgcaatctatgcttttcacataaatcgagtggcctgatcatattatcgacaacaccgctagctttcattacacaactattgtccatcagatagcctaatttcctattccttttagctgcctccacttttcgtatgctacatcgtcattgtcctgttggtgcgcaatgtcttcgataatcaacttctttcctcctgtcttttgacccaagatcaaaagaggaaatagaaagaaggcattggacttacggtcacaaaagcctggaccaatttaccaaaactactctgactcgctcgaacggattccggggtgagcgcacccaagtagttcatcgcgagcgattcccaagcgtgatatgtaaattgtccactttgttcgaaggaatggagagattcttcatgaacctgcatcattcaggagaaacttcagttgttgatattgcaagacagagcattgacagcataacacaatcaacgatgggcttacgtatcgaatccgggattcggtgcctgacccctcccatagaggccaaaagaatgcgcgctcgttcagaacggtcagttcgtttggatacctcctcgctaaagcctgttgattggaagtccatgtcgtcagcttccttgccaaggttgctagtgcgcaattaaaaagagacaacgaccaacccaaggcttccgtacactcaagccggcccaatcaccaccatcgaaatccttgtaactctccaaccacctctctaagaatcgttcacctttccgactcaagatcacagcattgcataaaccttccggatcgagtggtggtcggtccgagttgggcgaggcttccattgccatgaccatatggaacggtagaagaggcgcaaaggatcgtgtcactgaatcgatccggtaaagtatatgcacaagattagtgagagagaaaagctgttaggattcaagaactcgaggacataccaaatacatcaatatcgaggtagattcctcccgtatgttgcaaggcttgcagtcggatcacctgacagaccacaggggtttattcgagcggggggagataagttacatgtaagctgttgattttcttgctgaaggagacagcaagtcagaggtattctgaaacgttacgcacatcactcttgtgcgcaaaatgctcgagcttcctgccatatatctcgtcgggtgccggtgtctccaagagtgtcaaatgaggttccaaaaggtcccaaaatggtcctctcggcttgtacttgtaatgactgaaggaccgcaagcctgattcagttccaggtagacacacggatagacagagaccgcttccaaacacgcaatatcaatgagtatacacacaaatgaatctcatcaggctgtagattgacgatcgcgcttctgatggccaggtagctgtaatacggcagcagctcgccctcttcttcttctacgccctgcgatttatagccgtacacgtaatggacaacattcgggatcgcgtccgatctatcattcttggccggtgggtaatatgatggagatggtggaagaggcggtggaggaagaaatttggatggtttcacaagaaatggaggaggagacggagctacaagttagaagatcgcggacatcaatggtttggttgttagtctcgaacgagaggcaagagagagaagggacagatatgagcatacattgagaccagctgaacaagaagtatataagctttggaacgaatgctcccagtagcaacagccataggatcctcaagtttaacatccttattgaagagagcaatggcgaaggagggttggatctctgattttccaaagacgtcaaaaattgagaaaacgtcgactcgatcttccgtgcgttctcctgctgaccgagcggctactcacattcttgacgtgatttgacaccttgcttgtccagataggtaacatgcctggttttgtggtatagaaataaagaaaaaggacagcaggaggcagagaaacagtaaactatggacggcgagcagagagtctggaagagatgaaggcttcaggtaacctttgtgctgtgtttcgatcattcgctcttgccgtggtctgtatggaaataagtgtactacactcgatccgtctgcgcttccttccattttgtgcgaacaagcatgtcatcgcatgctgatcaagatctcgacatgatgtttttgatccatctccatcttttctcaaagttctcgttcttcttcttatagtacactgagatagacggcagaaagacttgagaaagtgaccaggcccagctgtaaccaattagatggtcatcgtaaccgccatcgtaaccaacgctaatagcacctccatcgttcgtccatctcgtcgtaccgtcttggatcctacctgaacttatcatccagtccttactcaactatctgaacaatacggcatccatatgttctctcttcgctctctagttcgaccagctcaagtgattcgctccgagcctgcgtctctgcttaggctgatctcctcttcacccagggtgttcgacaagattaccggttcagacaagatcgaccaacagagtgcggaggagcttcttaagaaggaggctgatttcagtgcgttcattcttatcctgttttcatcttcattttcaaagcctcgtatgagaatgatgatggagaaagaggaagtcgatagttctccatcatttgaatcttcgtgctatcttcctttggaaaacaacatcttcggtaatcatgttgaccgcggacgcactgaacgaatcgattgacaactttctttctgatcttcttgcaacgtatctctttcagaggaagggttggttcacactgaacctgaggaaaaggccatgatcaccgcgtaaatcgttctctccgcttctggccttgaatgttttactggtcttccaattgaattctgaatgctgactcctgaatctggaatcgacagagatcggatttccggggctcccggtatgtcctacgatttccaatcaatcagcccatctctacttttccccatgatctaaactgacctcatgtatcccatggacccacagcggagatgacacaccgatccgttcgaatctataagccgacaaagacgacaatgcagtcaggtcgagctgggttcaaccattggcgaatcgatttcgatacgttacagggctctggtcgatggatcaaccctctcatgggttgggctagttcgtaagttcaatcaatacactcgttgtctattctgaagggagatagaccaaagctgaatatctttatcggatgaacgatacagagctgattacatgcagggaatgactctcaaattcaaaacagaagaagaggctgttctttttgccgaaaaacagggtgtgtctttctgttgtgtttctagcctaaatcgtatgctaacgcaaggaagatctgattcacttggtcgcaggatgggactatgtcgtttcgaaacccaacgtgcagccattcaagcccaaggcgtacgctgagaactacgtccactctccgtacgttgtcgtctctatcttttgtatgcctatcgattcacagacaagtcaaagtatttatcttcgaatgttttctcatgatgtaggggaaagcttcgactcgccaggacaaagtaaagccatcagaatctatactgtagattcgttcaagatattctctggttctgctgaggtttgcttgaacgtgtggtattgaagcgatcaatcctcccatcttcactgttgtgtttcgtgttccattttgttgttgtgttacttcccttttgttttgtatgtttcttcttcatccatctgtcttttgttgcaatgtaatactttgtttggtgtcgttgagcgagagggaacgtctcgagtgatgtggttaagcgaagcaagtcaaacaaatgagaacaaaaacagacaagaacttctgaatttccttcatctcatacgtttctttgttcatctaccttcttcggcaattctctttctttttattttgaacacatcaagctttctttattggactcctacacaatctctttcagttcgatagtccatctgtctctttggcattctctgttcgctagtttgcctcactcacggatatcacctctcgctcaagcctcgctggtaagtccatcctactcgtctactataacgagtgtttatggttggaccgagtaatggatctctagataaaagaaaagaacatacacctagagttcttcagcagtagcttagaaggactgtgtgatgtctgtgatggcaagaaacttggtttcttggtctctttttgttagttgctgatcctacttgtttctacttttaccatcctctttctctccttctctttatccaggttcctcttttccatccatctttcatatcttctcgagcaacgaccgctcgtccgtcccaagttcgaatggattccgttaacttgtcattctctccacaggctcgttcagaactgaaccttctgccgatcaataccagttctcggagcaaatcttcatcgcgttccggttcacgttcaggttcaaactcgccaagatctttccagggtagacagagttatctgtcgagcgttaatgggcatagagtttcttcccccatcttgatcagtccaggatctacagaaagtccgtgaatgaaattttgattcaagagatcttctatctctcttgtcgcatgaattggttctggatgcatataaacatcaattgtcaccttgactgacctaacatacatcccgcctatcttgttcttttatctcgcgtgatcaagactttcaaccaccttcctactctcctcgaccgcccccactggaacgacaggatacatctctcagcctgtcgtactactattcctcaactggggcaggtggactcaattctcctgtctacacaactcggtcaatctcgagttcgtccttgtactctccagagttatcttcccctgccaaatccggtttcggaggaaactccggaggtgaagacggatcgaggtttctatcatcgaggccaatgtcttcatcagccatgatgccgactagatcttcctccagaggtgaaccacgcatgggacgtgaagaaccttctgccggcagtttgagcgcgagcgagtccctcgctagcatctccgccaatataccagcgacttcctcatctctcaatacatcagagttcggatttattcctccgaacgacccaaagaaatatgactcaccgaccacatccttgcgctcgtcatcaacatcctctagaaaaggaacaatcacgaaattctttaggcagtcaagacaagcaagtccggtagcagacgatcaactcaatgcaagtccagcaaatgaaccacctcaaaggacgagtttatcgatccgagacaggtcaagtactcgtcaaggcccgtctcgctcgccctccagctcgagtcaaacggctcgtcaaacaggggacgctagtccgctgggattcaaaagtcggcaggcctcatcatcgcaagaacagcagttatctcaagcccagagccattcgttatcccaacaagtctcaaatttgaatcctagtgcgctcgctagccgacctcttcctatccccgatgtcttacgtacaagtcctcaagaggaaccgttgaaaactgaagatcaaggaaatgaagaatgggcaaccgatatcatcaacgagcttgccatggacagtgattcggataatgccgtcgatgctggcgatcgtgacgaccaaacgaatgagattttgacaaagaagcttgagttgcaaagccttgggtctgagcccgacgtggaagtccgagagtcagaaaataagcgagcaactcgggactcctcgcggaaccgacgaaaaggagcatacagggatcacccaccagccccgttgatcaactcttggtcaactaagatgccgaccgctccttctggattcctggcggaagatgagtcgagtcctgtctcacccgaatcagattattatcggtctgcttcgtcatctccgcaaataccactagtccgattgaagggatcgacaacagagcacgagaccggaggagcgtcggcgctacttccggaagataagccttcaagtgatgatacagacaccacacctcgaattcaacaagtctctcagatggatgaatcactcagaacatctattccaagcagagagcgagacatggggttagccagggtcgaagatgacttgcgatcgcctcagacagagaactatggaactgatactgtcaagaccgaggcagaaaccggggtagagacggaggcagagggctaccagagtgagagttcatttgatgatggaacccaacctgtaagacggcagcgccagtcgacagagtactgggatcctattctgtctccagaagccagctcttggttcaaagagaacgcagaaagcttcaaaccgaaagctaaaactatcacagataacgcggaactatctagctcgtccgatcaggcaaacaaagcgagtgagggtatggtaggcaattcaggccgagccactgggttatcagcagctagagaacgtgcggcaaaagccaaaacggcctacttggcttccttaccgaatgctgtcgatgccagcggtagcactgttagatcggctactcaactcatacctactttacgattaccttcaatctctgatgaccaatcacaattaatggtttcaccgacatccaatatgaccgaaccgatatctcatgagccgcgcgactcagtcacttcaacagttttggacaacaaccatctcgacttgagcttgtcgtcctcaacatcgccttcatcgggagaacccccgatgagtggaatgaagcgcacattcagccgggcgagtggtttgggcggtagtatcgagggtccggtcagtctggatttacaagcagatgtcgagatagaagaggaacatgaggatgggggaagactagatagatcccgagacctcttcgtgaggttcgttctgtcatcatctttaatcctttaaatggtacccaaatcggctgatttgtataattttttgtcggtctcggtcttgaatttttgaaacttagatcgtcgagaacgccttcaactaatgatagttctcttagttcttctggacatcaatatagtcactccaagcagctttcgacagcgactattcggccgttgtcacctccgccttcactccctcagatccctggtttcttgtctggagctaccgactcgaccgcaacatcttcacacaattcggccctctccgaaccgccccctgttcaatctgataacaaacgacatagtttgagccatgctcgtacactggaagagctgacggcagctgtcgacagggccattaacgataccgatgatccaccgaattttgatcttcggacggactttggtgtcgtctccagctcgcaggaatttgacccgcaaaccgatggaaatgaaacaacacgtcacttgaccaggagtgaatcaatcaccagcgaggctagcacatggggcgatcacgctcccccgttgactatctcgatcaacccgcatgattcagtagaacttttggatcaagagtctgactatgtcttggtcgagagtccaagtttccctccgccaggagagatttatattcctggagacttggtaaatcttcagcggagaccgtctcatagaggatcccgaacatcagcgcctagagatgttcccattggtccttcgttgtccgtctcatcttcgacgacgttgtcagagctgccttctaatatcatcagagattcagaaccgactatgaaggttcacactcagcaaaatgtatctttgcctccatctatgaattcctcggctttaacgaacgctagacaggctgcgaccaatatgcgtcagcctctcgagtctgggcataacaataactacagcattctgcgagcctctcaatctggtactagccaaccggccaggtctctcaataaagtacatgcgtttgccccaatgggacagtggccaaaagcaatggtattttctgatgtgaagagcgtcaaatcctcgggagacagagcgtcgatgtatgcgcgaaagatcaacgagttgagtagggcagacactggacttggggagtggatcaagattgtgggtggtcacagaggtacgtcacatttgtttttatctaaagggaaatgtacagtttgttcatacatcctttcacttgcttctttgaaagtaggtcagattaagagcacaggaattcttcgacatcagaagccggatgaacatctgacggatcgcaaagtatcggctgcctcagccgtgtcagatgaagcgtttccgctccggtcatctggtccatcattccaggtccaacagatccgaaatgtctcgcccccgtcaggtgccccaccacctaatcttccatacccacagcttgcccaaggcgtaggcatgcgatcgtctccttctgttgtgtcattgaaatctgtgtcgagtcgaccgagcatgtcaaattccatcgccaatgtcgcccaggggtccggagggttttttcaaacactcggtaggagaggaagcatcagcgcgggaagtagcggagggggatctagcggaggaatgaaaggtataattgggggaagaactaaaagtccaccgggggtggtaatcgaagataccgggggacggcatgagggaaggagtagtgtgagtccgatgaagggtctcatcggaggttcgtccaaaaccggaaatcaaaaattaacaggtcctcgtgagtctatctgtcttgtcttttttttttgcttgggtcgaaaggatgtctctttactgaagcggtcttcgtcgataccttacgaacaggctcccgaaatctgtccagaacaccgtcgatctcaaacccgatcaacctcaacaacacgcctcctctaccaccccgtcgatcggtcgacctagatcatcaaatccaaaaccgacatgtcctctttcctatccctcaacgagcatctctatccgacattccatccccgcgaccagcctcgctcgattatccgatcgacgtgaattttgacaaaaatctgagagagatggtagggattcttaaagaggaggaccagaatgtcttagcgggatatctgaggagagctaacggttcaatacccaatgctatcggtgagtcacattcttgttcttgagaacaggaccgcgtatatgtttggtcaacactgacgaaaacgttaccgattgagataggttctttcctcgaagaccagagtcgggaatctatcatctgatcatacagtccttctgttgtttacttttattttctttgcgtgtcaatttgtccattcactatataaccattttcctaatttccctaactttcctcctcttttaaccttttacttgtggtttttctttctaaatcatcaacacttctgtttctgcttttgcttgcaacacaaatcacacagtatacaacatttgtatgcatacgcgccaaaaacctatcgaatgagggaaggagagatcgtacagaaagtatacaagactgaacatgactagaagacgtgacaggttgcatataagagaaacctgttaattaggatattccaaaaaattgaaaaaaagaggaatccgtgaataggtacaagaagaagaaggataatacaagcgctcacgcgcgcgccgccggaccgagttgacacgaaacaagatgaaatttaggggggggaagaaactctatgggtaacctgacgaccccaagaaatgattgcagcttgaagtgcagctcccatgcactagctgactttcaaaaccacatatgcgtataaattgcttgggctaaaacggaggaagagtacctgtactttgaaatccttagttttcccttgttgtcaccaccaatcaatctcgtcctgccttacatgttgattcatcggggttgcatataatcctccatgaagctgtggcgcaggatgatgatgttgttgatagtgaggaggatgcataggtccagttgagggcgtatcgaacgcaggagagcttgtatacggtgagcgttggaacgagttgttcagagatgaggatggcgatggcgacggaagatgaaaaggatgttggcttggaccaggaaaaggcatcgatctgaaagagagtgaatgtagttttctctcttcgttctgttcgtttgtgaacctccgatcctgggcatcgaaaccacaccgtcgattatgatcattactattggggcctagatatgttgagggatcatcatctcgtcggtgttcaaagccatcttggctgtaggaaggtgaaggcaaagggggggtatgtaaagcaagacttaagcttgaggtagagctaactcgaatcgatcgaggttccgttggtgtaatttgtttgtccaacgatgggtagttggtgcgcgatgtcaaatcacgaccggatgaatgaccgactggatcaaaagttgatacgaccaagggtgtattctgtttaagctcgggggcaggagccgaactatacgttggataattatgatcgtgtatattgagagaacgaccagctgatggccagtttagagaggtgaggcatgttgtgttcaaaggataagatgcggacgacaattgagggggtaacgatggtcgggagtaccggtttcctaaagatgtagatgttgtcatcaagtatcggtcgggatgtgcgttccgtacggagggcactttagatgcagtgaacatgtgaactgggtttgacatttctggtgaacatatacctgtggtgagctgagtgtgcttctgatgagaccctattggatttgatgcttcgagcgtgaacgaggaggacgtagagtccgaggttgagcttggcgtttgtggagagaatccatgaccggaagacgaagacgacggtgagagtagtgagacggacgataccgtctcgagttccaactctgtctgtttagaatgagcggggatgacggcgcaagaagcagagtagctttcatcgggatgactcagactggttgtcgcgtggcggagcttgagacttgacgaaagggaagtttggccgactttgacatttgacaacggtctatcagcaagcgcagtggtggtcaacggacgatcaatcggtgaggccctgttacgctttcgacaggctgtatcagaggcctggaaggaataagaaacgggagaaagagagaaagagttgattgatgatgttgacacggttcgaatcgggaaaacgatgactgaagaaacatacctccggatcgattgtccaaagacctgatcagaagagaaggatcattaagctttgatcgtcggcgtttatcgctgttaactacatacaaaagaaaagtgaaatcgagagcacgaacctccttttccagaaagaggggccaatcgagcgttattcacgaaacatggtgtcaacgacagcagatgtctgaccgtattctttacatgccgaggcaacacaaagaccaagatgagcgcctgacgaaacgtaggaagagatagagaaagcgtttatgttaccttccaacccttggtgctcgttcgaaaaaatggatgtgaactctcgatactcgcatatatctgtccagatcgtatccagaacagaattacttcttcttgactctcttccgagcactacaaagatgagagattgaccaacctctgaaacggagagggctttagccggggactgtcaggaaatgtcaataaccacaacatcatcaaaaccacaagagcggcgtcgtaagaaagtatccaaacaactaactctctcgatggcgcgtttgatcaactcgacatatgtcatattaggtttcccagatgctcttgatgacctttcgaacattctttcttccctttgtgttcttcttcttcgtggtctgtagagttgatgggataatgggataatgggatggtgtgagaaaacaaaggtggatacgaataaagaagagtgggatcgaagaagatacagatgaacgaagtcacacttgctccatctctatattttgtcagtcatttcgtcagttgccatcgtactcgccccacttgatctctttacccgggacctgatgctcgaacactctgcagcccaggatggagtgtgcttgtcgagaaacagggacgatataatttaaaagtaaggttcagcctagagagaaaagcggaaaaggaacgcgtccagacgaggtgccgatcgggaagcccaggcaccattacgatgatcatcagaccgcccgaagatcacaaaagtcaaacgccggacaagtacgaagacagcgctccatgattaaccgaggatggtacgaatgttaggtttcggagcagagttctttatttaacgttcagtctctatcattaatagtgtcctttccctgtctctaataacggagttctaaattttcgtccccgttggcagacgccacaggtcgttcaagcttgatcgtcgaaactgattgtgcagcaccgggagagagaaagaagtggaaactttgatgaacgtctcatctattgtaccgactttctggtagaaacaacagatattgatcacgcagcagcgacaaagatttagaatgaacggcgaaattaataacgataaatgaaaagatggtctagaacatcgccgcgaaagtctactcttcgatatctttcccggaccgtttcctcaacttttaaatacatcagacccagtcagtttgatgatgttcgggagaaaaggggagaaaaaaaaacattttgtcacttacagcggcggccagatccatctgagctatccctcctccagctttcggcgctcctcctccgagctggctcagcttgatgcctgttccaccgcctcctccaccacctcctcctccaggcgtaggtctcgctccaattgcaataggtgcttttggcacagctggccggcctccagtccccaagggttttcctaacggaatacccaccccactagccgctccaggcttcggggccatcaccggtggttttcctcctagaccgacaggctttgcagccaacaccggaggtttcggcttcagcccaggtgccgatccgtcggcaggtttgaacccagcagccgatccaggccgcgacgaggctggactggatcgaatagaagacgacccggtcaaagatacctttggccctccgtttgatccatcaaattcgggcttgggtgctgctggcggtgctcgcctcgccggaggaggcggaggcggaggggctggcttgggaggagccatcaactccagatagttactaaaatcagatatatacagacaatcatcattgagcgtgttaatccaatcaactcgatgcaacaaaagcaatcaaaccccaagaagcaaaaggacaaacctaggagcccatccttcggtaccattcttgacaatcaaccaccatccgttcggatctttctccttgacctcgaccacgtcgccttttaccaaatcgacctcaccttcctgaccggcgaacgcgtagagcgccttgtactttgggttctctggctttgccgcaaccggtcggctggggggagcaggagcgggcgttcctcgattgacacctccgcttgtcgccactgcgggtttggaggcgaccgagtgagatgtagggtaactcattcccgaggaaggcgtagcagcagacttgcctggaagcacctgagctttcggaacgatccgcccagcctagtatttgatttatttcgacaacttttttgtgtcaatcgccacactagagccctcgaatggggaaagaacaacgatattttgacttacacttggatgtggattcgaaggtcctcctcgcttcaacagcttaccagacgtgatgggcctgacaatgcccggctttctcttagcggcaggtttggatactgagtttggaggttctccagaagaaacggataccacgctactcttataaacatcaaatctggtgatggactcgtccttcctgaactgaatttcggcctttttgtccttctttttgttatagccaattcttcgtttgaagagaaaccccatcatgccatgcatgtcacagtcaggcttcaagaatattggctttcaaagggtagttcaaagataacttacgtcgacccgatgttgatctgaatacttccattggtagccttatgaagatgagtgatcaactccgttttgaaaacagatgtgaataccgggtcgccctcctcgctcgatgaagcgttgaaagtctgatgtcgaaacagtaaacaaatatgaaagaaatctctgaattagtacagacactctatgacattgattttgaggaagatgttatttacaatccagtcatcccggagattggaaagaccgacggaccggatggtcaccaacggaatctttcggtcgattgtcgtagcgatccgaccgtctttcgcggcagagatcagaaagtatgcagctgagttcgtctgtgatacaagttgaataaaagtcaacctccgtcggggatgtacgcgtcagatgagggaaatacatacgacaacaaggaatctcggactgggtttactcgatcgaccgaatgaagatttcagtagttcaattcggccgctgaagatgacactttccgaacctatatattctcgtacaagaaagaaaaaacccttatcagatattgggcaagaagtaaaagaaggccgacgaacaagaaaacaaggacgaaccactcaagccagcagcctgtctcagcatagctccactcgagctctttcctcccacatccaaataatctcccgcaaaccttctttgactgaccaagctgtatcttctcctctccttcctctctgcgagaagctcatgtccacgttgtcgaaccctggcatattcgaaagcgtcctttcgacctcgccagaatcgttgaatccgactggcacactcatttcggtatcgtaagaagtttcgccaagctcgttgaattcgggcggccatattatgccaatatcgatctcgcattgtctccaatgcaaagagctgagtgaagacgaccaacccgtttccaaagatttcttaataatccgctcaatcaaacaaacaaaaaaggagagaaactcacagtctctggattcttgatgaaagccttggtaacacccatttgccactcatctttagcgattccagtatccttcaagatttgagcacaacccgtctggggatcaccctgccatgtgtattctcctgcatacgacgtgttcggggataagaggtaaaacctttccaccatcttttcaaacgtatttctgtaggcgaagccagctcgtctgactcggatgttctcctgcaaaccaagatacttgacctgatgcaagatcgctttagagtcatactcagtaggactcctgttttggttaggtttaatcgttcggatatatgatggttgggctttcatcaaattatcgaccaacgcattcgcggatgcctgttcatacgttcaaaagggatatcaatattcagaatacttccaaagcaaacgaaaaagaaaaagaaaaagagaaagagaaaaaaaaaaagagaaaaacaaagaaaaaaaatagagaaacggaccttgattcgatctcccgcagtaggaggtctcttcttgctaccagcgtcaattctgtctgggaaaaggtttttcaagaatccatttccggttgtcgacaccaaatccgtcagatctttcacgagagaatccttgtttttctccgtcattcccgatacgttatacagaacctctcccgcgtaatgtttgatcaggaactttgatcctcgagtctcgaagtgttgattggatgtaagaccaccaagtcgttgaacaaacgagttatcagcagcagctgggtcggcatgggcggtagcaacggcatcgttgagggcggcaaagataccgggtggtcgtttttcctcgataagctcgcaaacaacctgtgaagcgggggattatacgattaaatatgcgattgtcaaagagggtaggtgttcgagactgggaaaatgttggacaaaccttgttgttgaagtaatcaataggtgtccatttgatctgttctcggacgtactcttcctgctcggccttcaacgtaagctcgatgaagatctgctgaactgtatagcgaggaagatgatagaaaacaaaaagtttgttcaccctgtacaaggtcgtatttgtgatataacaagagtccacttacgtttctcgttcacgtagttgatacaaagctgctcaaaactatagaggcgcatgaccgacatcgaaactatcagcccatggttttgcggtttgcacgcccggagaaacgagaacagagatgctgagaggaaaaaggtggacgaaacttgttgtcctggaagatctcgaaaccgtaaatatccaagacgccaagcacgtgctcgctcttcgtttttggcttcatcgatacgttcactctctccacaatccattcaaacaagtttgcatctagaagcatcagagagatagatagacaaacaaaacaaaaagaggaacacgtcaaatttatttttgactatgtcaaggagttgatagtgagatatttgtaacagagaagaggcacgtacagatagcttgagacaaggcatctctaccagacgaagcttgaggaacgttgaggggaacatcatagatcgaacctgtttctcaaaggtattgggtcaaatctcttttccctcttctctttacagacggcccaccaaatcgagcaaacaaggtataaaatcttacctcttcgtccacctcgctgagtttctactactctcgaacacaatactttgcttagcgtatctttgtcaacctccatgaggtacgcaataaattcaatgacgctctcgtctggaatcattgagtttccttccgcgttctctacgaacttgacgtttcctaacctaaaacacattgaccgggccagatcaatttatcaaacaagttttgattcgcgagtgagtgtgtgatcttcttctttcattggtttgagtgaagcttatgaaaatccagatacacaccatagaatgatactgatacatctaaagatgttttcctgctcatctcctgagaggccgacgatgcccatagctttgagagtctcgttaaaatcagctacatcgtcgattgaaggcacgtctaggcagccagactgagatgtcaatacgtaggcctccggtccttggatcccaaacatctctgcgagaaaaagttaggcgctcgtagaatataaatcatctgatcacttctatgactgcagcagaagagatggcggacaaacctcgcatttccgcgctggcggacttggtgaactgatagaagatatggaaatctcgctcatttttgatctgtttggtcactcgactctgaggtacgaaaaaatcacagtttgaaagaaaattgaatcatcgtgagaaattaaatttttgtcaagtagatatatcgccacggaccttctcgagaagatagttggtaatttgagccccgacgggctctcctcgtccgttgaacatgatttctaagtattttccctaatatattgaattggaatcaattagcgtcatataagaataacagagacaaactatttggacaagaaaaacgactttgaacatacatgtcgggaagagttgtcgtttcgaagcgtctttgcacaaccaaaagattctagtagaggattggtggccaggaccatatccttgatctttccgataccaccggccgccccacctgtgggaacttcagattctccagagacctcggcgatatattgcatgattcgcttagctgcctcggtctttccggctcctgactctcccttttgtgattgatttccatacatgcgcgatatagatacaatcagcatgaggtactgatggaaggaagtgggacgtacaaaggttgactcacagagataatgacacattggttttctccataagcgttcatagcgtagtacgcgctctcagcgatcgcaaacacatggggtggcatctccagccggttctttcccttgtaggactgtagtgtgggaagggtataaatcccaagatctatcgcaccaatcaaacatcgtcagctcaaggagaatttcacgggtaggtaccgttatgagatcgacacagtgcgacagacctctgaacggatttacagagatcaatacatgggcaatgtaggtctgcatttggagggatggcaggacaaatcaggtgggtaagccttgttctgagtcaactgagattaaaacctatctgccgcagagtttctgatccaacatatcacgaattccctcttgttcggtttgatttgaacgagaagaaaggtcggaggaatgacatacgtaaatctccttgttctcgaatcgcttcttgaggttctcgttaatgctctcattcgagatggtcgagagcaaagtcatgtcggagactcctgcctgtttcttcttaaatccctccttccaatctgccttgaagttttaatacgatcattggttcatcacagatacatgaaagaagtttcaagttaagatcaaatgatgattttgcacgaaagaagaaattgtgaatgagatgaaaaaaagataagcatagacgaaacggttgcacttactttggcgactttacctccattagaggcagccccggcttttgatggagcggcggctgattttttgcccgcttttttagagggagcctaaataattggtagtaaaacgttaaaaacaaagagggagaaggacaatccggtgaagaccatagatacacggttgaggcgtgggattttccatcagcgggatgatgacgagctgtttgaggcaagattctacagcgaatcaaacgccctatggatcatcaacatgaaaacaaactgaccatcttgtataattcttaacagttagtattcagacagaccaggcgaagtcgatacgttgttgtatgatgccgagagtggtaatgatgatgatggtaggtaggtggaaggtgatggctgctcgtattgccgagatggaaggtctccgggcagagtccgcagtcggttcactcttacagccttccccacatcgactgcttaacagaacagtagggaacacaaaacaacttggcagttggcagttggaagcgaggaatacaggattgacagtgcgctcgatatgaagaataaaaagactgatgaatgacaacgactttagagtcgactggtcgttgtatgtctatatagtcctatttttttttcgaacagggctgacgaaacctgggtagagtaaatctcatgcgccttctctagctgtgcgcagatagtagcagagaagaggaaagagaatataaaagacttgattctggatgtgtctctctatgcgaactgcttgcattggttgacaacccagtcgacctggctgttagcttggggtctatgatacattctgggttccatgaccggcaagagtagtcgacttcaaatagttttcaacggtgtacgaaggacgtcttgggtgaacatctcttggtgtccttctaaaacagatcagtacacagatgcatgcccattctctacgcagaagatgtcccccaaacatcatagataagtactagactgtaagttatcggtgtatggtgtgtatagtgtgtttgagtggtgagagttctcttacgtaactcaactcgtctcatttgcacatctgcacacctctccatccccaaacggccatcaccatctctgccctttagtccaacatcatcaccatcgacagatgtcctcctctacatcgtatgacagcaagtccttcggttgaagttatctctctatttcggttgttctggtttgattaaactcttattcttttacccttgatgggatcacatagatctccgcaggcacgctcgtgcgttggagaccgcgctcgattcaaaactcacggcgtactcgaaagtagcatccacaatctcctcaactggtcttgtcagccggaataaggatgagttgagtctgcaggaggaaggtgaaggtattggcggctggagattagctgaagaggaagtcgaagaactcgtcggcaaggtgtgttccgaaactcagcttatacttctttttgattcatccatggttgtcgtctgcttctctatggtgtttagcgaacgagaaaaattgatggatgcacggatacctttatataacaaactgatcatatatcactgccttgttcgttctcatcctgaacctgaagctctccgaaacgctcgaccaactctcggaatggttgaatgaccccgctgtgacgccgagtacgagccagcttcatgcggtccagcgacatcgagaggtccttgccgattatcgaagggactttactcagacaaaggtgttttccatatgcaccaagcttaattgagatctttatctttctgtggctttgctaaccacccgcactgatgtcttggtcccgatgttcagaacaatatccagcatacattgaactctcaaaatcttttaggctcagttaggaaagatatcaagtgaggaccaagagggatcatattctgagccaatcgcttcgatctaaccatttggcttcctctgtccgtacccctcacagcgcatacaaaaccgcaagatcatcaacagcagatgctttgcttaatgagcgaaacacgatcgattctagccatcgaatgacagatgacatcctcgagtacgtcattcttgttgattatttcccggaaggatagcaattcatcggtctgcgtccatttctgaaacatgactgttttgtacgtgttgtggaatcagacaagcatacgcgactcgatcagactttgcgagccagaggacttcgttgaatggcattaactccaggatgggatctactctcagtgcgttcaattccacgctggaaaacggcatttatctgtttattctctctctgacttctcgtcctcctcttgtatctccattttttatctttggcaatatagatacgctaccgggaatgaacacactgcttggtcttattcaatcaaaacgtagaagggatagcatcattttgggttgtgtgatcggtacgctaacggtaggtttcctaatgtatgtcttttaaatcatgtcgaggtgggtgtgaagtgtggtgatgtatggtgatgtatggtggtaatgtaatgaactgtatgactatccttctacgttcttttcgtgttacccttcttctttctctctatttcctgtttgtgctctcatgacatgccattctagatgatttagaaagaacataagaacataagaccataagaccataagaccataagaccataagaccataagaacatcagatgaggaccataagatgtggtgtagagacaacaagaaagcttcaatggtgttttccctgtgcttttcaacttgacttttctcctttcttttcaccatcatcaaccaactctctacctttccttttgtcccttcctctttctcttctctctcttctctctctttctgtctctctccaaaaaccaaccacgcacacgaagaatctttaaaagacattcctttgcgtcacgttttttatccttgtttggccttgtaacgaattctcaacgatcgccctcttctttgacgacctttcttcactcactctcccaacgacgtccgtgttgctcttttgatcttatcattctctgtatcttcttttgcctgttcttcctccttcctatcctcctctctgtcacgtcaaaagttcaagtaacatggatctaaacgatcaaagtcaatatcaaaacctgtcctacacgttccaaaacctcgcactctctccaccccctcctccgcctgccgaaccaccctattctgggctgtctgacccatacgactcatcttccaacccagtgtttggctcatctccctctggcgattactccagtttcatgaccaattcttcttcatcttcctctcagaagattggacaaccagagggcccggaaggagcgggatacgctccatcggacgatggtatcgctcacgggaaatcgatgaatacttctggtatctccggtgctggagccgggagccgaacaggatggtctgggagtcgagccgggagtggagaaggtgggatgggaagtattggaagaggaggttggggatcgtcgaatggatcagtagggtctgtcaacgggaacggtaacccggggtccattcaatcggtcaacagaggaaagatgggtagagctgaattgccctctgtgagtctattgttctccccctcttttttccattcttcgttcccccttgagcttctctgtccgagttcgtgtcgtgtcgacgatcggcgaacgagaagtcactcccggcatctgtttctctcgttttttctccttctattcttccttctggtctagggattctgcttgtttatagatgttgaacctctttcaacgacaacattttttgctatgtatcccatgtatcgtcttgactcacctcattgttgtatcctttcttgtcctcacaattcgattcatgctaccgtcgaactagcaatggctcgatcagccgtttcacaacccgtctcccaatggtcgctctccagtagggtttgtttcttttcaacaacaacagcagcaacagcagtaccaacttggtgacagcacatctacaggatccatgtgtatggttctctttttccatctctttccccactagtcacgtgttcaataattcactaaatcttggtcgatatctttcttggttcatcccaatcgtttagctcccccaattttgcatccgtcccagaactcgacttaccctgtctctccattactctcttcagaatatgtgaacagtcactctcaatcagtaggtgattcttcgtacaactcgtacggttcctcagctttgtcctcgtctcctggagcttctagagtgagcaataatactggcaacacaagcagcaatggaaactactattcatcttcgcctacatctatcacgggatttagcgatgttcatcaatttcaaacccctctccagcatcatcagcatcatcagcatcatcagcatcatcagctaccaaatcatgtgcataatcaccatcatcatccgcctccaccaccaccaccacca

SEQ ID NO: 118 - DNA, 1932 bp, Xanthophyllomyces dendrorhous
taacaattctcttcacccttccttgtcaaactcgaccggactagcagtcgggccaggagcaagaagataccaagtttttggcaacggaattcctactggattgataggtggtcctggaccagggccgggaccagctggaggacagagttggggcggtccagcgatggtgcctggcttaggagtcggccccggtggaccgtttgcgatgataccagcgatcggaggtgggatggacgatgatgtaattccgtaagttgtcttcaagattttcctcatatatgatcattcaacccttctcataaatctatcatgtttcccgtccaacttccaggactgcgatcgtcatcaagaacatcaactttaacttgcagaaggaggatttactacgaacaatcgttagttgtcatgtcctttccgtcgagaaggaggcatagactgactatcttttgaattgcccatcgcttttcacgtttcatactgttgctgctaggaatcattgggcgccccccttccctatgcattcaattaccacatggatcaaggtgtcttccgaggtcttgcgtttgccaacttccgaagtgctcacgaggccgacgctgttgtggctgctctgaatgggtgcgtgttctctatatctgaccttgcttggcgtcaaacgtttcaatctaaagatttgacagctgacgtctgattgggtgccttatttctgaacagatacgacgtcggaggccgaaaactccgggttgagtacaagaaagtccttcaggccggagagaaggagaggattgaaagggagaaagcgcttcgtcgaatgcggtcaatccaacaacctcaaggtacttcgtctgataaccatcaccagcaacagcaacagcaacagtcacgaccgtcgacaggttcgatgccttcggtttctacaccggtggatgagtaccctggcattcaacctgtttctcttggtttgggtctaggtgcctcagtgagccccaatggagggcatgctcaatactcccaacatcagcaacaacaggctggaagtcagctgctccatcgagagagaagcggaagtggcgaggctcaaggaatgaatggattaggtattccgacagtacaggttactgctcaaagggattctgaaagtggtttctacagtcagcaggaaatggacgatgtcggagctggaagtgattctggtgagtctagtgattccaagagcagtaagtcctgtcaaagatgattctttgtgtatcttcttttctaacccgttctggcttttctcatttctctatgaccaatctcctgctcagccgagttggatttgaatgatccaatcacactcgatatctattctaggatcttggtcttcaaggaagatcgcatgcgggacgagctcgccttctcgcgaacgctctctgccctacaacgcagggtcgttcatttggtcgctcagaaactaggagtatatcactattctgttggagagggcgataagcgttatgcggttgtcactcggagtgagggtcgagtaggtggcagcggagatcgcacgcttcgccatcacacttctcgaccgaaccttccgactcatcagacgaatcataattctcataatcatcaaggccaccaccaacaacaacaccttcaagcaaatcaaaatttatatgcgtcgtctccttcgctcaggagtaagtcgtccatgccggatctatctcatcttcatggaccagctgtgtcgcgtgatccgacgagggccattgctcctcaaaggtcaagctcgaacctccgagacggttactcattgatggggtccatcagcaatgggatcggtggaaggactggagtgagcagtgtgcatcctagacgatcaacgacaaacccgatcgatcatggatttttgaatccacagatgaacatcccttcctatcatggtac

SEQ ID NO: 119 - DNA, 91215 bp, Xanthophyllomyces dendrorhous
atatttatttacccttgaaactttcatatttcttttcttttttattgtcgcgctagctataatcacttctcaattcttgtctttccttttcgtcctcttctttgatgcctgacacgcctctcatggttccccatcgacgccattaacgtaccagaagaatgactgataccttccctgtttatttctctctctctatcactctctctcttgttctctcccctacctcctgtttcccaagactgttcttggttcacaatctgattcatcatcacaccacatgtcattatgaattcctcacatcactccacgcctctgttcgcgcatctgatgctctccttcttatttggtcgattccttctatctgattccttgttttgtctgacaacaacttgttcttcatctcctggtcttactcatttcatcttttaaaaaaagtatctcatccccttgatcctcttttctttccttatgcttgttttgggatgtttaagaacttcatggcaggagattctttttttctctttcttcctttagaaaaatcgtccgctcttttaagagcggtgatatattttgtcagatgtatgagaaacgagacgaaaggaccagttaggtcaaccgaaattctatacaaccagatgataagcacaaaaaagaaagaagaaagattgaagagagggattaatcggcgagcgccaagtctacgatgtcttctgctgttccccatgaactttgccagcctgctcctccgtgtccatagttgtagaagaccttcattttccacttcgattcttccccttcatcctctgcattcatatttgcgtttgattttgatgctgagcgaggtcgtggcaggatgatatccggaccacgttcaagtcgaattccttccacccgggacggtctaaaaccaacgatgacattttgctttaaaggattcaggatcgaaccttctgaaaccaatggtgttgcagtcgtttctagagatgattctgtcggatttgatgtttgctgaagatgaggtgggaccagggatggacagatctcgatagcgcgggaaatgatcgatgatgtcgtttcttctctaggagttggtagcctttagtataattatcgtaccaaagaagaaaaggctcgatcagtcatcgtatcatcaaaaagtgaaagggaggaagatatgaaaccagggacgaaccaatcgtctacctctctggttccaccaacaatgacatccccgttctccctggggattacatacgttctctctccgccttccccgccagccaactttccaatctgtctcgtccacccagtcctgacccaaggcgcatgaactcgtatcacttgccctctaacaggaaacaccgtctgatcttcaacgccgcccaaagtcaatgcgcctatgcctgcgcagactatgactttagatggaaccctcccatcgaggagggcgaggacctgaggagaggacagagaatgaagtgaaggaacatggagccgatggatttttccaccgagagtgaggaagtcggcaactaaccgggacaagtacggagcgggattcatggtgagtgatgtaaaggagactgagtgagtggcgaatgacgggagctccgaggttgggtggatgacaaacttgaagaacaaacagatgaaggatcagcgaatcctctacctgatacacaatgagaaagtttaggcgctcacgtcaggatgttcttccagaatcgcgagatgtttctcatctccatcataatctaagggtaaacgaggaagggaagaaagttctccaagcgagaaacataagcaacgttttgattttgtctgagacaaagataaagaaacctacattccgtttgtgtgatcttcattaaccccgactgttcacccaacatcctccactcggtcaacatgacctcgaatgttcttctatcccacttcctttgtctctcatcaccatcatctgcaaaggaaagatgatgagcaccagcagccgtagatgcatagtatgctgatagcacatccgacggaagatggtccgctaagatgtgaacgttcttgttagggttgagctgagattcgatgagtcggatcgctgtggtcagtccgataatcccacaaccgagtacgacgatgggagcatccaaagagactctctccgttattcctattgccatcttggtcgcaggtggtattgttgttgactgtcgtcgtcgccgtacatgcgaaaaacgactatttcttataacgatagcaacataagatacagcacgtgactcggtgcgtagatgacttgattcttaaatgatttgatatctaattcttcattatatttttattctgagtcttatatcatattctcgcctgttgttattgttgttctaattctttgtgccgccaagaactatgcgcaaggcaaaagtcatacaagaaaccataacctcaatctggaaagaagataaggaaagaagaaacccgtgtgctgttgaactgtaagatagagaaagagtgatttggacagcgaagaatgacctagacattgctggtcacttgagcttgcttgacaatccagtctcgcctgaacgttcaaaatgaatgcatagagataatatgagttcaatccgttcgatgagcctgaaagaaaacggaaggcagaaaacgcacatatcatggagaagtctctgcctctaaagttgataatttcgcaagaaaagatccagaaacaatcgatacataacataaagaaaatttaccaggtcatcagacaagctcaaggagggataggacagaaagtagacgaaccatagcttcctgcttctcatctagacctccaaagccataaggatgcataacgtgctgaaatccctcccagacatcaacttccttatcctcactccagccggcctcccccttcttcttccccgcctctttcatctttttcatgaattcgaccgatccttcgtaagcacaaactctatcatcctttccgtggactatccggacaggaggcatgatcttggcggcattgtcgtcgggcagtacaaaagacgccatagagagaagagagactccggaggcaattcgaatggcagagtggtatgccaacggatcagctattccgattgcgtgatggataagcacacgtgtaagtaagagggtttctcgataacagatatggatagagcaatacacacccttgaactcctgagtgacctccggttgatccgtctccaaccccttatagaaggagaatacacaagcttatcagttatcagtccattctctcaacaaatgaagctagactctttaactgattgactcacgatcaccagtttgatcatctggaaactcggaaggactttacataaccccctgccgaccaattggacgacgatgtttgggaccgcctctgggtttgcacccaggtaaggggccagtgtatatattccgatcaaatgaggggcggaaggatcggtgggcactgctgctgatcggggaaacaggctgttacagcatagaggaaggagaaggcacgcacgggggaaagaggggacatgaaatgagaatgtattcttcgttccttctacaaactgatcaaggatatacatacattgcgttggttatcctaatttatgtaggcaagagggtgtggccatttgactctccaataagattttattcatgaacaaagagaacacacgcagaagagaaaaggtaagacacgtacactgtccaaccgcccaaagaactgtatccaaagttcaaatgaaagaagacgactcgaacgtgactcagtacttctctcacatcaaccaaaattatcgagtaagcgacttgacaacaaccacttactgtccacagattactatccgtctccttggttctcccttttccttactaacaaccacaaggtctttcatcacggcttctatggctttaggcaagtgggactcatcttttatcaagacgtgaagtccagaagatctaccgtgctgattaggatcccgtgatagagccgagatgtaagttttctgtgatttgaataagcttggctaaaagagagaacataccgtgggaagatctatgtgtagaaaaacatttcccttgatccgattagcaagtgcggcacatcgatatcaaaggagagtacacgaaccaggaacgataattctgaacccatcgttcaacaacaagtctacatgaggcgcccatctccctccgtgttcatacaagcctgtagaaatgcaggcaaggtgacaaccacaaccgtacatgcacgcgacgttcaagaatggggaagtatcgtgagtccaactggattcactctccatccctcctacaattatatttttccatcctatgaatcatatagaagataacgtaccgtggcacaacatgacatcgattccctcgccggtgcgggaatttgcagaagaatcggaaggctttcggtaccaagtcctgtagaagatccaattggaacccaatttgttcgaaagctcttccttagctatttcagacaattcgccatccatcaacgttaggactaggtggctacactcgctttcaaaaatcgtatgaaaacactacaagagcgtctagacaaaggagaagagagcagggcacgaacctaattgaacatcttctgcctgtccggttccattcccgcgttcatccacgtaaaatcttctaccagtgatggcgattgttgaatccttggcgagcttttcctcagcgggatgaagtggagctaggtatctgccgtacgtatcgtctttggacttgcttgaaggatagaaaaggcccatgtttaatattggtcggtgttgatgggaagaatgacgaatatgacgcgttggatggaattcgaaggaaactaattattccggtctccgccgacttttcctatatataatttatatccattctttgttgtttcatctctttcccttgctatcccttttgaattgtatcgtgactagagcagagaatgagagagagaaaaaggggagaaaaccatcacaatcataaaaaaaagaaatagctataacaaaagagaacaaggtgaagagagagccacatgccctgatcaaggcgaggcaaccttcatagctgtaaagtggagtcgaatttgacgatgagttcaacgcaaggcagagaaaggaagtcagtcgatatgaagcagatgcaaaccgaaagtgatgaagaaaacatacaggccgttattttttctccgagactaagagcaataccctgcgtcttggatcggattctaacatgtcccgagacaataccatcgtctgatttctccaatgacaagtttgccagtgcgtcctcgcctgattgttttgtatgacagaaaaattgatgagtcagaccgattgtcataagtcaattttgaggaacagagagaagagaagaacggaccaaagattgatcgggcgtatagattggcggcaatgaagttgcagtctccagaaaggtaagcatcggatgtcaaagtcgacatatttgtacagctcgcgattcggttcatcgccactcgcaaatcactatttcacctcgtgtcgaagatcgagaaatttaaatcagaaacaatccttttgaaaaacaacaggcggaaagagaagatcgaacgtacgtgatggaagtagtgatcctcaggaagttctcccactcgaactcggtccacatgctcctaaactgagtctcagtacacgttccgggtttgatgtactccatgatatcgatgtgaatatcgctgagcaccacgtttgagctcggctcactcgcactctggccatcgtatacaatgtttccaaagatcacacccgtctcggtcgaagataccttgatggtcgacttgagagagaggaaaccgtggggggcgagagtatgggttgaggcacgctcaacgactttaaggtcgcccaacgtcgcaaactcgaccgatagattctgaagagtctcctgcgtctggttcacgattaagacgtctaggtatttgagagaaatcggtcagtcattgatgtgcacacaacatgctgagagaacaagagatgcttaccaagattgatatcgaaaccatggacagtaacgacagcctcagaataaacaggatcggagaaacctagtatttcccaatatagaagctcagtgctcttttcttaaggataatctcaaggattcgctcaataaagcttaccagtaagttggataaccttgctcaacttggagataaagtcatccttgatgtcggccgcgccggtagcccggatcaaatcagtctcgagctagagtcatacaaaaatggccaggacacaaagggaaaagatcttgttgagcatcataacattcaagctcaaataaaagaagcacagaaaagcgaaactcacctcatcagcatccccgccagtagccttctttgagaattgtctgaatgaaatcgaatcatccacctgaatctgtaccaacttgttctctttcctcttcctctcctcgaccttactcgccgccgccttgaccatttttgcataagccgccttagtatctgctaagaagagttcgtttgcgggtcggctctcagccaactcagcgatcgttcggatgcagttcaggattcgctcttgagaatcctcgtcgatcggcacggcaacaaactttgattgaccgactcgaatgatggaagccatgatcaacatggcctagaaagagtcggaaacgataaccgagacgcacagagaaacaattcaacatagttcgtaacacttgtcgcacagaacaagataaggaacgttcttacctcggctcgaagcgcattgacggccttgatatccgaggatttctcgtgaaatcttagcacgagcttgacgatgcttgatgacaataccgatccagtgtagaaatctccagccaggattaaagctatcaacgttgatagagagttgaacgggttagcctagccaggtatcttaccgaacaaagggatcggaaagacgaacatctgagaggagcagcagccttagcccttatcttggcgatcttctccttctccaataaagaactagaatagacagtctcagtcgcgtacgtcccatcggcaagaaccctggtcgtcgttgagggcttgtgctctaccggaccagttggctcgtcaggtccgtcaatctcgtccaaagctcgctacgataggttgcgtataggggtaagatgtgaaaccacatagagtaaacgtggtagagattcaggatgtgaagagtcaggaatgagccaattgaaagcggaaaaatacggcacgaacctgctccgaggcaagaataggaacctctccgatgatctttcggatagcttggaaagcggagtcaatatctgttttgaatttgtttattaattttgaagcaaacacggtcaatcctcttgtcattacagtctcaggattttttaagaacagagaagagatgacaaaccctcggtctctgcacagtattctccgataatccacaaagcgcctcggaagaccttgccagacttgacgtcactgatagtctccaagagcttggctacgattgactgtcgaagcttggggaatttctccacaacctctctgtatcatacggtcgccgcagaatcaacgttagctttggcacacgcttcaaaggaaggatgtgatttgcaactttctacgaaccgaacgaaagaaataacgtccactgccgaagagtttccggcgtctccgatgaactccatcaacacatgcactaccgacgcagcgacctcagagaaccggatcgcgcacgagtgaatggattggatcaaaagctgtctgtactcgaggttctacgagccacgacggagagaaaaccacgattaaatatcatgacctctgaagacaaattgagaagggtcgaaacgtaccttctcatcgcccttttcctcctgagtgttgatcaactgcttcttcagcaccgcgacgacctctccgacgtttcttccggagacaagttctaatgccaaagcgagcgcctttcgcttgacttccatatcacctcctccagcagccgagttgaggactcgcatgacatccattaccaaactatcgagtacaaactcgtgtttgattctgagcgcgttgaccctttcgagaacgattaacttgacattgttgtcagcctcctttacgcaaagctcgaggaaggtaccggcagcggccttgacggctgccggattggacgtcaaagtagtcaacgaggttgcggcctcatattttacagtggaggatgaggcggtaaggagctcgaatatcgttcggatccactttgctcggtgaggagagtcggaccgggcgtcccgtcggacgaggtcgataacggcgagttgcatcaactcatccagactagaaatttcgtcaaagatagacaacaaatactcgacagctcgaggttgagcgatattgcagagcgacacaaacgcgtttcgacgacaggtcgggtcggattcctgtataacggggtaagaaatgaacaataagtgatgtgcacaaggctatgacagcctgaagagtaaacaaggcccatgtttgactgacagccgcgaggaaggtgaggagaatttcgggagcatcagggatcaggtgctcatgggttttgaagatggagtacacggtgaagaccgcgttttttcggacgtagggatgtcggtgctcctataacgagcagaacaatggccatatacttctatacgttagtccctgtaatttgttctctaggttaacagaagaggagaacgaaccatgcagcttcggacagtagggaccaaaggctcgaggagctctgcttcttgaagcttttgaacagcccgaagagttcctcctcggatgtactcgttgggatgttgctatgagaataacgtacggtcaagagtatcagctttcgctaactagaaccttgaaacatactgaacaaagatgttgtactcaccaaatcgtttcggatggcgttgctgtttgttatgatcaagaaggttatctcgtgagtctcgagactgagatctagtgaagagcaaggcaatcgacgaaagcaacatgggaccttaccagacaaggatcatttcttgtttgagtttaccattctcgtctaacttggggcagattctattgggtagggcgttgaggagatggtgtcaagtgagtggtcagagtttaggtttggtttgcagagaacacgtaagacaaagcaaaagcgatatagaaattaactcactcccaatagaaggcaagcatcttctttatctgcttgttccggttcggcagaacgaactggatgatgggcatcaacaagtttggctgagggtttccattcaaagtggacacaatgatctgggtaagggtatctaacttgagctgatcggaacccttttcgagtgcctgcctgagctcttggaacgaaggcgattcatttcttccttcgttcgtgacgactgtgtatgctgttgggtcgactgtactcatcgttctacacaagaagagagagaatgaaggttgtagaggttcaaaggatgcttggtcgctatgggagatggatgaaaaggccaaaaacacaagagatggcagggatgagaaaaggtcgggggcgttgaataagtattcagatattttacccgaatacttagctaacagttcacccactacagccctatggcctcaatcttggtagcgacattcgcccatccatcagccatggcagcatacagaccaccgcatagaaggaaggaggatagggtggagagtgttgcgagtatgaaacgtactgctgctatcaatgttgctgcagctccatcgatggaacatatcgcttcgatctcacgctctggtggacatgctccaaatgaagacgccctcacccattattccacccaagagtcttttagagcgttcattcagtcaaaggtttgtatgctgatgatattctatcttgtgttgtcttcgtggcatatctgtctgactcatcttgttcggaaacactgggtctggttagggcagttgacaaagctatatgagaaataccctgcgtttcagcaatcctttcggacaatttccagggatgagagagatctcttctattcaatcaccgacattcttcttctttttcggaaactccgagaaggactgattgcttcaagaaggaccgacaaattctctgtagaggtctatgaaacgtctgcgagattagcattgttgatcaccgatcacgcacagctcgtctcttcattgtcaaagctcattccagacttgtacttggcctccaagccggcccattcaaccgagaatttagacacggatggacggagtctttacgttcagatatacctgatatatcaactgtcctatcttcgatcgcctcctgcgtttttatccattcttcgatcctttccctcaaaattcaagcaaagcctcgaaccaaatactcttcaattacctctccgcatctggtctctttcgaactcgagctcgtaccggagactattttctctctttaattctcgttctttatcaccagaacaaacatccttgtccgacgagaagcagatccggtccagtaatcttgatatattgatccagcgaacattggaccttggtttgcttcaatggcgcgaaggagcatgggcaattctgagaacagcctataaggaatgtccagagactttcataaaggatgcgttgggatttaggactgacgtagagatcgagacggtcagagagtggttgaaagctaggggcgttaaggagatagttgaggggtctggtcgatggtcattcgctgggatcacagcatgagatcctcttcggctctcttgtctataagcattcctcctgaggttcttgtttcctccttggaggatgtatagaaaggatagaaattgtataacatattgtattctatcacatgtagattctcaagatcagaacattaatgaaacttgaatgcaggtatagcacaaattccgattgtcgtgcaggttgcataggagatgaccgacgtcatggccgtccacagatgtatccttgggttgtataccatcaacattttcatctcttctgctcaacaacgaagccatgtcgagttttgcaaagactttagagcttgatcctagactaaagttgtcccctcttcagacttctgccgagtatcacacccacacacatgctcgtgcttcttctcatcgacctctcgattctcttccatcgccaatccatacacaccatcacatatccgcgcctgtccctaaagacttacaagccaatgatgagacatccagcaagtcaggtgttggttccatctattttgtaggaaccgctaccgttatccttgagtgggccgggttgaggatcatgacaggtatgtctcttgttctttccgcgattccagtaatgatcttaccccaccaactggcacacgactaacctggctcgtgttgaatcgctctaaatctgactcaatctaatcggtgctgtcagatccaaactttctacatgcaggtgatcatgtccatctgggacctggtgttacagccaagaggctcacaaaccctgcagtcaatctagaggatctacctcctatcgatgctgttgtcctcagtcatttccatgaagatcatttcgatacagtcagtgaaattcgttctcaactgtttgatcaggtcagttttgcagatatactgatttttgaggtgatgtgatgtaacggttgtgttgcagcttgttcagtcggcgctgagaaaggatttaccgatcattagtacacctcatgccgtcgagtcgttgaaagcactggggttcacaaatctaacagctctcgacacatgggacgaattaatgatcgtccccactcatgtctcttcctcgtcctcatcttctcagtcagttctcttgatctgggttcttttctgttcccttatgttgcatgctgaatactctaatcgtttcgaacatttgaacgacacagaccatcgattagattggtatctacacctggtgaacacgtctccggtcctgtagtctccaccttgaacgatatcataggcgctgtacctcctacatcgggatggatccttgagttgcacagaggaaacaatcagaacggacgaggatacaagatttacatcagcggggatactttgatggttgacaaactcaaggttagcctctataaatcttgtcctatttggtcctcttgagcgttcaagacccacaatcaaatccagtgtttattcaagaggtcacgttgttgttgtttttttccctcttgaactcgaaatatcgatctgtatgctcatacgaacggtacgacaggaaattccaaaacgctttcccaaagtcgatttgcttctcgttcacctcggtggaacgactgtacccagcgcgcaggtccgtttcgcgctgatagttatctcatcaggcctttttcttctttcctccatcacttctctcttcgtcttccttatccgagccactaactttttgggggaaaccccctctgtcctcttagcttcctttattgatggtgacgatgaacgctgagcaaggtgtacaattaatcaaagtacgtaccttgccctggtgttcctccccgtctcctttcggatcagaagtcactcactctgatttcttctatttatgactttatctctctctatcacccatacagctgataaagcctttgttgactcttccgatccactacgacgactatgacgtattcctctctccactacaagatttcaaaagtgagatccagaaagcggcggaagaggagagcgagatcgaagctgagaaagcaggaagcgggggtgaaggtgtcagttggctcaagcgagaagtgatattttgggagagaggggacaaatttgagtttggtgtacagtagctgaaatttgttcgtgcttccttctctcgtatgtatttctccttctttcttctcgcctcatcttcctcttcaatgaacgaattagtttagttgtatgatgactactatgtgtacctattgttcccctatgtatcctctgtctcctgtacgattttctcttctatatcaattctatgctcttcacaaagaaaaaagactgtcatgtacatgatatatcctcaatcgtaacctggttcactagaacccgctggtaagaaatggatacaaaagaggaactttatctgctcagttatccaacatgttgttccaacaaggtcatttagatcgatccatttgcgcgggcgcttgcgcgtactcgctataagtggaagctgggaggatggaacaaacctattcatcttcaataaaaacacggactgaaccttgaccccatcgttccatcagcgcgcgcccacttctcgtcggttgactttttgtgaaatcgatcatcaacaaatgagaacataccattagtcaaaacacgttctccttgtaaaagagaaaataaaacaacataggtaaaaaaagacagacagacctgaaagcgataccctctgcagaagtgacttgcattccgaaaatcgtatgtttacaagcgatatctagtaaggtcgaagcaatacccaaccttctggcggaatgagctgtgtgtattctgtgaatacctagttgtgtcggaagtggtgtcgggctttggacaatgatgataggcaagattcaagtgtaaagaaaaggaaagtgagctagaggcaatgatagaaaggaaaagggatgcaaaggggcgtactcgcagaatacgccaccatcgctctcatctttaccatcctcgtcattgccaggctcaactaccatcatctctccttttctttgtccttttatgccatcctggttctgatcttgacgccggctaaggatttctttccgttcgagtactctataggcagatttgatctgttgtacgacaagtgcgcccaacacgacttgcttttttatatctaaacctaggcttaaatcggaacgggtacttgaccctgccccccacttggctttggaagacagtgaagaagaagaaataggagagccgagaaggaggaacgttttggtttggtcgagaatatagtctggaagaggaggggaggagagcgtgctgtcgatcaaggcgtgcaacgcttgtgtcttaacaaatcgaatgtcaggatgggggttccacagccaagaggaaagaaaaatatcagcatgaacaaaatacgttggataccaatataccaagtgaagcaaaagaaaagcaaaccaaccttcttgccaactttcccttgaccacggccaagcacgaccaatacccttcctctccctctcttttttccgtttccaaattctacatcctcttgaacaactctccagcactcttcatcttccaagccgctcttcttcgttcctctcacttgcgcgctgctcttggaacgatcagcatcatcccattctagcccttcgagcacccgtcgatggtgaacccgatgggtaagttcatcagtgggtgataagggttgatacgtcatctggcatatagcgcatgtcttcactcgaggagcgggacaaagcatagtctgctggagaggagtagaacgcttgtttgcttttgatatagaggtaggggtggacgttgtaaacggccgttgattaagcttcgatttagactcagatccgggccgagattcaaacccaggagaatcgccgagggtcgagacaggtctaaagaacgattgaagagacatttgaccgtgggtcttgtctctgtttcttaaaggttctgatctagacgccatgatgtttgtttcaactttcggcgtcgatccgggttgtagtctcgatatcgattcagagtcgatccccaggtcggtagaagaatgaggggatgaagttattgaatcggctagacacgacccatccttatcttcggaagaacacgaaggtagatccacgctcgacgtcaaaggcgagcttggaaggtcatctgagaagattctatctgatagatgtccggctggacggataggtctaatgaatttctcaatataaggaaatttgatcagatgtttgattatcttcttgctctacgcacagctatcctaaagagagacgacgagatgaggccagaagtaaaaggaagactaacgagctagatttgacacgtttaacgggttgagaaccaagttggattcgagagtacgtccggacacgtttaacagatgaggaaggagcgcaggctgaagatgaagcgggaagagaaggaggggataatgcaatgtcacgcatcggttttaataaaaactgactgtgagtacaggacaggatgataagaaggaagtggttccaagagcaagagaagagtcgtgcaaggaagagagatgatcggatggatgaatacggtattgatgatacatgcaattgttggacgacaaatccaagtcgcgtggtcgcttctatcgatgaagtgcagataagataagatcaacattgaccttgaattatatgctgcttgtcaagaaaaacttctgatcgtctagtttatcgaacaactagcgggaagatatagacttcttcatcctcaatgttttctcaccatcagctgctgatggatgacttgacaaagcatcgttataaaagggggaaaatgaatcaggcgaatgtcgattctcgtacgttaaactcgaaaacagcgttatgtgacgtgaacaaagacacagcaaaggaacagggagcaagatatggaaacgtatagaggaaagagaatgcaaaaagtaaggtcccataaaaggggcaaaaagaagggtcaaggcatataaagaggatagtcgcaaagacatgttgagaatgcgtctttcactgtggaattaagagtaatctactcggttcggtgaactgtgataaagaccagatatcctttggtcagctctgctgcatacaccacgaagacataacaaggatacgatgcactgactgttagcagtcgaagtgggctggtaaccggaggcaaagtttcgggatcgaccgtttcggatgacgaaagggaagatcacctggtgataaaggatctcggcaccctagaaggtagataacatgttgatcagtcaaggttactcatttaccgattcaagatcactccgaattgggtatagacatactcgggtggcggggagctggagccagatgaggaaggtagtcttgaagacaaagtagaaggctattgtttgcaaggaatttttaaaacaagtaagcgtctacactatggggtattttgacaaagtgattcggtagacatacggatgtagtctgtttttagaaaacagtggatggcattgaataagtaccggctcggtttacaaaatgaagcatgcgttagacttacacatgaccaatcgaaggaagagagattcgacgagagtgagagtactgaaagaaacccagtaagctgtacgacgaatgaaacaaaatggaaattagcttccggacactgtcatcggttagattaaccccgaaggatacttactcaaccattgcttgtcgtcgttctcgctgggagactccaaagccttcacggaaaggtaggctgggaggacgtaaccaaccaaagtctgagaacagtgatcgagccatcgttcattggatcagtatggcctctgttcattcacatgaacacgacagaaacgtaccgagataggctgggcgagtccgaagaggttaaagaagatcaaggtgacaaactgatgaaaagtcaagaaaggtgtcagtcttggtatctgtacaaaaccaaagagagtcctcaaacttgtactgaccacaccgaagagaccaatgaaggagatcgccttagggacgttagttcgagcctcgaggtcgttggcaaccttgtatttggagagctacaagagaggtgacgtaagcggccgataagctttttttttccctcacccaggccactacccgttttggtaaaggtaaatatatgacaaacctccttgtcgagtccagcaagctgaacattgacggtctgctgaactgtttgatcgaaggtatagtttgtatgatgaacaggggtcgagatgattagagattgcgagagtacatgatgaagatggcgatgggcagtgcgtaccttgtcgcacgaccggatggttcagtacggcttgaagaccggcctggggcttttgctgagcagacatctgattcgttcatgagaacatatgcatcgatagcgacacgatggatgaagtcagtttctggcaacacgtacaaccccatctcttctatacgtcgtcaatgagatataggataacggccgattggatcatgcaggagagaacacagtgcaagagttggctcgatctgtacgtgtgattgctggtcgttcgaaattccatttcttctctctttcttctttacaaatatttcagagcgagaactcttgagaaacgggtactcacgtttaagaaggatatctagatgcgttggtgaagagagaagcaaacgaagatgtatgggggttgtgatgcacgaaaggctagaacgaggaaaaaaaaacacggataccacacgagcacgcagcaggggcggtgttagggttatctggccacgtcagagtcaggatggatatataaatgccgacccttgtcaatgaagtctattaggggaggttgacattttgtataggactctcttcaaaatcaatacaaaaatgcacatgccttgaagatggatcagaagcccgtttcttcttgtctttgcgctcagataaacgttcaagagaaacaagtcatgaatcaagcctttctagaggagtacatacacgtagaaggaaacagtgcgaatatgcttgtgtgtatgtacgtggggtgcgcgcaagagaagtaagaaaaagagaaagaagctcgtagtctttttcggaaagtcattacaaaagcttcctaatcaattcgccaacttcaatcgtccatctcttgcgtttgtttctcatctctctccatctctcctataaagcgaccatgccatcccaagcttatcttgctcttcaggtagggtgtttctctatctattcaacccatacacggcttaaaatctcttcgttacttttgtagtccgtccactcgaactctgttccattcgtcccgcctgtaccgacttgggcgttgggcccgcttgctactgtgacgctttcaatagccttcattggctcgttctatttttcaacgttcgttactctctccttcgttcgttctctttgcatcaatctcctctagagctctgaatctcttgagtctctctcttctcatgtttccaacagtataaagaagaatccggttcaggaagtaggcacggcattggtagccagctcacttacaggtttaggcatcgtagctctcttctgcgccgtaggcgtcaacgtatgaagccctctgtataaatgagagagagaggcaaaacaaaacaaatcgccgcaaaagagaagaatgagtagatagcttaataagggaagtgtgggctcaaaccgccgcttagttggatctgtgattcgaatgttggacttaagaagatagtagggccgatctggtgagccattgtcatccgccttccattctttcttaaccgatggaatgtctcgggagatcaacactgttcttgagctgactgtttcttgtgaatatcgtttggtaaatagaactagaaagaattgagaacggtcgcttagtacaacgttataatatgttatatacacttctcgtctttcgacccgatgtagtcatgtagtcctgatggcttgcagtacgttcctttcggaactgttctttgatttgaacaaatgataccataaagacggcgcggggccaaaggaaaggatctcttctctccaacttgaacaacacagcgagaatatcacatatatgcatttaaaggtatctcatcgggagacccaaatgtctcccaatccagcccaccgcgctatctctttctctccgactacgctttcagtcccagccatgaccgaatgacctcctttcttcttcgagagggaaggagcacgtacaagtctgtagcctccaaggaaaaccaagcctggtcgagtgggaacgtattgaagcgtaatcgtcttcgtttgtgagtttgaacttgtaggttctacagatggtgcctcctctgttgtctttgtcgacgctggtgatggattgagcccaaaggtttgaacagatggacccaacggtctcaacgtctctttcgaatcaatactcgcttgcaacgaaggatcaacaggaatagaaacaaatcggaatgtgtgttctttctttcctcctcctcctcctcctgctagtcgatcatcttgacttggtgtgaatgacagctcaagtctgatctctagctggaggatccgttcaacttttatctggccgggtttaggtgctcggatgatggtagactcgaccttccactccccttctacttcctcttcctcatctccgttgtcatcatcatcctctccttccgcctgatttgtatcaccggcgtcttcatctccatgatcctcgttcgcttcattggttctgtcaaacggatctcctctatcccaatccctctttctaggcgaaaccaagggagacccagtccctcctggactgagtacacttcgaccagcaactctatcctgccacgattctaacttaccaccaccaccactacctgctgtcatgcccagtgatgatagtctgatcccagcgtttatacctgcccctgtcaacgtgacgaatgacgaaccagaatctgatcgcgcaaaacttggagggttcctatgaagttgttgtattggtaacgatgacttcccgcctggattcgcaaagctgttcaatgaaggtacagggatcatgctgggtaaagggattgtcggctgagaaggcgtctgcgcaggagtaagacggggtagaggcgcaattggaacccggcggtttaaagtagctgtttgtaaatggcctgtttccccataaggtgttgtccagaaaatgtctaatcggctttaggtgattgagaaagataacaaagacgctgttagcacctatatgcatttttctctgtacacattcgaaaagaagagaaggtagactcacccaagaggaagcacgcctccgggttcgccttggctggaacgtccgctctcatccacaatccagcaaatctgcctgatatttcctgggatcaagagcgatccttgtcctccttcgtcccatatcgtactactgtcttcatcttccgattgaatttcgatggcctgaccgtatttgccgaggttattcattgaccggaaggttaatccgtcaactggttcaaacttcatccgaggaaaatacataggaaggggggatgtattttggatgtgaagttcgagaaatattgtcttttggagggaaggcgaaagttgggcggtcgtagagctattgggaaagtgtacttttgtcttgaccgataatgggttgatagcttggaacctgcgattcagagtagatataagagagagatgagtatggttctgttccaccttctgcatgaagaactaaatcgtgaccttacttgtagacttttcgaaaagatcgttcctccccttggtcatcctcccagaacacctcgcacactagcccatgttgaccaagttctttgatctcccattcaaccttcttactaagcgcgcaacctggatcgaccccaccaccttcctcatcctttcccgttatatccgctaggacgactttggccgagaccgaatggatctctactcggagcctcactctggctactggcccggtcgttgggttggaaatcgcgatgagtgagcagaaagtctcacctaacgagatcgacccgaatgaggaaggcagcgtcaacaaggtcgatagtccggattcaatcttgacaaattcacccagaacaggtccgttcccagcgttcaagagattttgtctcgaccgtccgaggagagcgtcagaaagaatcgtcggtggaagctgatggctgagcggtggttgggcagagggtgagagagatggttgggatagtcgcatcaccttgagtgacaacggagggatcgatgagttcgatgaagtgacaccggtggcagaaacatgactagggggcgcaggagaagaagtcctggacctagagagattatcggtagaaggaacatggtcaagttctatgtattccgtcgtcacagcagaacaagtcgtatgagggagatacatacaacgatgatattgtgtttgacagaaactggttattcatgtagaaacctttagaatgagagatagagctgaacggtacgtatatcaagtcaagtcgactagcctaggtccaaaagatcaatatgtttgcctcgatgacgaaatgacagtgatgacgatggtgatagtttgaggtagaaagagaagaaggtagattgaatctcctcttgatctgaccatctgctgctgttgacattctatcctgctctctcctacgtaatctcaagcgcttttcgacacacattgatcttgttttcttcatattcctcatcatgcctctcaagggtgagtagtgttgctttacatccttgcgttctcgcgttctgtcttcccttgatctctttcggcagcgtcgactggggaatcaccttagatacggtttagttgaatatcaattaagtctaactggacccaaagcctgccttaccatcatcaaccatcatcactacgaccacaaccacgacgaccacgaccgcctcgactgtcaatcacgagtagctagagggccatcatgtcggacaacgaggtatgctttcaaaatcagaggaaatctagaaatcagatctcgggtattgattgattgaacgtgcctctttctctgactcgctataactcgtctcttccttcgcttcaatcgtctgtactttcctcgggtccacctttcctaattcacctaacaggacgaccgcgctaccgctcaggaggaccttcaccggaaagtattcggaggagacagtgattcagatttctcaagtgatgatgaggatggcaaccgacgttcgtattctgacctgcccatcaagacgcgtttccttgcgtaaaaagtaatggatataccaactcaatcagccttctctcattttgcccaaccgacctttgtctgacgctgccacaggtaaagcaagtagatcagccgattgctcttcaaaatcaccttccttcagtcgtgctcgaggatcagcctctcccgttagatcagcctactcgtcacccgcccggtcacccgtgtcagctcggtctgtatcgaggtcggtctctcccagcgaaggccgagacggcagagacggtgaagacgatggtgattatgagcgagaagaatctgccaagaagatgagctttaagaggaagagtagcagaggcgataaagaatcagcagacggagcagtagaaggaggcaaaaagtcagtccactagcccagtttcttatataccttggtatcagactggcccattgcaaggaggcggatagcccggactcaccgtgtctttctatcaattgattacttcttggtcgtcgataggaaaaaacgaagaaaggattcaggcagagatcgatcggctgagcctgatcttgaccaattggaaccagagatggatgcgggaacccgtatgtgctgtcttttaccctttgatttctctggtcctttttcctttgactgacctggagtttattctcttgattttcatctgacagttcgaagacttgagctcaacagaaagattgatgctattgttaaggcgcctcggaaagccagtaggaagaagaacggagatgatgtatgtctaagtctttccgtttgtattctgcacttcctgttcttctcaaattgatcaacttgcgtttggtttctgttcgattgccgctatttcgatcctcccaatcttctactcaacataggatctggacatgatggcagatgacatgatccagaacatcaaagaaaagatgtttaacgctgctgatcaggacgaactcgctgtggttgagaaacgacctgccattgccaagctagccatgctcaaggaggtcgttgcgattctccaacggtactagttatcttccttcgtctttttttcctcgaaactgacaaacaaaaactgacgagaggccgcttctgattcatctctcttacattcgcagaacgacattaactcagtcaatcattgataacgatcttctaagtgcggtcaaaaagtggctcgagcctttacctgataaatctttaccagcgctcgatattcaaactgctttctttgatatactcgtcaaggtctgtctttcgctttgttgagtgttcctggaagcgattgtactcatcctgttccgctctgtatcccattctttgctcactcgtctaccaattcacccattgaaccacaaagatggatatcgaacgagataccctaaaatcttctggactcggtcagcccgttctattctataccaaatctcgacgagtcacgacgtacatcaaacgacaagcagaaaaacttttggctgcctggtcaagaccgcttgtcaaccgaagcgcatcttggaagagtaaacctgtacctacattggatgatcttcggatgcctggatcttccgctcctggaggtggaggaggtggtgccgggggaggagaaagaagaggtggtgcattgaaggctgttttgggaagtcagaaagcagataatgaggtagaaagagagaagggaaagagaagaggagtacgaatccctcaaagcactgtacgttttttttctcgccacgcgtgttcatgtctctcaaccgatcatctcctgatcacaaacacttgtctgtcttccactcattcgtgtcaaacccctctttcccagcgagtcacattcacccacgcgccgagatacgaaggtccttctcaaaacaacagctctcaatctgcggaattaagtcaagaacaactcaaacgacagagagatatggaaaggatgaagaaaatcaaaaacaaactgaatgcagctaggaacgcggagagactctaaattcctttacctctttgcttcttctctccttcttcctatttggactgtttgatacgtaactccatatcttatcgtcgtgtgtttttgatgtatgaactttctacttggtttcttcttttcagttagatctccgatgagaggttaagtttgcgttctaatcccgacattatcatgccatagtctttgatcatgtaacttcgacaggtcgaggatgatgccatctctttttaggcacacccacaaggacagaacgagatcacggaaaaaaaatcggatgacaggcaagagaaagcttcataatctagatatcgtcgagaggaaaccaagaagaacaaagtgggcgaggacaaagagagagaccgactagtcaagagaacaaggagaacaggaaaggtaaagaaaggaggaaacatgacagaacgatcggaaaaaaggccaattttctattgattcgcgttggacctctcattgataaaagacaaaaaggggtacgggacagatgaacgttgtaaactgattttgtggaagggaaaaatcgataagggcgtcgagagtgaaacgtatgtatgcgtggttaatagtggtcgagtgttttgatgacaggggcgtctgttttgaaaagtaacaaggcaatggtgatggtggtgggggatgatttatagagcagataagcgaaagaagagagaagaagtattgaagaaacggagggtatcggattgtacaataggccacaagacgactaagaaagatgaacaagacgagcttgtctcaggaagagtttactgctgagcgcactgaacctggggtccagctccttcctcctcatcatcatccatatcatcatgcgaatgcgaatgtcctcccggtcctccgtgagctcgcttctccctatcggtcggctcggagagcttgacctcgtccacgtgaatattctccgggtaggtctgagcaggcgttctcgggggaagagcagactcaagtccagcgatgagagccggatcaattgtgtcggggaagtcaacggtaagcttgacgtagaggtctccgagctcgtgatgcctataggaaggcataccctgaccctccaaccgcttcaaagttccgggcttaatgacctctccgggcttaatagtgacgtgaacggcccgatcatcgagatgaaggatcgaaaactctcctcctcccaacgcggtgagaaggtcaatcttgacctcacagtaaagatcatcacccttcctggtgaacagctcatgaggcttctcctcaatgacgatgacaacgtctccaggaattgttccaggggcctgatcggactctccgttgaaggtgatctgctgcccacccttcattcctcggtcgatgtggacctcaagcaccttgcgctcagagttgactttctttccagagcaaaccttgcatcggtgcttaggatcgataatctctcccttggcatcacaatctccacagggctgctggacctgtttaatttgagatgcgattgcgatcagcttcttgtgctacgtatcgataggagtgacaatacgattgataacatgtgatccttatgactgacctgctgcatcataggtccaagctgtcgaagcatcactcggtatccctgtccgttacaggtcgtgcacttcttgacggcaccctcctttccacctcggccttcacatcctccacagatgacatgcttctgaagagcaagcttcttgaccttgccgagataaagctcggcaagcgtgacgctcactcggtgaacaaggtcttttccctttcggggaccctgaggtcgtcggggtcctcctccaccgaatccaccgaaagcctatcattcggacaaagggagaggattagcatcgagtatatcagtatgggttttatctgtatgcacgtcgattggctatgcagaaagaggagataagaaaaaaaaaggcgaaaacgtactcctcctcctccaccgaacaactgcgagaacaagtcctgggcgtccattcctccacccattccaccggcgccgctttgaagaccggcctcacccatctgatcgtacctgagtatcacaagttcaaaaacagatttggagtcaatgacctattcttgacaaacaagggaatatatgaatagcaaagaaacaagactcacagatctcgctgttgagggtcagagagaacctcatagctggtaaagtcagacagtcaatggatgccaatgtaaacggttagtgatgggtttgcatcagggcgagaaacgaggagctggtttgtaaacgctaagcggtgcgctcaacccgccggctcggagaatcttggagtgtataccaatgggagaagaaaggcttacgcatgggtgacctccttgaaagcctcagggtctccacccttgtcagggtgaagtcgaagggccctaaataatgccaaagagaaaggatcggaagagagagaaaaagaatatcagcatcctgttgcgctgaccaatcgagaggttggagaaaaaagtatcaagtggtggaatcagaaaaattaaaaggaagaacaggtctcgcactttttcctgtatgccttcttaagctgatcctccgaatcggtggggttggctccgaggagatcgctttattatgcaaagtgaaagggtaaagagggaggaaacaggatggtaagtaagaattgcatcttgtcagatatgctccgatcttcagccgttctaatgaatcctaactaaagagaagcaactcactagaatgcactgtttcagaaaagcacagaacatgcagccagccagccagccagaaccatagaccgaacgacatgaacaagaaaacatcgtaaagtgtcagtttcgtctatctttcgtcagaaataagcttcgtgtttggacgatgacagttctttttttccctccacctgtcttccgtgctgctcacaaaaagagagagaatcgcaagactggccaacgtacgtttccttaaccatggttttctctagagtggatatgtaagtatagacgaaagaaacagaaaggtgaacgggtgaacaggtggagagtaaagtcaacgaagaggaaacgtccagcttggatttttcgatgaatttctttccttgtcaaagagaaaattctagaaacttttccttctctccacctttgtcttctgcgggctgggccaagcgctcatcgatcgacaataagctcaatcaatactctgctttcgtacattcaatatacaaaagagaagcaattcatctatagaaaagatgataataatggttccatgtctcgagagagaaattgaagagaaaaaaaggcgtggtggtagaatttttccattgtctgtacagtggctcccttaaatacatatatatctaggaactaggatgggcaaatcgaagcctatacaagaggttcttttgtttttgatacacgagagcaactaaaaagagcggaaagtacaattcaaaagatgcgaaaaacgataatgggaccaaaagaaaggaagaggatactgtttaaccgtctaagaaacccgcccatcgaggatccagtccctctcggactaaccacctgtttccacccagccatttcttaaccctctccctgtcgtctttctcctcctcctttccatcgtccagcacagtcatatcgccttctccttccaacgcgagacatgaccatccgatgatcatcattgctggtggccgttgatcgccgacagtctcgactgcttggagaatatgctcaagcgtggaggctaccattcgttgatcggcagaggacgcacgctcgatgatcgctataggcgtgtacggagggaaggcgggtcccgctcggcttcccgcgccatcttcctcagacactcccagaggagactgaaggacagaaagaacggatcggagtctggccacacccatgagaacaagtagcgtccttcccctttcgtaaccggggagggagaccgctttgccctttctgcccacaccggtacaaagcaccatgctctcggccacaccacgttgggtcactggaagattgaacatcaacggcccagccagagccgagctgactcctggtacgacaacagattcgaaaccgtgttttcggaagaataagacttcttctccaccacggccgtagacgaacggatcgccttgtttgagtcggacgactcgttcaccccgtctggcgccttcgagcgcaagggccatcatctcattctgcgctccttccgcgttccccgggaattttttggcaatatgcagcgtcgttgttggaggaatcagagcgaggatctcggaaggcacaagtttgtcggacaaaatcagtgtcgccgtctgcagtgatttatgagcggcgatagtcaagagagatggatggccaggtccagaaccaagtaggtgaatcgagccttttcgagcgggtacaggagggggagagccaggtcggatagataaagagtggttcgttgtcggcccaccaacagaggaagatgagccggcgacgctcgaggaagaggcagtcccgttgatagttgaatcatttgcgaatatagacaaagctccttcctgaccggcagaagaaatgccagaggggctggtactatccacgaagccctcgtcctcaatacctttggaagcataccgccccaatacgctcttcatctggctctcatccatcttgccgaggtactcaaaaggccagtattcagacacttgagcaacccacctcatccttctttttgtttcttcgatgctgcgcacatcgggttcggtcggaggaaagtacgcaggtgatccctcatgaagttgtggaacaggagaattaagaggaaacgcagagagtgaatcttctcctgggatgttgtcaaagattagaggtctacctgactcttttttaattaagctcggtcgggtggcagtggcggtctccttcgcgagttcacgtaacctacccacgttttcgaccgcgcctccaatggatttcggtagagcactcaggacctctcgtttaatcctcgttgccagcctacaacctctgccgttggtcgaaatccctacttgaagagcggaaagacctttggaaggatcggtatgatcgagtgggaaccgatgggtcgaaggaaatgtaaagtcggacaattcgggatgatctgcgatgttgagtggaatccggaggctcgtgcaggcctctcgcagggcgtgtagcgaacgagacgatcggtgggttgagggggatgtggaaggtgcggaatcgtcgatcactaaaagaaggaggatgtcattcgttctcattagtccttgtctgattcgtccattgggttgtttgtcacacacactcgcactgccaactactacaacaccgttggaagcaaacggaacgtagaacactcaccggaatcagtcacacaaaccagactgacatttgacaacgcattcagtgcgttctcccagcctccacatccgtcttcgaggttggtgaactcgacctgctgacgatcgaccctccacctgatctcttctgaggcttgagagagcgaaagtggggaggatacaaggacttttgcgtctgcatcaagcgcggcaaatgatctagaggctgctaatctattggaaccgatgacgaccacgagcttgtcctttggattgaagcatactagaagcgaggctgagccggtaggctgagcaaatcttggcctagacgatgaagaggacgaggaggcgcaggaagccagacgagatgtgagcggcgtggaaggaagagcaagcacagacatgatggatgacagtcaagacagggaataataatctgtagaaagaagaaagaaaaagagaatcgaaaaggaagaggacgagaaaataggaggatgaggttttgaatgatggaatttgatgaattccgaatatctttgcgccatcgtcgtgccatacacgtctttggcttacgtcagcggtcttatcggtaatttactttcagtatcggtgtccttgagttctcagctcaacagttatcttttttttgctagaccgaatgcacaagagtcatatttgtctcaagatgatatacaaagcaatcatgatcgaagagaactaccatacaagagaggaaaagggcacgacgaaagataagggaaggctagccagccagatcctacgattgacccaaaggagtgggaacaggaacaaagtcgatcgttcccgtgccagccaggatggctccaggctttccggttgcaggaacatcacccccgatcatgtcgtgagggaatccgatatcaaactttttgacacctgtaggattgaaaagcatcgtcggtgttttcagatggagacgagaggtcagttaagagactctccagcaacgacaatggtttcactttatcaagagaaagagatattgaaaagaaggaaggatcagaccttcaatggcctgaatctgctccgggcttaacttgatggaaagagctttgatgttatcgtgaaggtgctgatatatcgcgcgaaaaaaaattagatcagctttgtttcgattgttacagcatcgtctctaggcaagcttgagaaacagtcttttacccacctcgacttttcgaccaccaatcagggggaacacgtaagtcgatttggaaaggatgtctaacggacaaaatcataaaacccacggttcagcgaaaacatcgttaagattttgtctcgaccccgaaacgcaagacaggcagaaccatgacaacgtacaagcaagtgcaacagcagtgacgctctcgacacccacttcctgagcgatcttgtcaaggacctctgaatatttgacttcgtcctcactctgatccccttgtcccatcatgctgcgaattttttcaccagcagcttctttggcttgaagctgaattttggtcccagagccacaggtgagaccgcgttcgagtcatgaagtaaggaagaagatcaaagtgtatgacatgtcaaggtacctgcttctttgacaagagccgtccaccaccgatggcatcccaaggtgctaacgccatgccaaacgtccgggccattggaaggatctcccgctcaaagtctcggctataattagttgtgatttttattattaatgatggagaagaaaagaaaaggaaaacgaatgagattgtttccttcaacaacctcgaaaagttggtacataaatagataactaaaatgcacgaacagcatgacattccatcgtccctggtaaatgacgaaaggtgtcttcccgtgcgctctttgaataagacaagaggtagtgaggttgtcagcgcgagaaaatcgagacaaggacagagacgggctttggttggaaaaacatacttggcataagtgttggcagcagagacgatccaggctggggtatcactgattccaaggtacaaaaccttaccggattggacgacgatatgtaaggcgtccatgacctcttcaatggatgtcgtgtaatcccaccaatgaaggtaaaggatgtcgatgctgatttgaagcgaagagacaacgcgaggatgggttggtcaaattatcgcccccggatcaaatccatctgcgctcacgatggaaaaggacatactaatcggtttgaagcttcttgagagagtctcgcagggatatatgaagagacttcttatgattcccggcagagttgacggtctcgtttttgccctcagcgtacgatcggtagctgccagaaacagagtcaacatctgcgcgacagttgcttgtcgaggcgggacgaaggaaggtgacgattgactcacgaggacgtaaacttggtggcgatcaccattctatctcggtttcctctctccttcatccattctccgatccaggtttccgagtcctcgttttggtagttgttggcagtgtcaatgaaatttccaccggcctcaacaaaggcatcaagcaacttgaagcttgactcctataagtttctccgaatcgaagcgaagaatgtataaattgaatatatgcagtacctgaaagagtgttgtaagcgactgaccttatccatagaacccaagacctccttccaaccgcttcccaagctcatcgctcccagctgaagcggagaaactcgaataccggcggaaggagcgaggatccgcagtcgacccaaaggtgtcttcggttcaggagcaggtttgaaaaagtcagtcatagtttgtgcggaatgaggttatgtagttctgagaaacagtcgggatgatgatgatgatgatgatgatgatgaagaagtgcaaacagatatgagggactcagaatccatcaggttcttatactgttctccctatcaccagacattcgtaatcacatcacctccacttcttgactgtggtgttataaattacggcgccggtctcgcggccgggccgtccggcctccactgtgcaactgggttccaaacgaatcgtaagcgtttgaccagcttgttgaatctccatctggttgaactcagttattgatccgttccatcttccttcgtggatacatcatcagagatttgttgttaatgggtgtgtgtatcgcatagcaagcagaaaagatgttcaatgcgcaaacaaataagagacgccgtatactgagacatatctaatctaatctgttcgatgggtattcatgcttcatcgtcatcatcatcaccaccaccatcatcatcatcaccaccatcttcttattcttttcatgcgacccaccactatcaaacaagttggaaaaatgacatctcaagcagcactaccgtcttctactactaccttgacaagatctgctttgccggttatcttcccaaaatacgccggcagaacagcaaagtctgaagctacgatgaaggatttgatcgagaaagatggacaaaaccatcatatctttacgagtaacaacgttggtcttttctcttgattttctcctcttcttctctttctcctctctttactcggagataagctctcaatagccgtttctggttctcgctttgctcgatacaagatctttcacaaccatctgactcatcacgttctgtcggcatggagcctcggtgcttcctcatcacttctcaaacatatctacgatatcaacgctacagagctagtccctcttcaaccgctcgatagacagaaagccctgatatctagaggaatcaaagtgagagtggatgttccagaaatcactgagagcaactggactgaatacctcgggattgcagagtaagccgttcataagttcgggccggctgtcttttccttctcggtgatctcgtcaccccgatggacgtgaatcatctaaatcaggctgtgtaagaggatctaagaggctaaccaataccttggatcttgaatctgcagtgcttacgcagcctacctcgctttcttcctagctcaaacaaaatctttggggatgaaagacacgctcagcagttatgttttcggccacgaagccgtctgtccattttcttaagacatggttcacgatatctcttcttagctcacgagggtcttgtcccttttatagaacttcgggaaggaaggaacagatgcatccaagagaccggtgatgcttgtccgtctgatggcaggggccgttcgtgagctcagccttctactcaatgtgccgttctagtgtcaccctcgcttactttggcttcacaaaagacccgtttattcaaaccggctttggcgctgagttcgcattcattggtcctctgttgtttgctgaaggactggctgaggcagctgtacattccgtcaagtccgtgcaacctatctttccctctgactggcccgaagtgccgttgagtgaacacggtggggatggagcggcagagaacgtatcggtgttggaagcttacaaaagattggtcgatgacgaaaacgttgtgcagggggattatgatcctgataagatgatcagtactcgaatggtaaatctggtttctcatacctgtttccttcaagtaacagatttcaaatcaagtttattatcttctccttttcctctgatgctctattatcgacggccactgaagacggatgtgattaaaaatggaaatgcccccctcatcaggaaattggtctcccagtggactgcttcccagccagatctctcatccaaaaagaaagggaatgcaagtgaagcctgggtggagagaaagatggatgaggtcatggtttttgcggctttcatagcttgcgccacaggtaaactgggcgaggagccgaagatcgacttttttctggttcgtccttgtctattctcctctctgaggcttcttagctaatttcatgaagttactgttaaatcgataccgatcatgaacagatgcatatcttgacttcatcattgttcctaccatcattcatcccccttctgtccgcacctaaccagataaaacttctcgagacataccttgctgcggccttccagctttgtatgtctagaggccttccaaagattgacggtagaataccttggaatagaacacagtggcctgtaaggcccggaaacaagattggacggggaagagagggaaatggatggaatgaaattctcgaggaagcactatacgttcctggttcgttccgctgtgttctctgattgtttcaggtcctatcttccgctcacatctaccttcatctcttcttcttccacatcatggaaaccatttacatgcataagattctcacaccgtcaaaagcatcaggtcactcttttacctttctaccaagttaggtacatctcccgccggtagccttcccggttcttcactctcttcctcgctgaaatcacagcgtcaagacggagaagaagaaacgttcccagggatggggtcggttgatggttcgatcttcatccgaatggcaggcctcatcatggactacatgaaatggaacggaccggaggccgagagtgcgagttgggatcggtctgccttaggttgggatgaagcctggaaatagcgtcaaattcatctctagcgggtttttatacgactatgtctgattgaacttcagttatgtgtatggtatctctatgaatatgtatttttgttaccttatctatcattccttctggactgtcttatgcgcaaagtcattgtcaaagtcgatatattgatcaagatcagggttgagctgattctcctgattgtgtcgaagcatgtctgtctcagatgattctatgatcccacaatgcatgaaacgtgttggaccagggcggctggtaaaaccgaagacataacgcaagacaagaaaggtatcatacatagttccatgctgaaaaacacatatacaacagataagtcttggaaccaacgcagcagacgcataaactcagataccccatcgaagagcgagggaactcgaaacgacgctgacgctactaagtgccatagcaagcgcactgttcaaccccaaacataaaagtttgtcatgtcaatcctagcatgtggttcttctttaaactgaaaaaagacgcacctccagacaggagcgagttttgttcgaccagcagcataaaagactccagcggccagagctacatcaagtagaaaaaaagataaacgccttattcaaaagcgtgagataatgagagcaagaaggcactcacgaagcgcaatcaggttgaatactaaggcccagcaaaagtttagcttcgttcctataaattcataagacctccaaattatatcagtttttgttttcaacgcaagatcgcgtgacaagatgttgcgaagagtagacactaacgactgaaaactcgctggctgatatgcaagagtgagttcagcgagtcgagggacgaatttaaaagaacgaaatctgcagacacgacagagacttgagagccagatcccatggcgacactgatcaagttcgatcaaactgaagctgttagcacaccaaactttcgttcttccaagtagagtgaaatgtcaaagcgtttgtctcacccaacatcagcagcagccaaggctacactatcattcaggccatctccagcgaaaagaacgaaacgatgaccgtcgacgcctgaacctttggtgaacgatatcgttccctggagttttcgaatatgttcagctttttgttcaggaagaacgccagcgacaacacaagtctcatcaatccccactgatgaagttcaagaccatacacaagaaaagcaacctcaaagggtgagaatcacgaaaagcgcagataatgcagagtttaggagtgagcctaccttgcttggcaaccgctttggctgtcgtctcattatcgccactcaacatccaaacatccttcccactacctcttaaggcgtcgatcgtatctctcgcttccggtcggggcggatctgcgatcgcaaaccttgcacagactgtgtaaccatcatgagcatcagatcttgtgttctctgaggataaatgcttgattcccacaagaactactgatttggcttcttgttgccagtttcgaatcgtttcgtcttggacatatgtctttcccatcacttgggtcatgagagcttcgttcccgatagcaatttcaaatcgcaagggggatctactagtaccagtggtggggaggtcacaggtaacgacagctttgagacctctaccgatgatttcttcgcttgaaccagcagacactgtataagcggtatcatactggacaagctgatccgagcaaaatgtgcgaagcgcggttgccaatggatgagaggactgttcctctagctgttgaatcgctgagaggaggacagagataccatgagatttctggtcaatcccatcgctagtggatactgtcgtcagtaaggaaggcatcgaaggagaggggtaatcatggccggtaactgatggtttcccggtggtcaaagtcccggttttatcgaaaatgacggtatcgactttggtagccgcctggaaagcggatccaccaccttgcacaagcacgcctttttgggctgcgagtcctaggccaacagctgcagctgtgggagctgccagcccaatgccacatggacaagcaacaacgaggacggcgatgaaaaactcgaaggcgaaaaagacacggtcaccaacggacacagtgacgtcgagaccttgcttgatccaattgtcaggaagggcgttcgaaagtacaagagcaagccagacgacaaggacacagattgcgaaataaacctttagaaatgtatcgtgtgaaatgattgaattccaaatcaacaacaggtgcgctcggagaaaaagaaaattcgaggcggagaacttacaacaacaggaacaaacaccccagtaatcctctctgccaacagctctaccgggctcttcattccttgcgcctctcctacagctcttacaatcttttcgatcatcgtttcatctcccagcacctccactttcatcagcacggctgaaccaacattcacagttccagtgaagatctgatcgcttggacctttcttgacaggtttggattcgccagtgagagatgattcatcgaaggaagtcattccagagacgattactccatctgtaggaggaagagaaccaggttgtagaagaatgatatcgtcgatctcaagatgagaagcagggatgagtaaagttgagatgtttcccatggaggctggttcaggaaaagatagacttgagtgggttgaaggcttttcatcagtcgcgaccgcggtatcttgagtggaggccgagactacctgggacaacgtatgaggtttgccatcatcggtactcaaatcaatccctttgagagaacgataagaagactctttaggtatggcaagtaatgccgagtctggtcgaagggtccccaagagcgcaactgcatctccggtctgaacggaacgaacatacgtgacatttgagcatgttccgatgactatagaagcaagcacagacgattgtaaagaaaaacttaccctggatttagcgtatgcttcaaggactcgaccgattagaatgaaaaatatcaagaatacactggcatcgaatagggtcatcatcctgtttcaccccagttcgtggcgaatcttgcaaagtcagatcgatatttgctcgaaaaccgcatggcatagaagtacaacaggagtcttacctctcttcactctccaccatatgtccatcaatcattttcatctgtctgggggttgtgatgtcgacaatcatcattgccagacttgaaaagtaagctgtcgtcgtactcattgcaaccaaaaggtccatcgatccaaatgagaaaaatgtctgccaggagattgttttgacttgaactggttgtgaggtagaacctttggattggcgtcgacgggcagatcggatacgagcggcaattggtcggaaggctcgtcgataaaagattcttcgaaaacgaaataacgatcgaatgtaagttatcagacaatgaaatagaaagaaagacaacacacaagataggtactcacttcccgattccaaactgaacgattgtagctaagacccagagaatgaccgtacctctgctggctccaccccaagcttttttcatccaaaacattctgaatgcactttcctttggcatcaataccattccgacgatagagacaatgaatgttggtatggccaggatgagggcaagtgcaaagtacgtaaagagttgtttcgcttcttttcgctggatcgcccgtgctcgagaggagactaaaactgaacggacaagagtcgaactgaactccgagtcgagatcggccagagtagacaagatctgacggatggtgaaactcggcttggggctgtagataatagtgctcgatggcgatttgagagtcgtcggcgtgaacgagacaatacattttgaggaggctagctcggccagagtagcgttgactttttttacacattgagagcagaacattccttcaatcaagactgttactgttcgtagtttgggaccttctaccgggtttgacatacgcgcggcggatccattgtcggacgatacagtcgccatagtgaggggaattgacgagacaagggagcaatcatagccggcgtcatcgacaatttcgatgaggttttcggttgagagaagagaagaatgagtgatggtagccgaggcacttaggacagagatatcgtgagacttgatcaaaggatttggggagagcagttgggagagggtggatgagcaagctctgaaggtgcgagacaacacaaacggtatgagttcatctgaccatgaaaacaccttgagaagagatataccgagaagagaataggtactcacgagcaagtcatgcctccgaccatgaacgtactaactagcgtatgctcttcaaattcttggattctgtctagagcagccatgcctttctcggtttcgaccccagctttgacctttgcgtctatacccaaaggcctgaccgcgttttccgtttcgagttgtagactctcaacgatttcgacgccatagccggtgtcctcaatgatctctgcaacggcctctgtggagagaatattggaatcgtaaactacggtcgctgagttagacagtagcgagacagaagcacggatgatgtttggtttagtggaaagtgactcggtcagggtattcacacaagatctgtcggttcaaaaaagacagaggatggtcgatcagcatccctgggtggttacacagagtcagggaaaggagagaactgagcaagaggaaaaggggaaggatgacaacaagacgaacccgcaaaacatgccttcaacactaaaaattgtttccagaatccgaggcttcaatggtttctccaccgagacagcgatctcttggccttcatcttgcctagactctcccaccggaccgaccatttgggcccggtcttcagcttgacattcatcacaattggctacatgtctttttcgtctctccacgcgctctttctctctagatgagataaatccgagctttgagagccagctagtcttctgccccatccaggcacgttgatcgtcgcttcgagttgcccgttcatcagcattggtatgccagggagaacgatcggagctagcggctcgagaagctgactgaatggagctgaggatctgaccgctcacctggactcgctcgacatcgaaaccagcttgctgtagaactgattcaacgcgattaacgagtcgtacggcctgcttcttaggatgatcttcatggtttccagaagcagtgattagggagggaagacagaaggagaggatatgggtgagataagagaccgataaggaagatatgctggatcgggtgaggaagggatcgagcaggctagtgatatgagagacacaggatggacaatctttcggagaagcatgtttatttcaataaggtgtgtccatgaggaaatagacctagaaagcgcactcacgggcgttaggtactgatattgatcagcgtgttttttttttcgacatcagacatttttgatcacaacgtatacatttgttcggtcaacttagtaagccagtgcatagagtcgaaaagtctagagagaaacgttgaacctaccaaataataccacctgctggggatctacgagagaggttgcacttgaactggcgtgtgtttccatcatagtattagctcgagccattgagtgagaggttgagaaggtgagcaaggtagtaagtggtgagtggtaagcgacaggtggaaatagtaaatgagaatcgcggcgaccgcttgaccttcttatgagcagatgggtgagtgttttagtggacagttgagacaattcaaaaacaaagataccaagagaaagagcaaaagaagaagaaaaattagtttgctggttgatgttggcaaaaagtgttcagaaaagagcgcatctttcggatggctggagggctttctttgattacgtcatcccggaggttatctttgaatacctccccagtcagagctatcgaagacgcacacagaacaagttgagagacaagaattggatatgcttcacaagacacgattgataccaataatttggacgagggtggcaaggagaggaccaagaggagacgttatggaaaccagacatgtaagaagacgtaacgagcaagaataccgaggaggcgacggaagagatgatgatgtactgccttgataagaatggcagtcaggtgttgtcacctttatctaatcacttcgccacagctgctgtacagagctgatgacgcgtttctatccggactctcttcatccgatctcgtgctgggcgctgaatccgatgattgagctccatcctctatcagaataagcgtcaggtcttgatatccttcgctacatccatcaccattaacatcaccatgggtttcaaagacacttttctgcccaccacactctcggcaacgcaggcttccatcagtgtactccttatcctcgcctacgggttctacgcaaggaaacgaaactggatcaccgaggaggccgaaaaggtagtgtcgctaaccttttctttattgataccttcttgatctagagaattcttcgtagtattctcttcaaaagctcctatgttgactccttctttctttgtccttactccagaacatttctttccttggcacgcacatctttcttccagctctcctgttctcagaaattgggcctctagcgtccattcagaatctcaagcactgttcggccttgcttttatctgtcttctgctctactttagtcccttatcccgaactgacctgttcacgtaaatttggtagactggtcaattcctgtcgtcgcgatcacatttcagctactttcacttgccatcagtctcacgctctcaaaactcaaggtggttccgccccatgtcgttccggccttcatcttcaacaacgtgacgtccctcccgctgctcctaattgagtctctcggctcagctggcgcattgaagagcttggcttctggtggggattcttctgatgagatcgttgctaaggccagagtctacttcttgtgaatacactctcccttctctttttttttcttctcttccattgtacttgatgcccgttgctcatatatgcatttgtatcctctcgcttgcatcaccttatagaatcaacgccttagtcggaaacttgactcggtctgtcgactcgttcttaagcgtgaagtgttgacatatgacttcctactcctcgctcaactaatcaatgaccgtctatctttcatctgctctctctttaggtttgctctcggtcccgctctcatgtcctcctccgatccgcttcctacagattggtcgttcagcgagtctcctttcagtaccgtggttcagaaggttcaggatgctctccctacctcatctccatccagacgtggttcatcagacgagcaaacctccctattgccttctagagaaactgttaaagaaaacgcgttcacgatgaaagataacatccaatcagtgatgaatcccccgttgttgggcggattggcagcagtcacactaggcaccgttgaaccaattagaaatgttgtgttcaaaggtggcgccggtggttgggtcaagccattgacggacagtattagcaaacttggagggctgtttacggctttgcagatgtgagctttggttcttattccttgcttgcatgttagaaaccacatggctgacttgacgctatttttgttccaaattacaggttcatcctgtaagaatttcgtttttttccctttctctatcatctgatccatcattcagtctctgaccgagcatcaactcatgtaaaacttcgtgcagaggcgcccatttgtgctctaagccttctactaaggtctctcccgtcttgctcattgttcttttctcctatcgattcttcattgttcccgtcctatcgatttcttggatcttccttctgttaaagtatgctccttgggtgctcaatggagaccccgttctggcattcgtgctctgtctgtgtccagtaggaccaccagcgttgacgttggccagtatcgcacagatgtgggttgttgtatttttagtgcccctcgacttctctttctttgactgaatatttctctcttcatacaccttttgtctacaggtcggacattgatgaggatgcagaggtctgtcctctcaaatgacaacttatacccatctattctgacgtccttttcatcgtttcgcttgtgggcttttctcgtagggccaaatcgctaggattatccttgtgtcatacgctgtcacgccgttgatttcaattgccgtcagcgccgccgtttggatctgctcaatgaagtactaaacctttcgatctcttaatctctctttactgtcactttcttgtgcctctgtgctttctccttcgcaatcttttctcaaatacacgacacgacatgcgcgcttctcgacctaggaagaagaaactcaaaaagaagtttcgttttggtgtcagaagagacggtcaatcttgcatagaattcaaagttccttgtatcctatgtgttgtacaatatctatattcgttgcttttatcaagtcatcagaaagaaggggagaagaacagacaagatatgcactccgatgaagacgcgatgaatagagcttaatggattcagaaaggaaatcaaacagcgggaccatcaagcttgatacccatccccaagtggtctgatcggacaggctctcccggaggcccagagacctctattgaggtcatttgttgatgtacacgtcaatcaagtctaagtcagtgaataaacgactcgcagaccacatatgatgagatttgagagaagggaggggagagggaaagcaacggacctcgtccctctcgaaatgttcgttctagaagatcattaaatctttttgggtgctgattgtaccgttcaagtatttcgtatttgaatttgaaacgatcgtatagagcatcaatgcgtgatacagaaaagggggaaatcaggatggagacataaatcaagacgagatgtaagtttcctgtcaatcaaggattgagatttttatccaacgaagaagtgtagagactttacctgagcatgaactactcagtcagaatataggtgtaatcagtcttatcagtacagattttatccttaggagaaactagtataagctatgatcacactgactggcatgacctgtatcttcccatgtaattacttttcggtcatttgaagagagttagaagtaagaaacacgttgagacgtcacgtcattgaaactttgagctgggtgagtttcgatgtcaagaaaatgtggaacgaaaggcttacactctgctctactcatgtgatctttcatctctctactccgccctggccatatcaacttatctttatcgcctgttagaatgacagtttttcttaaggatctatcaatcatttcaagcctttcaggagagacatagtgagtcaaacaagcagccgtttggaacatgtttcctatgggcatttggggttttgtaccattgtacctccgagtataatcctatttgcgttgtgcgcccgggtgatgtgatcgatgtttgtgtagcttagtcgatcgttgtagctttcgcaaggaaaggagtaggaagagggtaagaaagcctcacctcagtccgagtgatacgccgggttcgacattctgaatcatccggatcttcctcatccaaccagttagcagggtacaacagcctgatttccctttaatcaagtcagcgcctactctcatcattgataataggcatgggaatagaggaccgtactcaacagctgcgtcgattcggtcttcttgtttcttcgtaacaaacatcaacttcatcatcgtttggagaccctctctcttgaatcgaccagcacgcattgataatttttcgatcaggtttcatgtgcgatgaaaacaactcggcatgggattgagaaaaacgcacaggaggaaggtttcgtctgtatttgtctccggcacttgtgacacataatgtcaaggaggccaatcgttcaggaatcaacgtggctaactccagagagatcattcctcctagcgaaatgaatacggttgtgatgcgcgagcgcacgaggtcagagacagaagaaagtcagccatgatgtaccatatagaaagttgccggatgtgacaacgaacccatagaaattccaacctgtaggagttatgggggacaaggacatattttgagttctaactattcactaattctgccggtcaggacgtaccagatggatgctcttgctacctgtccattctacaaagtctaacaagcttacaacgtcttgagccatagcggatgttctgtgtagccctggtttcagccagggaagtgatactctttaaatcgcgcggaaggatggacgtacgtgtatggcccagaaggataaccagagtgaccggatccccgattatcaaataccaaaacagagtaatcggagagggagccgaaatggtcaacctgggtagaccaactggatgatccgttggaaagacccattatgaagagcacgtgctcctttcccgttccgtgcctgcaatcatggagaccagaagaataatgaggaacttcttctcgaagagggatctgaaagaaaacacaatcaacacaaacaattcatagtagatttcatgtccttttcgttcgtccgtattggtgtcctcgggttcatctgcccaaacccaatgtttccctttctggctacatgttgccggattcaataacgtcttgagatcctcatcttcatcatccgcatcggataacctccggcgtggaggattcggtaatcctgatgatgcgaacggagatggaatgagcgttaggatcgacttaaggagtgttgtcatgtttgtgttcgattgttcttgctgttactgatagtgttgttgatgaccttttcttcgagcatcattgattgtctatcgaggttgtgtcgtaaccctagcctcgatttactgaagtttcaatcttcgtcatccaacctttcacccaccatcattatcatcaccaccacgaatacgacaacaatgtctaaccctcgtttgggttggatcaaatcaaactccatctcgtcctcatctagctcgcctctttcgaatacaagacgctctcccgctccttttgcgtcaacgtcctcaataacatatggctcaagcaacgcgaatcatatcgcctctctgaaggatgacaagaaccggatatcagaatatcaagtatgtttgttccagcatatgatcgcctttttgaatggtcgatgatgaatggttcaactttcttttccgttgacgcatctccttatgtttcatagacaccagaggatcagtgtccaatctgcaaatccgaccgctatcttaatcccaaactccggttactcatctcctcagtctgctaccacaagatgtgtgaatcatgtatcgaacggctgttcactctcggaccagcaccttgtccgacatgcggtagtgttttgagaaagtctgggttcaaaactcagacttttgaagatttgagagttgaagaggaggttgccgtaagggcgaggataggaacgcagttcgtttccttctctctctttcctttcctggtggtcgtacttgataccatgaacgattggctgatcgagagtttgatgttgggtgacttttctaagtttcaacaaaaggaaagatgactttgaagatgacgcggcgtacaacgattatctcgaagaggtcgaagatatcagtgcgtttcattaatcttcgtccagtattgttacacaaacgatccataatactcttgtacttatcgttttgtctcgattggacattatcagctttcaacttgctcaacaaagtagatattcccgaaacagaagccaggatcgccgcttactctcgagcaaacgcgctgacgatctcgtccaacgcagctctattgaaccaagaggccgaactcgaacgtgaacgtgaagaagccgagcgtgaagagagagaatggaggagaagccaaggaaaggaacgagagaaggaagagagagagaaggaagaaaagcgacgagaagatgtgctgaaaaaattggttcgtctcgaggttatggacaccggatactctgtcttcttctcattctcaatctcttctattctctggcctccctttgctttctataggaattctcttctttaccaccatcagctatcgtatctactcgatccaaaaccctggcctcatccgacttgcccatcctagacgcgcctcctagatctgcgctctcaaggttgaaaaaacgagttcaaatagaaaagccgcaaggtccaccgaagccatatgttgacccatatgatgggtacgaagatttgatagggttcaagcagagcggttactttgatcctgttcgtctctttttcctcctacctattcgatgacgatttgggccttatcaatcttacgtccgctctttgtccaattatcccttcacataacaaatgaacagtcactagctccgttcctcaatactcaagacaaaaagtcaatccccctgaaagcaggtggcttcaaaccaacagaagtctgggaacgtggactccgctatgccatggctggtttaacatccgacgtcccaaggtgacgcccatcctctttctcatgtgtcctatcgtttgcgtgcagtaattactccacagtatccagaggaaggttgtttttattatagcgatggcactttgtacaacagataaatacacaaattaagagaaaagaacaagacgggaaggtcgtaaagcaacgagtaggtgagggtataaggcaggccgagcgacaacccggacggaccagatgagaagaacgcgcgatcaaaggcacaagaaaagggtataagccacggctttagttctcagacaattccaagatagtcgtcttttatgcttccaatggcgaactggagatcatagacatgtaggcaagcgaaggagggggacagtcaacgacccgtaaactcagacagacacatagggcgaataatttcgagtaacaagcatgtatattttttcatgaacagatagagtacagaaagacgaaaaagaggactgacaatctcggtcgcgtccactcttgtcccaatcagtttgcaacgcagcttcgtacctttctccaccttgatagatccattttcgtctgtatcgtcattgtcttctgtcttggccatcgagtatgcaggcggattcgaattcggatcgaaaatcatatttggcggcaagtgctgcgaaaagagacgtagaagaccgagtcagtcaagatcgttcatgcgcactttggtatcacattcaagttggatagttgatgttggtttcagccataattgtctactaaaacgaattgttacataaatcaacaacctctgcctaattaaggtcagagtcggatgtccctatgctaatgagtcatcatatagagcccacgttgtctccatcttttgccctgcgggttgtaggacatagaagagaacaggaggggaaaggaaatatgaggatgagaaaagtcgaaagaggaacttacgtgagaggaaacaaaaattgagagaggaccatgcccaagaaaaattcccatcttggatacggtctcgacaataccgtcgacgacctctcccttgaagggcttcatgacaatagccgaatattttgttctgaattctgcttgaccagttccaggaataacttttcctgatccaatgtcaagaatggacagaacagagatgatgtaactacatatgtcaacaccaagacaacaaaagcacgcttagattagtcattgtgctaggtcatgattattgcgagcgaagttggatgttaagttgaaagatcagctaaaaacaagtttgttctcatttccatttggggcgttactcccggatacgaagagctgagtttaaaagttctcatcatgtcgaattgactgtgtgtatgtggttgtgcgtagagtagcaatgagcgaagcagagaacacttacccaatacgtccagagcaagtaccttctacgtcggcgtgcagtttctgtttcagatattctgtcatctgtggtccaaagtaggacggatgaagaaggatagtttcttcaagttctttctaggttgaaggttagacagcgaaggggaaaccaggtaagtcgacggctttatgatggacgagaagaacagaaggaacagacataccacaaagaacatgttgagcaaaacgtgttaataataagattaggatgaaaggaagacacaagagatacaataaagaaaagaaaggaaaagaacgatggaggtcgtggtgcgatgagagagagaaatagaaagcgaaaaaaatctcgttcctgtttttgtactccttggtcctgatgcctgtgttactgtcacgcgcgtgacaagcgtaatcgtcagtgggtatacaagctgtgaatcatcacgtggttacacatccctcttctttttccctatagtacccaccagtatatcatcttcgcactcaccatcagtaccatcgtcatgtccacagctatatcctccacagctgttacagctcccaaaaagtcagtatcatgctttatattgcgctgactagatgtgccgtcacttagtcgcgatttcctagagaacacgaaaatatatatcgtatctggtcccgtcgcatactcatctctcgcttcgtctttcaaccaacgcatttcctccttgcacttgactcagactgagaccagctcgaagacaagtaaaaaagggcgagattcaagcgcctgtacaagaacaaacgggtagagagttgagtgagttgtttacttcttatcgatttacagacaacccttgtaatccactgctcactgatgatcgttcttcccaatgatttagacatctggtaagatattttctgtttcttaatccattcttcacctgtgttctttcttttcctcccactcttggcttcagcagtaacacatatcgagagtgtacttaacttatactgacaccgtatcaacatgaaatcttgctgatcgattcgttcatctaattgtaggtatggtaaagtaagttgtaatctttcgtttatctccctcgccccttcatagaatatgctaatatggccaactgactccttctcaccgcgtatcgcgttcatcgaatatccagtggtgagcacgatatccgttctatgaactgattcgatacgaaacgcgtctcaacgaatgatttgtctttccgcaactatcaggtctgggggtgaccgtgaagattctttccacacacaaacaaagtcattaacccgctgtatcctcgcccgagatgccggatacacaagagcagacgctcttggaacgaaatactgctgtctcttctttgcaagaggttgttgctcgttagggttcgttcgatcgatcggctggtccttgtaggattgatgcgtacgcgtcagaggtgatgataatctacagtcaagctaatttattcctacaacttaatatttcgcccgatcaaacacatgaccaatcagatccgactgcactttcttgcatcgactaccttcatcctcgcacatcttaccagacctttccatggactgctttggtcgagagaaacatgctgcttatagagacgatatgggaggagttggatcgatgatgcgggtaaacagaacgtgcgtttattattcgtcttctcgcttcggcatttgccaaaatctctgactaaccgaggtttgcggctatttgtaaacatcaggttgtatatcggaagagtcaaagaggaaggatccaagaaggatacggaagaagtcgtccgtaggcatttcggagagtggggggatatatatcgccgtgcgtcactctttctctcctgctctctagtttcctcccttcacttcgattagtaaccaatacatattctctttattcaatatcaacagtcaacgttcttcccggtcgaggagttgctttcgtcacgtaccagaccgagatcaacgcccagttcgctagagaggccatgtctcatcaatcactcgactcggatgaaacgctgaacgtccgatgggcaacagaggacccaaacccgggcgtgatcaaacgggagaaacgacgggttgagaatgaaggccgtgctgctattcagggaaaggttgatccaactcaggcagaggctgagattgtgctacaagctttggagagaggacaggaggatgagttgtacgcgttagatgaggaggacgctagggacgagaagcgaccgaggctgatcaaaaagtctgaaacgaaccaaccgagctcgcagccagacgatcagattccagatgggggtctgttggatagggatgctctggagggtatgaagtatttcctagagattaagcgaagaagagaaacagaggaggcttcaaagacggagactgcttctcaacctgttgctggcgggctgggcctcttgggagggtatggctccgaagatgattcggattgataagattgtctggtgtttatgttgtatcctgcccatgtgtttataagtttacacatacaaataatataagaaatgaactatcttgcgagacggatgttttccgagacgaggtgactaacccgctcgcaatacgcgtgttcgaagtctgcatgcttggcatcttgcttcaccttcaccttcattctgtgcaccatctaccttcgggttctccaacattcttatttcgattctttgcccatcaattagaactagaatcagtccagtcatgaagttcaccattgttggttgcgccctcggttcgattctctcctttggcttcgctgccggtgagtgttgttttgatcttcattttccgttaacctcaatgctgctctgttcaagtagttccagcatcccttccccttgatgcgccgttctcactctccaccttcgcttctgtcttcttgcctcctcatactacattgacacgtcatgcttctgatgaatcgaacgagatatagctcagacactgacgatcaatacgccgtctagtgtcactcagtgtcaaccggtcttgctctcggtaagttggttcctcagtatcttgagagaagagtgaaagaacggtctgcgaatattcggaaattgaaccttacccctcaattctcgtgtccttttgtctctttgttaccactcctatgtttttcggttgttgttccctctatacctctgaaactcacaacttcacaatgacaacactggcggtcaacaactaacgcttgtttatatcgacacttcgtacttgtcgtacgatggcctggacctgataactttcatattttggtgtatagtggaccgatactttggcgccgtactatgtctacatgtaagagtgcttctctcttcctccattcatttgaacatctgctctgtcaagcaaccagcccactctgatatcgttttctctcagtctaccgggatcgactctcatcaatccatacgagaccctcagcccggtcgatactacctcggtcacctggctctgtgatcttggaactgggacgaccgtgacgttcgccgtcaaggacggtcatggtacatactctcattttgtctcccttgctgagataagtagctgttgtcgttagattatgagaagactaacttcaggctcggattggggcgtgtaatgtaggcgccattcaatacactggagttaattccgttatctctagttcaaacactacgtggtgagtttgtgatctgatcaatcttctgggattgagatgactgatatctcgggagttgacgtgtgcatctattttcagtatcggaacggtgtgtcttgtctttctcgagccctcccaatcagcatacgcatattcatatgcctggttcttcctttcgaaacttttgttttgtagaacgctgtgatccaagcatctattgcggctcaatcgtctgcttcggttgcttcagtagggacgacttctcagtcagcctcggccaccagtgctggtgcttcctcaacgttcgttgttttcaatcatctactttgatatactcttttgcgcgtgcgcgctttggttgaccttcatgatcccctctttttcccatcttatgtatcgataacagagcctcagcttcggctggaagtagcgcctccaatgctgtatcgtcggcctctgcctcggctaccggagttgcctcgtcaggcgcatcgacttctgttcgaactttcaaatccatcggtgagtcaagtcgtatctgtcgtctttcttgaatatcctgtggaaacctatttgtcgaaaaacatcttctgacacttactaacttgtgggcttcctcctgaactctgtttgaatgggttcaaaaggtattgtgcttggcttgtccgccggagttgtcggaggcgcgctattgttgtaggcttatttacctctgaaggctccatcgtcttccacagttcctccgttcctttcttcttctcgtacacattctaaggcgcagtctttcggtttcgtccgttctgtgtcgtctacttcggatattcttgttttgtttcccttctggactgttcaatacagcttcgttagcttggttacctatttacataattgtctccctaacattatatcccaactattcggtttatgtcattttgcttcctaccttgtttagtattggtctttgtgctttcgctcttggtttccttttcaactggcattccctcagaaggatgtcaagtcatgcacagtattcaaacgacaacaacttcacatgcaagttgaaggatgagaacagcctggtatatcaatctgaatacactgtggttttgaaaaaagcagaggatggctcaaaacatgggtacgacggcattcagctttgctgcctctgatacgcaagtattcgttcgagatgatttttgtgattttgattttctggttttgcaatcaacatcgacctttggcttacaccatcatcaacctgtcaccaattccctcaggctcgtaaactcattgacccaattctacgcgtatagcctgtgggacaaacctttctgggcacgcatcttactatcccagttaataccgccggcacggatcgatcaaaccccgggaagtaaacgagagatacgcgtcgaaaattaccttttcttctgagcgagacgcgtctccctttctctagatttataaatcatagacaatcatgcctagagaaatcatcactctacaggttcgttctccttacgactattctttcagattcttacatggataggtgtctagtgaagagaggggtggtgcatgtcaacttatgtatgagaggctaatgcaaaggttggatgcgctttgggctcgtttctgatggggttgtgttccttgatcgggttaaggctggtcaatgcggtaaccaaagttagtcagatcgcctcttcctgtctgttgtgttctgcttaattatcttgactgactcggaactatctttactggctggtgtgatgctcatgtctatttggaatagttggaaacgaggtaagaggatgtttcatgggatccctcggagatttttctgaggtaatatatttgctgatcagatcatgtcttgggttatcatgctcgtggtaccttctcgtattgaatccagttttggcaacgtctatgcgcagaagtaagggtttcatcattccgttccacatgattgtctccttcagccactaatggaggaagagtacacatttggcctcatagcacggtatatcgaaggatggaatcctggaggatttcgctacagaaggtgtcgataggaaggatgtgtttttctatcaggcagatgatgaacattatattcctcgagcaattttgattgatctcgagcctcgagtcagtcctgtttctcttctccctaagttaggaagtatctgctgtatatgtgtgtatgctctgactcctttgaaaatgtacttcgggggatcacaggttatcaacacaatcaaatcatcaccattcgctgggctttacaatccggagaacatcttcatggacaaagaaggtggtggtgcgggcaataattgggcaatgggtcacggcagaggtgaacagaagtatgaagatttgtttgagatgatcgatagagaggcagatggtagtgattcattagaggtgaatgaaacccctcagttgttctgctcctcaacaaaaactgacctcactagtcaacccttgtttatttaaccaaacgtataagggcttttcattgttacactcgatagcaggcggtaccggatccggtcttggttccttcctgctcgaaagattgaacgaccggttcccaaagaaattaattcagacatactcggtttttcctgatcaagagtcctcagatgtcgtcgttcaaccatacaactctcttctgacaatgaaacggttgacgaaccatgcagactcagtagtagtcttagacaacgcggcgttgagacggatagcaaccgacaggttgaacgatgagaacatgtcgcatgatatgtctcaaatcaatcaacttgttcgtcttcttcgtttgcgtgtttttcaaaaaggtcaatgggctgatctgacaatatgttctctatttctatcggctggttgtaggtcgcaactgtcatgtccgcatcgacgatgacccttcgataccctggctatatgaataacgatcttgttggacttatcggctcactcgttcctacaccgcgttgtcatttcctaatgacatcctatacacctttcactaatgataatattgctaaggttcgttttcccttggactttcgcttgcttctcaggagattctgatcctctctctggtctctcctttttcgtttggcctgtgtttcttctcctcctacatcaatttgaaaatcctcattcaggcaaaaccgatacgaaagacgacggtactggatgtgatgctcagactattacaacccaagaaccgaatggtgtccactacgccgaccaggaccagttgttacatcgcctcactggcaatcatccaaggtgatgttgatccaacagatgtatgtctcttttgtccttacatatttctttcttccggtcgaatatctgatggcatttccttctgactgaccattaaaacacatccaggtgcataaatcccttttacgtatccgagaacgaaacctcgtcaacttcattccttggggaccagcttccattcaagtggctttgacgaaacgatcaccttatcttcagaccagtcatcgggtcagcggtctcatgttagggaaccacacatctatcgcctcggttcgttcttcgtgaccttgccactcttcttctaagcatcctctccctctttttggcgtgcctttaatcttgttctaatttatattttaacgtgcgggaaatagttgttccaacgaacattaacacaatacgataaactacgaaaaagagaagcatttatcgagcagtacagaaaagaagctatgttcagcgacggattggaagaatttgatgattctcggttcgtgctcttctttcttccatctttatctttttctttttctatttctttttttaccgcgaaccactaaatgctccgctaatcttgagcttgattctttcgtaatatttgatatcgggaaaaacagagcggtcgttcaagaccttcttgaggaatataaggaatgcgagaagtcgacatacgtcgattacggatcgatgacgacgagcgcttcgggactcggtggtggttccggcgagagtttaccacctagagggacgtctgggtctggttgatatcttcttccttcctcttcttgttggaaaatctaatcgatctttcatcaaggaaagagagaggtagttggtcatatatgttctagtctggtccggtccggttcgatttgattttctctcagggctctttcgatttattttacttcagttcaggtgatgtttgtggtccatgataccttcttctccttatcaagaaatataaacaacttagggagaagttcgtgtattatatcttcattcgtgaggtttcaaaccttaagagggaatttaagtaaggaaaaagaaggttcaccaatcacagatggaaacacaacacaattacaagcttcacgacatacatgacaatcagataatggatagtggacaccttccagaagttttccagggttcgccgccagaaagatatgaagggaacgacacaagaagacatattgaatacaaaggtaagttagagaaggctcaggatcttcctgtctgtgcttctgttcgacgagaattgtgaccaccggatgtaacggatctcgacccaaataccggaggtgctgatgatgccgtcgttgtatatgatggagtttcaaggaagacagctgatctaaggactctggcgattctgtcatctttggcgaactgtacccagtggaaacaaaccccgagtataaatgaggcagtcagacagacgggtacacaagaacttagagcaacgggaagcacagacgcaagaagggagcttactttaggcaatgagtctgtagccataccctcaaagactgacttctgagcttcctcgaaaagcgagatgatcttctgcaactgtcctgccacgcctactggcataaagcccggtgctggtgagggtgcgcgttgagaagactgtagcggttgtggttgattgtttcgaacaaacaaaaaatacgaggcaatatctttcttgatcgaagagggcacattgatctctgctttcgatcggggtgtcaaataggtggtgtatctacgtacaatatgctctattcggtcacttatttgctctgaacagataagaaacaaaaattaggaatgagacttacatctcaattgccagttccaagagcttttgttgatgcgctgccatttgctcggagatccttcccctggtcgacccatatcctgccacaactacggcccccattgtcccaccaacctctgctgagctcgtcatccgatacctctctttgaaatcctcaacgtcgcaccaaaaattcagattctcttcacagaagctgagtctcatgaactccctgaagagtcctctcaatgcaggctctttcagtattcgagaaagtttcgccgctcgagaatccttcagggtttgtgcgatggacactccatccctagtgcctggtctggaaaatggaatgtaccgagtcttggagccttctttgttaggttttggcagaacaggttgcggattaaggtttagattgggaggtggagcgatctgcccgatggacgcagtctcgtttactatgggtaacgttcccgagggaagtttgctcaaagaagcagtcgctagtttcttagtagacaccaaggccgcacgggtcgtcgtttcatgcatgggtttgattggattgcccagagggagtacggtctcggacgattcagtctggtgaaggggaggcaacgacgtcgtgacgttggtggccatgtgttgatgctctgatgatcgctctgaggagagtttgttcgctgtttggtcagactcggcggttgagatcaaagtagaagaaataacagattctttgaaataccctgggctgagcgagcttctcgccctttccgtcctccaggcgagtgtcgtccctgccgaagtgatcttgtatactgtcttttcggatgctcgaaattcttcgttgttcgacgctgtacgatatattccttcgggtgacatatttttcttgcgtgttgttattttatatggcctctccgtctttttgacatctctgcccttgacatcggtagtcacacagatgatccaaccgagtttgacccagagcgcagcaagctggccagcctcagcgtatccgatagagctcgtaaaatcgcaaagccagtcaagagcagagattgagttgaaacagtattcggttgaacttgtgccggctttattcttctggaggcttatcccaggcgtggaaaccagatcatccggattcaagctgtgaagatatgacgtttgggagaggtcactttgatgactcaaatcagaggaaaacgatcctcgacggttaatcttgcccggcatgtttgaaggtttattcagaaacgtgctggctctagaaggatattggtatggagtcctaggaatgagaaacgtcttgggtggttgaccgacaaatcgacgaaagacctcttcaatcatgggttggttttcagagacaatcatatcgtcatccgggtgtcgttcaagatatatgatcggctgaggacctgccgggtatgtcgagcatagcttcgtaaagtagggggtgtgtattccttggcgagcgatgaaccgctcgaggctgatgtgacagagatatgtccgttcagaaacgctgatgactgtgagagacaagtaagggactgaaagagaatatataccgacacgtctaatcccttgggtgatagaacccagaccgctcgttctctgaatctcgtcgagctgagatcagccgcattttccttgaggaaacaaaggtacaaactcagcaccaatcaaaaagcgcaaaggaggagagtgatccatacagaccatcaatctggcgtctaccatttgctgcaatactcctttagcagcgtcctttgtcatagagaacgtggtggtcgttgtcgtcgtctttatacgagggccgtgcttgccagggttcgaatcagcgagacgaatcgattgagagaacctgagggaggccacgttggtcagagcatcatcgctgtagtaaacagacagaagaaaaaaacaacctcatcactctgggaatgttcatgattataaagagagaaaacgtgtgacctacgaggtgaatgaatccggatagattttaaagaactgcctgtttgacttcagattcagtgagatgagcaacgtcgagaataaatcatgtataaactgatgtgaaaacgacatgttccacaaagaaggatgagtgccagtactcaatgatcacaatgggtatatgctaagggtcgagaagataagaagaactgtacttgcgtgagtaaaaagccttcctgaggatgtctgaggaagattagattccgaagttgtggcaggtgacgaagtgtgaggcatggcccttgttcaggaaggggatataagtttgaccgagatgccagcagatgggtggaagagagggagatggagtagaagaaggaatctatggcaagaaggacggggaaaagaaggtacagaaggttgtaaaggagaagggatccgtgcgtcctatctgatgagcagccagtcagtggaatcacagtaggaacccagagagtttctctacagcaagggtcatcagcaacatggtagacgagcggcaggatatgatcgctaacatctagtcagtgttgttcagagtgagccactctagaaatcaaggatgacagaaagaaagagagatgatgagcttcgttccatcgtcgtttcacaagagatggagttcttgtgttttatctcttacttccactaattatctttaccatctcactcatttcctctcttgtttcttatcaaccaccacgactctatacacgccacttctagatgacagactctataaggttactagtcatcaatcccaattcttcggactccgtaacttctgctcttcggacatcttttgatcaatcctcaccgcctggagtgacactctcgttctggaaccctcggtcaggaccggctggaattagtgatgagtgagttatatctctgtttttcagtatagtcaagtgctacaacatcagctctgttctctttgccttctgagacaatactctattcgtatcacttcttcttacctgtttccttcctatttgatagacaaacggccagggagagtacagacgcgtgctgggatgaattgatcggagaggacgatcgggtattgggcaaaggcctagaaggatatgatggatttctcatcgcttgttgtaagttctctctatctttcttcctatttctccggtgcccatttgtgtatatccaatcgaatactgatgcacatactggcgctttcgctttgcttgatgagaacagtctctgagcatccgttgatatctgctcttcaggctcatttgacaagacattcgtctcgcgctaaagttctcggcatgtttcacgctgctatcacccacgctctcctgcttggctcaaagttcgggattatcacatctggaaccggttgggaacccgctctgacgaaaggagtcgccagttttctcggttccccaaactctgatcgtttcgtcggtgttcattctacaggtgtcggcgtggttgaactcagggaaggtgacagacagatggtcaagcaggtgatggaatgtggctccaaagacttgctggtgaaaggggcaggcgtgatcgtgctcggttgtgcggcgatgagcgggatggaaagctggatcaagcaagcagcagacggggtggcagtagtcgatggcgcaagggccggagtggagctcttggttggattggcgagagctggaaactagaacactaaaaagacagtcatatcaggaaaaacgccactcagatatagatgtatcgagggtttcgtatatatatgcacgtatcgaaaacagcgggtcaaaagaaactaatttgatcgagagcggatgtgatagtgattcactcatggtgagtatagcaaaataaaaacaggtcattcttatttctttccagacgacctaagataaaatcaagaagccaatttattcagctggtcagaccttgttgccctagattagatgaatcaacgaaagagctcacttcttgatacctcctccgagagcacctcccttggccactgttgatagtcaagaggattcagcgaaacttcatacgtgtgatcgtcgaaagtgagattcgaaacactcactcttgtctcgagcagccttcatctcggcagcctcattctttcgcctctccaaggcagccatatcatcctgtaggtccgaaaatgatatatattgttgtatcaacagatgtaaccataccgaaaggaaggaatagagcatcaggaacgatgcttacatcgtcgagctccttggtggccttcttggcagccctgtggtggaagtaatttgtcaaggtcagccaaggaccatgaaaagaatggaaatggtttacaagacatacttgagcggcttgagttttcctcctatagatgagcggagataagatcgatttggataagatataaggcttaattcagcatagaaagagacccatgctgctttactcaccttgacgtccagacattgatgttattagagaaaggtagtatgtgtgttgggcagggctgacggtaaggatagaggaaggtaagagagggaggtaggtgcagaaggatttacaccttaggtggtttcgaatataatttcatataacacttatgtaaggtgatgacatatttccagcgggttctctcttttttttctcttctttcttctcccatcggacgaccaccaccaacgacaacgatagcatcgatcggtaagccttcttctcagtctgctcaagcgttgtggacacccagctcttctctgggtggttgatccgtcgaattctcttctgcgtgctcaatcttgtcttttcatcttttctgccctcaccctcgatcgctcatctacatagaatcttctcgaactccctcaccaacatcgtcactcgttttttaacttaaatcttacatattcaaacatcatgtctgactgggactctcacgttgtgtatgtgttcctcttactcttctctttcccttggtttgggagttcggtttgttgaaggacggcatactgatcctttttcaatcgtttctctcgctccactctttcctcacatcacaaaagtattggatcgaagggtcgacgaccggcggttgccaagactgagtctgccgttaatgccgctcgacgatcgggtgttgctgtcgatacttcttccaagggagtcagcaacaaggctgccagaggtcagtcggcttttaccttctctttactccctcatcttcttcactcggccgtgagctccaattggaggccacgactgattgcatgtttctgtcttcttttatctttgatcatatgattgatcgatatgctatctgatctgatcaacaggacctgaccaccaaaagatcgccgctcttgaccgagatgacgaggccaagcctccggctaccgtgaatccttcgtgagtgatctgccggattcaaattcgctttccaacgactgtacgctaatctttggtggttggttactctgcagcgtgggatccgccatgtcgaaagcccgaatggccgttaagagcgcggacggaaagtcgatgacccagaaggatcttgccactaaggtcaacgagaagcccagtgtgatccaggattacgagaacggaaaggccagtaagtgcctaaagcttcctctttgtgttgttggattacatatagtcctgtttgttctttgatttgtggaccaagggcttacaattcatccaccaacctctcgttttgcaacctagttcccaacccggctcttcttgccaagttggagcgggcgctcggtgtcaagttacgtggagatccgtccttgattggaactcctctcaacaagcctggatcgaaaaaataagcgaaacccgtagaaaagaagaaagggaggagaagaaaagacaacaagatcaaagtggtgaagtgattgctggaatcatgcttaggtagatgcacctgtaactttttttttcctctcttcccttttgattttgtttcctcatgaaggaacacatcatgtatcaatgtcctacgtctcgaatacttccccctgtcattggatgacaacgcagttgtaaaaaaacacattgatgaaacagaatacaagtgcggtgcataaccctaacagacgctgttcattcgccccagcaaacatctcaatttctttcctctattctctcttacaacacccatcgctcctttctttcttagttcaggaaggccgattagtcaataattctactctgatgcagagaggatattcctcccgatcagatactcaccctcccagctcttcgacacacccggacctaacgttctccacagactaccaggatactgaggatctagggttaccgctccatcataaccctccttcacatcatcatcatcaacaacatttcaatcagccactcttgaacagctctcacatggatatcaatccagtaggaggaaacccagcttccaggcgaagagggaaactcggagcaggagcagatccagcagaagagatcgataatcgaggctcaggtggaggtatagagatgagacagtttggagttgacggtggaaggcaaggaggtagtaatcagcttgaaagggataggcccggaaaagaaagaagagtcagaccagcgttcaagccgcctgccaagaactgggttcgtttctctcttctttttgtttgactctaagagacatgtgtgtcgccacgacggagatgtctgtgttcactcgccatcctcctcacggctctagtcgtcaatctctcgtccatgaagagaaagaagagctgactagactgattgttttcgtatgcgctctctatcctcattgtaatctctgatcatgtagaaggaattcatcgaaaacaactcagaacacctcatcccgctaggttatctgatcctttcaatgatcactaggtactggaagatcggaaagagcaactctgtcgtttgggacgaggttagttcttcaatacattttccctcgccgatgacggcaataccaatgatgagaagatcacacgggtactaaaagatttggaatcttcgttcatggtcttttcataggcccactttggtttgtccgacctccttccttgtatcaggagtatattcattgaagtgacgcacgaagacaaggaaatactgactagcactttgttgcttcctctcaatgctcatcaggaaagttcggatcgcattacctcagaggagaattttactttgagtacgttgccttttgttacaaacatccgagattgaatttctttcaaagctgagattcctttccccgtctcctttcctctctagtgttcatccgcccttaggaaagatgcttgtcggcctggccggtctattttctggctatgatggaagcttcgactttaaatcaggggaggtctaccctcctactctgcactatactatctggcggatgtacatggccacctatggtgtgctcatggttcctgtcggatggtacaccgccagagggcttggttggagtcggttcgcctgtcatttagtcacactcatggttctcctcggttggtcgattttaaacatttcttatagggggtgacaatcagattcgttaacagtcatccactttctatttttatccttaacgatgagcgatgtagatgtggggtggcttacgatctctaggttcatcctgctagactccatgctccttctttttacgttcactactgtccttggactcgttaacttccataaccaacaacaagagtatgtctgcccttggcatagaggggtttgagttgaagggaatacgcaagcgcgcgcctattgctgattcctgacctggttttggaaaattggtgcatgccagctcgttctcggatgattggtggctttggcttgtgtttaccggtctttctattggttgtgtcattaggtcggtctctttgctgttgcgtgtcaagagctcgttgcaatccgaaaactaaccttttcgtcttgtcgccattttggaatatctcagtgtcaaatgggtcgggttgtttgtgaccgctcttgtcggactctacactatcgaggatctttgggacaagtttggcgacctttccatgccctttgtacgttctctgtatctttctgctttctactttctgttctgattgtatttctggcaggcaagtctgattgatttgaaattgaattaaatacaaaacaaaacccctttctttagaggacttacgtccgacattggatagctcgaatcgtaggcttcatcataattcccgtgtcggtgtatctactcagcttcaagcttcatttcttgatcttgagaaataccggaccaggtgattcccagatgagctcgttgttccaagctaacttgaacggaaacgatttcattcaaaacccgctcggtgagtttacctcttcttcctcactctctattgtgttttggttctttaacactcgatgagaacttcttctttaaaaacagaggcggcgtttggttcgaaggttacactaaagaacgtcggttatggaggcggtctccttcattcccatattcagacataccctgtcggttccttccaacagcaagtcacgtgttatcattacaaggatgataacaatcaatgggtcatcacccccacttgggaagccgatcctatcggatctgaagacgatatcaaattcctccaagatggagatatagttcggcttgtacatgctgcaaccggtcgaaaccttcactctcacccagtagtcgccccggtgacgaagaccaacaatgaagtttcctgctatgggaatgctactatcggtgacgcgaatgactattgggtgatcgaggtcgtggacgatactgttcgtgggaagaaggatgaggttaagaaaagaattcatagtttgaccacgaggatgaggatcagacatctcaattcgggttgttatatcagagcggcgaacggtgtgttgcctcagtgggggttcaagcagattgaggtctcgtgcgataaggacaacaacccaaaagatcctcatacgtattggaacatcgagagtcactggaacgaacgacgtaggtctttcccgtcacctttctcctgctatttgatctgactgctttcttctcccctcaccgtttctgatctggtctattatttctccagtccctaaaggagacgccaagctctacaaatctccgttcttttccgatttctggcatctgaacgtagcgatgatgacctcgaataacgcgctcgtcccagatccagacaaggaggatattctcgcttcgaatccgtttgattggccatggctctacttgggtctcaggatgtgtggttggtcggctgaacaatcgaagtattacttgatcggaaaccctgtcgtttggtggtcgggaagtttcagtttggttctttccgttgtcgtcgtggggctctacctttttagaggacagcggaagtacaacgattttggaattggtaagtgattaatcatacccatcatttacatgtaagaaatcgaggaagcagaaaaggctgatcttcttttggctctgctccttccctcttaggtgaatgggatcgatttatctttgggatcaagctatctttcggaggctgggcccttcacttccttccattcctaatcatgggacgagtcacctatctacaccattaccttcctcctctatggttttccgtcctcatggtcggacacttgaccgatcacttcatattttcgaacaggagattaactctccgggcgaaagccatctttttcggactgtttgcaggagcggtgattctagtcttttggtggttcaaaggagtcagtttcgggatcgatgggctggtggaggaccattggggactcaagtggaggaagagctggaatgtaggtcttttcttctttctttcagcatcttttattcttcttctttccatgttctagggaccatgaactaaatgtgaatcttggtttccattatcttttgtgggaacgatcagatctacaactaagggtagagtacaagccagaaaaaaacgagaaattgaagaacggaaccgacgatcaatggccgttttttccctcccgtcttttcatcgctcaatttcgccagccaataagacgatccctcgagactgactccataagatgacaagcaaacgattgagaacatttcttttctcatatttacgttataaagaatacatagagccgagactgaactttagatgaaagtgaaaatgagagcagagcggagaaaactgggctcgagatgaaaaggacgagaagaggtaaacgaaacgtggggagaaaaacgagacgtaaagaaggctccgttatggttggagatatggtagtcgcaagaaaacacagacaagagagaaagaagacatgaaagaaacccccctatgcgaccttcgagacaaaactaaactatataagatcgaaacactttcatttcacttttttagagcgtgatagaatcttgtttggccgattcgggcatgtaaatatccaaaagcgggtacttgtccttccattgtccatgaagatcgccaaagacttcgtagagaacctctcggacgtggttgacatagatgatctcgatgccttgcttgacagaggcatggacgttggcctcaatgtcacctcggcaagcggcgggaacgataagctctgaaaattgacaatacaaaatgactattaacacgacaagacgaaatgaagcggaagaaggaaaaaatacgaactcttgatattcgctcggtgggcggcaaggatcttctccttgagtcctccaactggcaaaacttggccaccaagagtgatttctccagtcatagctgtattggccaacccaaatttgaacacaaagttagttgggttgtatttatcggccaacatcaaattgacaatgagtaaagaagaactgaccaatgtctgggtcaactctagtcttcgtcatcaaactgacaagcgcggtcaggatggccgtaccggcactcggtccatccttaccaatcgcaccctcaggcatatgcagatggatatcctgatcggaatttcctccgagaataatatccgtctctttgctaacaataccgagattgaaagcgttcgctcgaagataggatacagcgatcttgacagactcgttgatgacctctccaagcttacccgtcgtctggacagcgcccttaccaggcatgacctttttggtaggaacaatcgaatggaccatgattaacaaacgatagtagcgtttgaagagaaagaacgtaactcacggtaacctcgatgggcatcaacgcgcccgctccatttccagtgtaacccaaaccgttgctaactcccggcggcggtgccgtcgagtatattctatccttttggtacaccggaggtcccacataatccttcaggttgtcgcctgttatgcgcatcgacaccgtggtggggatggagagcggtttgacctgttgggtcgtcgtggtaccagtaggaagagtttcgctcggagtcttcaactccgaggatgaagaggttactttttcggcttcggcttcgagagtcgcggacgaaacagtgggttcaggcacagtgccttgagctggtggagtagtagcagaggtagcggcctcgacttcgacctcggtcttggcaggctcagattcgtcaatatcctggacgatcttaaatgcggccttccggtagatctattccacccaaacggttgatccaagcggggttgatgagaatgtgtcttcaccttgtgttatgtatcgagaatgaagagacgtaccttctcaatctgcttcttcaggtttcggacaccactctcccggcagtagtactgaatcagtccgtcgaccgctccgtcctcaatcgttacatcggccgtctctagtccagaagccttcttggcttgaggcatcaagtagttccttgcgatctctttcttctcgtctgagacgtaaccagaaacctcaaggacctccattcgatccaacaacggagcaggaatcgtgttaagcatgttggctgtgcatacgaataaaaccttggaaagatcgataggaaggtccatacttcaagatatgaaagagaaaatatgattaacgacaagatcaatcgtacgttgaagagaaaggattagacggccaagaccaaacttactagtgatcggtgaagtttccgttttgctcaggatccaacatttctaataaggcagaactagggtcgccgccatatgaaccattagcggagcctccaccagagatcttgtcgatctcatcgatcaaaatgagagggttttctgcctgggtctgcttcaatgcttgaaccgctttaccgggcatggcgctataggagaacaagctagttaagaagctgttgaagttcacaaggaaaagagagcaaggagaaacttacgcgacgtaggttcgtcgatgccccttgatttcggccacatcacgaaggcctccaaccgaaacacggtagaacttcctctctaaagctctagcaatcgactatgaagggcgtgcgaagaacgaccgtgagcttatgattttcaacacctattgtgaacctcaagaggacgaaccttggcgatacttgtttttccaactcctggaggcccaaccaaacacaagattttaccctcaactgttccccgaagctttccaactgcaaggaactcgagaattcgatccttgacatcttttaaaccatagtgatcttcgttgaggatccgaagggactgaggaaggttgaaagaatcaaccgttcgctttccgaatggaagggaggtaatccactccaagtatgttcggacgacactgaaaatttggaacagatatcagtacaagtgaggaagaaaagagtggtgcaagacaagggtatggaaggaggacgaacttgaactcgctcgagttgggctcgatcatggagagcttgctcaactcactatcaaagacttgtttgacctgctcaggcataaccaatccctcggccgcctgtttaaacttctccaccaagttatccttgacatcgccctttccatcagcctggccaagctccttcttgattgccctcatctgctccatgagaataacttccttctgcctctcatccagcctagacttcatctcgccagcaatcttggctcgcatgtcatgcctcatgacttcgtttcttaaaatcctggtcaccaactttgatcgttcttctagggaaacacaatcaagaagctcctgtatctcaacaggggtggtgttgggcgaggttccagccatgagatcgcatcgttctccgagaggtagggtcaagatagcgctgtactcgggcaagaccgacgagagcgcctgccggtagccgggggaccgctcacaaagttcggtaaatgtcgcatttagttcgagatcaagttgagtaaggtccgagtaagcgatcgtgttctttgcgggagcagggctgtcagcaacatgagtaatctgtgcgatcgaaacgggatgcgcagagaggacttcaataggggtctttgtaggaagagctgtgtaaagatcaagtagaggcataatcagctatgtctgggtagcccataacctaatgtaaacggcacaagtgatacgaaccatcctcgggttcggactcaaagcttgtcacctcgtcagagctcctgcctgtgatatcccaaggcataagtcaagaaaacttaaatatcagacgcgttccctatcggcgtgctcgagagtggacaggaaaggcaaaccttcgctcttcttggtgactggctgagtatcgtcttcgctcttttcgaaactagtcacaccagcctccggcccctcattcgcctcggctatcacggtttcattttcaactacccccgtcgcgttttcctcgacagtaacagagtcgattgtaatcctgctcagtggctgaagacgcatctgccaagcctcctccacatcaggatctgtctgaccggcaggagcggatatgggctgaaattcatcgatgtggcaatagagaccagtggtgtggacttcggatttgtcgtgaatgatatcggtattctcacccttgagactattgaatcggattagaggagccgataatttagtcagcaaggatagtaaattgaatgataacatatagtcgtgtgcatacctataaactccaacgtagtcgattttctcagagatcaggtgtctcaccgctttaatgacagcagggttggtaacagtgaagactatgtcgataaattcaagaaggaagaaggggattgttggttgagctgaagattaaaagaaagagaggatagataatcgagacgtacatttcttccaaggtgggaggaagctcgtcgtcacagggatgactaagacttggtcgtacttgggaacaggtgttttgatgaccttgatcttactagaccttccacccttattgcctctcgattttggcttgatttctgctgtggcaggaggagaattagacgagggaggggcggctgctgctgccggtggaggggaggtactgtccgacgaaggcgacgcaccgggaggaaccgacgatgaggtcgaggtcgatgatcccgatccggtggcggtggaaatggaagaagatggagacgtggtcgatgtcgatgtcgatgtcgattgggaagagaagaagtcttcaggaagaccgtccggcttttgtgatgttttactagtcaacgtggaagtggcggctgaggaagggtcggcagcagcgggatcggtctttgaggcagcagcagaggccttgctatcagcttccagagccttctggtccttaacatcagcagcaggtgtatccccctcgccttccaaatcagcgtcctcatcttccttgctcacagggttctcccagcttcgtctgctagagaggttcgtccaggtggaagaaaaggatcggacgtttgatggaatggatgccgtcacgatggaagcgacaggtggaggtctgagtgagttaagggaaagtattcgaggtgccaaagaagacagagtccttgtgacagccctctggtgagcgtgtgccaaccttgaggaggatcgagacagcatgcgagtttcgatggagatgacgaaagagaaacgagatgaaatgaatataggtaacagaaggatgggaatcgacgttaagaggttgaagtgcacagaaaaaagacgcgatgggggaggaacaaatcagaagagggtgacagattatgtaatctgtatatttgatatgcatatatgagtttatcagataagcaaaagttacataagtgtcactcagtcatccatgcccaaacacgagaagaactgctcatagttccatttttgttttctatcaaaagaatagaggaaccatctagagttgatcgcaacaatgagcgtgccggggacgagatctgaaggttgtagagagtggaggatgggaagaggagggcggagtggtattacagacggagaaacaggcacatgccgtataaaaggatggaaagaaccaaatggaaatagcacacggggccaagaagaaaacgactaagaggagaaacagaaaaaggaataaaaagaccaaagagaagtagataaagatcgattcatgatttctactcgtcgtcctcctcatcatccatctcctcggtcgacttcttctcgactaccttgggttgcttgaccacgagtgccggtttgggtgcgttcgcagcggtcaagggaccggccttgaaaccctggtcctcacaccagaatccggaaagagtcacctggaacgttctgtgatccggttttcacgcgcgaggaagatatttacaagtggacagcatgcatccgttagttaaatgcatcggagttttgatgatagtgtgcagatatgccaaacagaacttacgccatcatctctccgcagagcttcaagagctgggcctgctcggccgtcagtactttacccttcttgcagattacatggggagccgtcaatgagggaacacctttaacaagagaagtggcgagtccgagcttccgaagctgggggtccattgagtgggggaagggcgacgtcgggtcgttgtacatgagaagaggacctgtaacgtatacaagagaactcagtacagaggaaaccggagttggcataggcagaaactgataacgaaccaacgggaagggtaacatccctggcagcaacgttaccggctcgagcgaaatcgggcttctggaaagactcgaagtactcgagcgtctcctttggagggtggttggtgaagaacaaaccagtgggcccgttaagttgctatttgagacatcgaggggagagtcgagtgagcctgaggatatttggaaaagaacagaaaaataaagaacgaacagccgacactttcgacaatccctccttgtactcgtcttcaggagtagttcccagagccttgcccataaccttgttccttccaaagaagagtcggccggttctagatatagttcaaagtcataactatcattagacggtcgaagaacacactgtgctaccatcactgagactatgacttaccctctccaagcagctcgaacctctttcaagtgcgagtttctcatgtctccgacgttgaacaaccaacagtaggtccactcatccgcgctttctctaacctgtaggttcccaccaagatacatgcccaccaaggaacaatcccaacacgacacgcaagattacacaccggacatccgaacacgagcaggttgttggaagagcatatagatgacgttgtagagatcgagaacaaggcatataagtaaggtcagacaatcacgcaggactgtaagtaaaaggtttgactctctgtgtcttgttcagaagaaatatcatgcgaaaagagaaaagagggacgaacggcttcaatcagaccagacttgtgctgcttagtcttcttatcggtcttggtcaaagagacgaccttctctctcttggacttaggcatgatagataagagtgtttgtgtgggttgggaagaacgagggtatgaggtgcaagtggtcgagactacgggtggatgagggatcaagagaaatattgaagggagggagcggaagaggtcaaaaatctgtgaaacgtgacttgtaacttatggaaagggctgtgtatatattttaattttatttcctctcacgaaatttgagaataatctgattatcccctttcgttgctcgattcatccagattttctcaccctctcacctacccacttttagttctctatacaacaatggatctcacccaggctcagatcgatgcgctcgagcacactttgctcgatcagactggtgctagcccgttgcacaatagattccgagctctttttaccatcaaggccgtcggaggaaagaccgcaattgatatcatctccaagggtctgttcgactttttgtcttcctttctattcttcgcttgttccgtttatcccggatcgagttcgattttctcttgttcttcctcacctgactcagataattgctcctgttcttaaaatctcggcaggtttcgccgatccttctgctttgctcaagcatgagttcgcgtacgttctcggacagctcaagtctgtcgaagccatccctaccctctctgcggttctccgagatttgaaggaagatcccatggtccgacacgaggtttgttttcttcctagactcttttttttctctttttctttgtccatctcaaacatgtcttgacgtccgtcgttccttttacgcataggctgctgaggcactcggtgctatctcatccttggaatcgctccctttgctgagagagtacctcaatgatgagcatgtcgaggtcagggagacctgcgagattgcgatcgaaaagatcgaatgggataactctgaagccggtgagaaagaggctcggaaggtgctagattctggaggagtgttagttaattttctctcgatcactctaccgcacatacacgctaacatattttcttggcattgtctccgcgtagcccttactcctcgatcgatcctgctcctggtcactacaccccatcaccgatggctgacccgtcgaaaggcccgcagatgaacctctcaatcccagagctccgagcaactctattggatgcgtcactccccctgttcactcgataccgggctatgttctcgcttcgaaacttgccaccaagccaagcctcggtcgaggctctcgtcgatggatttggagactctagcgcgttgttcagacacgagatcgcgtatgtatttggtcagcttagcagcaaatggagtgtgaagggcttagtagatcgattaagggacgacggagagtgcgagatggtgaggcacgagtgtgccgaagcgcttggtggtattgctagtgaaggagaaggtcagtgttcatttcgattattctcctttgttgttgccagacacatcacatcatgcttacccgtttaatttgctttccttgggatccatgacgaaaatgaacatatacagacgatagcgttcttcctctcctccgggaactctcaacagatatgtctctcccttcggtcgttcgtgaatcctgcatggtcgccgtcgacatgtacgaggtccgtgtccctcttctttttcaaagccccatccagtctattggcttgtgctgacctatatctttcttcgttccatcaccctcacttctggtatatcgtgcacaccaactctataaacaatacatagtatgagacctcgaatcagttccagccattggacgaactttcctctggcaccgttgttgatcaggacgctttccagaagacgatgggtggtggaaccgggtttgagcgatcggtcgggactgtcgctcattgattgcactctttgcgattcatactccatcctgtctattgaggattctctattttctctttccttctggccttagcttcttttcttcaaccttaaaaaacgaacagagactgagatatcctctctctttcttcaacgtgttctcttataacctctcctctatatgtttttctcctgatccacgatccacctcttcagtctctttgcactttgtttaaaccccttgctcctctgcttccattctctcatcgttgttgtataagaagcgagagaagggaaacgaagaaagagccttcactacaaaatctttacctctgcctcctctttttctctctttacttgctcttatcctctacccttctttcttcctattctctttctgtcattattctctcaatctctactccgctctgctttgttctctctctatatcttatctctctagaagaaaagcatcccgatagaattccatctcaaatacggacagctcctacacacgcatgaacaaagaacgagttcacagaaagaagtaaacaagcgagacggtgcctaatggaaaaaatatcaacagccaggacgtcccgagatgatgaacaatccatcggctttccgtctaaattgattgccttcaaccaatagtaagctcactcccttgcttctatcgcgcgctttgaagatatgtctgtcgagtcacctacatgaacgtggatcgaaacaaagacagtagaagatatgtttagagtatgaaagaaatcaggattatccagattatccgaactatataccggactcaacgtaagctaaggaggaagaaacagggcaggctaacgcgaaaagatcagtgtagagcagatcatgagtatttaacatataaagaaaggatagcaaaagaaaaaggaagaagaagaaagaagaggttggaataagaagaaaggatgcctgcaggagaaggagcatcgatggaatgcgtttgagaatgaaggaatctctcttcaaccgatgtaatctaccgccgacctcttgcgttctcttcatccagtccgtcgacagcacccaactctgagccaccagtagagttctgcctgcctggacgtcgctcattgtccggagtcaggccgcggcctggtctgatgttcgatctgggcgctctgaacagaggttcggcacgattttggataggccattcgtactgatcaattccgggacctgagacgttccaattttgttgagaatgaggatgctgtgatagtagttgttggtactgatgttgctgagaatgggggggatattgttgaacacgagggggaacctgttccgaatggaagcccatcatggaggggtgcatatgaccacgccgcgaggctagctcttgggcccgagaactacccggttccggctcaagatgttgttccaccagcgactcactctgaaacgcctgtgtttgtatttggtgttgatactgagagtaagaattggaatgcaagtgtccgtggttggcagcgtttgacgagtggtttgagaaggagaaatttgtatagagagcatggtcgactggaaagttcgaaggatgagaaggataccgatatggactttgagactctagaggacgttgcataagatagccaactggctggttctgattttgaacctgactttggccttgaccgtgagacgagttattacttgattgatgtcgggaagaaaaactcgtgggaggttgagattgggagatctgcgtcgtcggatatggtaaacaagcagtatgggtacctgagtaggatgaagatggcattgatggagtcggagtcggagtcgaagtttcagtcctagaggatagatgaaagtgtgtagaatttcttgttggcaatgatgttgctgttgctggtgtttctgcttctgtttctatctctgccatggataggagtggctcaacgctagatccatcatacatgttgaagttcgtttgagacagatttccgccaagaagattgacgtattggttccatgaatctggaaaacccctggaagagctcctgattggcccacctgctgcaggggaaacattgagtgaagaattccagtcaaaggccgatagtacaagttccctgatggaaggaaggtgcgacctagatggctgaattgattctaaggacgaagagggcatcagagcagaaagagggtgtgtaaatggtaatgatgggtcgtctttgtcgaaccaagaaaacatcaagtgagtgaagaatggcatgaagccgatacacacgtatcataccgaacgaatccttctgaacttacctgcaccaaattcgacagggtcgattcctatatccttactcgctctatcaaatgatcctacagcttctccggtgctgccaatatgaggatccctctctctaccgagagcgccattgttcggaccccgttctgtatcaatcacgctttcttccaataccgaccaagagacggcagaagaggatttgtggattgatcggaccttggcggtcgaaccattggggggactttccgccaggcgtttccgtcctctacctttccccggtcctgacttttggcttgtattggactcaagttccggttctttctctgcctccttcgcctttgcctttcctgccttggtggctgtctgcttggttcctctcgtgcctgttccgttggtacccctggatactgctccgtcttcctccctaattagttcatctagcccagtggtcaccgcggtagctgagtttcgagcgacgcctgctcttagtttcaacttcatcccctggctggcaaagtaccgtgtgaggtccgtcgaaggcatcattccagggtatttctattgataggaaagtcgtagaacatatgatagcatgcatctctaagtaagactatggcttggtaggtaaaacagttggtgcagatcaggaagatagacgcacttttggagaaaacacctcaaacggatctgtgaccgtgcttgagaccttgtgtacgctcgtcctttggatcacatttattagagatttgttagtctatgcaaagagattcactgtaaattgaagcgtgtcttttcagggactcacccgtttttttcgtaaaggatgaaccgcaaacgaaattttccaggtacgcgaatggagagcttcgaaaatacgcagaaacttccctctgagaaacaaagcgcgcaaacgtcaaaaaaagggaacaaatgacggatcttctgtttcatagcaagagaccggatccataaagatccagagtacttacggccaccattgatatcgcagagcatttcagtcgacataacccagtcgcctgccgttgcatttgcgccggtggccgtcttgacgaccgggtacggatcggtcggtcttatttgttccgcttgagaggtagtctgaaagagagagattggggtgagaatgggcacaggggtagtaggagtaagcatcggagacgtgagattggtactatagacataattgggcgtaggaaattgagttggcccattcgagaattgatcgacatcgatccgatcaatctcgctaatggcaggggtgagagcagtaaaaggagcgtcggtggtaggaggaacagtagcacgcactgaggtgagtggtcgtgtgcgtgatgcagaaacggatggtgatcgaagagcgggattaggaggattgaatctggatgtggctgaagacgattgcgcagaaacaagggtggcagtgacgaaaaagttgttggatgctctgaattcagccgtttctttttcgaacgactgcacctcaacgatgatcggaggatcgatcggtcggcggctagggtgttataaatatattcgggaaagaagaggggaggagctgattagcttagacttcggatgcaatacatgaattgaagacgatagacttactcggcttatgagttttccaacggatgttatatacagatacgcaaagacaaatacatagaatccagaagtaaacatcagcgaacaccgatgtacgaggcctatgtatttgagtagaagagaaggatggaaaactcacaggtttcgttcgcttccttgaatgaactgagtcgagcacgaacgggctgctgcaggacagaaagcttgtaggatctgtcgatcggaaagtgttgaccaaaccgagtcaatgtatgaagagacttggtgagcgagaaagacgggatgtggagagaccaagatgtgcacgacgaacctttgctggttaggaagttcatccctcttgaagcgttgtatccaatgcttctcagtgttccctgaggtaagcttcttgccagtcgacgctggatttagccttctcgtcaagtgtggaatgagctttacttgagcctgagtagatagatgagtgatggaagcagatgtggactggtcggactgtcggttattgtcgcgactggtacctgaggccatggctgtggataggcgaagaaaaatgttgcaaggatcagagtaaaacagaagtatatggtgcaactttttttttgtctatcaaaagagacgacgacaacgacgagggaatgagaagaagagggaggggggaagaaaacgaaatctggattgtcaagaatggaccatatgctagtgctctgggtatggatgacggagactataggaaacctcagcctagatgtaccgaaggaggcgagcgtttcatctcgattgaaaaagctaaaagtcttaagagaacagtctcttctcgaagggcaagctcgtgtgtgatcttccccgctttctgttcaggttagggttgctctagtccgaattcagatcttttcttggtgttccaaaagagcatccgatttcgtctgtcctttcattgggatcaatctagttctggcagttgcctagggatcggaagctattctaatagggctgatctagaaagaatttctccgaaggcgcgcagtggaatttccgatctctctttgacgatcgacagcgcagctttcttatattcagcaggattcatcgacatgaactatgtgatagagggaaaaaaagaaataatcgaaataatcgaaagactcacgtaagataacaaacttcgtcagcgcatagcgcattatgccctgctggcggacaacccaccacaacgtttaatttcaatttgttaatgtctgtttttataaaacgatatgatacaagatatgacaaacaaatagacccaaaaaaaacacacacgcaaaaccaaaaaataaaacaaaaacaaagaacatgaaaaggatgatgcgcagtaaaatcgaccgattagtaagcctcgggctagtgatgctgtgctgcgcctcccctcaagttgccctgttctcaaaagtaaagaagtaaaaagaacaacaacaaccaccggaatgtccagagaggcaggaagcccgagaacaatcacctaccaaggagactatacaagaaacaagaaacaacgatcagaacctgggctaatcttcttcttcttttttctcttgtatcctagtaactttctgcgcacagctcaacagggcctgaaatgttgtttcttgactgacccaggcctttccattatttcattttaatctatgtttcctgttactgaccactaaatttacaaagctgaccctctgaccactctactcactatgtcgcgtatgattttcttgttgactttccttcaactttgttttattttgttttccttcttccttctccttttcctctttcttcttctcaatccatctcccttgaccacctcatcctatcttcacctgtgttcttttttatttctctattctccttgttctttgggtcctcagacctgtccagtcgtttccggtgtcaccattctctttcgcgctttcctttcagcaaccaactctttctcctcacatccaaccagccactttgtaccggacaaagtcatctcacattcacttgatatctcacactccttcaaactcctcttgtctgcgtcatcttcttctcctcctccccttcttcctaactctctaatcacgcgtcccccaagatgtttcacgtaaacatccctcgactacactcgtcgcgcgcacgaccgattacctatcttgttctcctctgtctttgggcatgtttgttcccctcggcttgtgtcaacgctgccaccaaagagcaatggaaaggtcgatccatctatcagtaagcagagtatcgtccgattggagaaatcacgcgagcagagaaataagtcagctctccttccacccctcctttcgctcactactacaaatactccaccttcattcaatcgttagggtcattaccgatcgttatgctcttccgacagagaccgctccggctctgacgactccgttacctacggtgtgtgatccacaggatcagacatggtgtggtggaaactggcgaacgatcattgagaacttggattacattcagtctatggggtttaccgcgatttggatctctcctgttcacaaaaacattgatacctctaccccgtacaaatacgcgtaccatggtccgtttttttgttgatttaaatctctcaccccctcctagtcccacgggacgtgctgttttattcttctctagagtcagccgtttgttctgatgtcatattgactctcaaccttcaggctactgggtaaccgaccaacgagctcttaacccccgtttcggagacgaagacgaccttcacgcactcgtccaggccgttcacgacagagggatgtatatcatggtcgacattgtcattcaaaacgttcccctcgtcgcgaacccgacccatctggatgtaacgacgagcatgatgcaagcgaacggatactggtttactgaaccggcggaatgtaagtcacaaagatttatgttgatcgatcagtcaaaaacgtcctggagatcagaagctcacagttggtcatgggatatacttgatggtaaaaatcgagtttagatcacccgtactgcgctatggactactcgaatgatgccagtgccgaaatctgctggcttggagatactgagctggcgttgatggatattaacaccgaaaaacaaatgtcatccagtcgttcgacgcttggattggccaatttgtctcaaactactcaattgatggattgcgaatcgatgctgccaaggttcgtgcctcttttaaattgaatcttttacatgaacgcgtccaattcttagtcaccataagctgatgagatatcgattgtctgtcatggcgagtagcacgtcagagagaccttctggcccggattttgtcaggccggtggagttttctgtatcggtgaagtctttgctaacgatatgaagtgtgtatctcttccatatccactgtcgtttgatctgaggcggatccatgaacttcactgacgctgtattcattgtcgtgtatcgtctttgttatcacggttgtctttctattgagataggacgataaaacgatatgctgataacatggactctgtaatgaactagtacgccctccttatatctgtcgtacattgtccggagaatttgaaccaacgtgttgtattaacttgagtgtttttgtagtccggcgtaccagggaatgatggatgcgttccagctgcccgggccagcgaacatgagtagcttggtaaattacatggttcagatgaacacgaccgtcaacgtacgttcattgtatctgtctcccccctcgtctttctcgtgcagagactgatcaggattctcgcccctcacctcccaaataggatacacatgtcctaggaaactttatcgaaaatcatgacttggtttgtctgagtttctctcaatctcggccgtgtgaatatgagcatagttgacctgatagggttggtcttactttcgtttctctcttttcttgatcatcctcctgccgtatcatgcagcctcggttcgccaacacgtgagtgcatatttagatttctatcacaaaaatatattcatgtggaaaaaacatgctgataaacgagttgcatctgatcacgtatacgacaattttcatccagaacggtggatccattattgcagtacaatgctctagcttttcaattcattggtaacgatggaatcccaatcgtctactatggacaggaacaaggatttcatgtacgttcctcttctgaaaccctatgtatgctaatatctgatgtttgtccgaccactttgtatgctcccatcctttttgcttctttttttgtcagggaattgctgatcccgtaaatccatccacgcgtcatgccagacgggtttgatagaggcgatctattagactgactttgattctgttgtaaattatcttgaatcaaaacttctctaagtcaaaccgagagcctctgtggacatcagaatatgcaaacacgacgtatcgtcaacgagtcgctttcctgcacgagtttcggagtcttatggccaccacgggtgccaccttcaatggctatacctttgagaacgcttcggcccagatcctctcgcatgatcaacagacggtggccatcagaaaagggccaatgatgagcgtgttaaccaacgtgagtttcttttttctgcgcttcttctaagcaggcacaccgtcccgatacatgggactgatagcatcacacaactgacaacgatccaattcatctgaaccctcatttttggtcacaactagcgagggtccccaccgacaaacgagccatattcgatcttaaactctggttggccaatgtatactcagttagttgatatctggtcgtgcgataaactcgtggtcggctcgagcgaatctttcctgatttcgtataatgtccgaggcggccgacctgttgtatgtttcgctgctgctttcttgttccctctaaatcttatgtgagctgtcgacgctgactgtgatactcttatgacttgcgctcttacatcaaagattctcgtgccgctagcgctcatttcgaatacgacgttctgcccgtccatacaacagataactatcacacagaaggtctctgattccagctcatcttcctcaatgctcggtagatgctcaggatgggcatcgtgggcaggactgctagggttcagcataagctgtttgcttaccctctaagggaccatcctgtgttccgctctcttttcttgtgggtctaaaccaaaacaacaaagaatgaacaaaagacggccatataggtgtcgcatcgagcaacaacatcagaactactagcattgtctacacctcttatcaacacatgggaaccatcataatcatcatcatcagtatcgtcgtcattttcattcaggtcttcctttgtactttatcatcaacgcgccacttgcagctcaaggaaacaaatctcatgaaccatcatccgtctcgacttatccttacctcaacgctttcagttttatctatctatctatttcatccttacagctttccttgttgtacttttctttcaaaaatgttgatccgcctttcaccttttccgtccgcgtctcccttgacagtttgcccatgtttgttcattgagggttgatcttccgctctgtaatcccttcaaaatatgtactattacgccaggactcgtactatctcaagttcagcttggaaacccctttgctctcacattcttctcttctctatccgacattcgtttttaacctgaccgccccacgttcttttcttatttctacttcaaagcattcaactggaaccgttcgtttgatgtaacatcatgggtgtacaatgactattcctctcgtttttcgtctctattcttttcttatcagatccctcacttttgtgatacagaaacaaagatcgatccaatcttaatcctgtttccaggactagcgcgaaagatgtggattttgtagaacacggatgcaaacgaggtgacgatttttcatgggcttcctaaatatttgtttacgaagtgcatcaaacctttggcgctttacgtaatttcattgactatcactagccgtcctgcctctcttttcaatgtctcttattcacaggaagtatttaatcaatttcctgtcccaacaacttatatctgccatctcctcgactcaaccagataagctaccaccaccatcaccatcatcatccccttccatcctcccagggcgctatgtcgtccgaaccgtcttcatcgtcctcgggcaatctcagacggggcgcggcgtgagatatctcattcttgccagagatactttgttctgatattggcagctaaagcagacaactaacctaatgtctcggtcgtctggttcattggcaactactcatcggtcttcttctcttgctcatattcagttgtcagcgttgcaggtgatatactctacttggtagctgattctgaatattgaacgagcgtcttgaactcatcatcatcatcatcaccacaatttggttccatctgaacgacaggaagagaaagctggtgggtgataccttgtccatgcatgacgcttaatatagtacgctgacacatacgagacacatgcggtctgtcttttgtatctttgttccattgcttattcacttgttgctagaaatggtttgttgctcagcgtccttttcttacagatgaacacaagtgaatataacctgaatttagattactgttgactgttgcagtacgggtgacaaaccatcttgcgggatgtgtcttaaagtgagactagcctgatagatttctgtaaggctaaatcttgctcatcttaagcttattttctttatctttctgggtcaacgctctcagcactcaaaggagtgcacatacgaagattcatatcgaccaaagactaggctttcgaagctggaggaaaagatctgttggtgctagacctgtcttgtcgctttcttttgcggctgatcaattttttcttgtcttttgtcgaccatactcaccacttccctttgtcatctgtattacttgacttcagcacggctagagaacaacctcgcatactcggaacctagcaaagccggccaagtcagaccgcctcacttggcccagagacaaagattttcaacagggtttccctatcctggctcgaacgaaaccagatcggaaaatcacacccgcccttctaattctgttcagcaggtaaagtttaacagccgaaaggcctgctcgccgtctctcgaagagccaaagaggttgcgctctacactcgtcatgaacgaatcacagcctgttggagatcagcctctgactcctattcaaacgagttcgaacagtatgcctgaatgtactgtgaagacagacttttctcctctggaggctcatagtcaactgctcatcgaagcagatcaagcagaaattagatttgatgattgggtctatgactttgatccatacgcagatgatagcctatcatctactccaaaccaggccgttgtaacagaacttgagctctcagcatctctgcggatccataccgatcaacgttctcaaccggtgattagttctcagttgcccactccggaagagtctccatcatctctttcaccgttcgcgccgctggaggaccgtgcggcagctttgaaggtagccgtggttgatcgggaagagcttccgaaagaagttagaaacagtctgctcagcttgttcttcttgaagaaggccatgttcgcgttcagtctaaatctcgatagattctggaggtcagtcttcaacctttctctgacatccaaaaatgaccaagaagaagaggacacgttcttgcgatactgacgtttttgcttgtatgccatttctgccgttggtctcaaatctgtcagttctcttgaccaagagacatgcgatgatcaaccgcatcctgcttttctttttgctatggtgcgtatcgttcttttctcgtttgacggttgcttgtatatatattgataataactctcagctctcgcaacaaactctgtcgcgtatgtttgatattccgatatacctctgcaaaaaattactcttgttctctaccgacctcagtatcattgcgctagtgtattttctcccgatgtggccgtccaagcgttggacgatgtgtttttcgatatcgccaagaggaagctggacgaggctttcagagactgggactgtagaacaattgatctgatcagagccgccataatcctgagcttcacatcatgtgagttgatcaatgattgactctctgggaggaatagaatattcgtgatatcgtcagattctgactgttcaaaccgtcgatgctgatctgcactagatgcgagagcaaggccatggttcgcttgggtcttttctggggtaaggtttattttaccttctttaacgctctaccattcatattctgttgtttgttgacgcccgtctcctgggtcacatggctctcagatggcgatgcgcctttgttctttcgcccatcttcagagaatcagcttcccgttctccatgacgtctatccagaatctaggatccgacgcatatgatcagatcaaagggcctcccggacgtgagtacaagcgtgtgaaacctccgaaggattctattgagctcggagaatacattcacgtattctggatggcatgcgtgagtcgcgtgccctctctgccgagactagaggctgttttgtctaactctgaattgatgccgaacatatccctgtaactttgcatctgctcttggtcgtttgtgccaatcagactatagacaaggtcacctcaacatcttccggatgcgctcctgtaggtttcctttcagtgagatgatacagaaacatatggaacttaagagcacttctcttattcgaatggtcaactttatacttagacgatgcactggtcagaaatcgagacgccttttccgttgccactggagttgtacgccaatgcaagttccaccgagtagcttctcatcacacttaacggcattgtttctcaaccaaaggatctgaccattgtgttgtgatattatagattgatctggtcaatagcttccccaaaacggcggtgtacgatttgtttaatgactctcagcatgtcattgttggaaacatgtatgtgaacgttaactcattaagctctcgtggtaaagggaaacctgatagagctgattgttcgttgaaatcttggtcgtgatctagaagcgcatcttgccattacattgcatccttgttcttgagtgaggcgtcccggctaagggatgagttcatccagccttccgtccggaacgggtatctctctcgccggatgtcgtcttcaaccaaccctttagcctctcccgcctcgattaagaatttcttcgaggatttcttgagcgagagcactgtttctcactcgatgggctgtgtgccagaagaggtcattcagctccagaacgcggttctcagattcatccggtctcttcctgctgaccgatcgaaccctactagaaggatgtacgtctgtctgatgattcagataaaggctgttttggagagctccctggctgatgattgacaccttttttttcttttctttctttggtcgaatggatgatatagtcttgggggagtcccgtcttggaagtcagactctacgttcaattttgagtcgatcacaggaacgatgaacgagctgtccggtcagacatggggagtcgacccggaaactatccttatccataccgaaatccatacgtacgtatacaaagacatggatacgcactaccgctatttttttttcttcgaccgtttctacttgtcatttgcacgtgttctgatgagaccgcacctgattaccttttattttttgtattatttcattcgtgggaacagcgcgctcgccttaatcttccaggagcgatcgaaatatgaacccgatgcgtgggcccaagcggtgtcgtccgctcggtccgtagttaagatccttcagatcatcgtcgatgtggactttagtcaagtgtgtgtcatcatggcggttcgtgtctgtttcatcttttatattcgccccgacgtctctttctggcttgcaccatgggttagactcttgaggaaaggctgactcaagattcctacgggcgcagacctgttggcgaatcgcggctcgaatcttgtctgacgaagtgagacgtcatcgttcggccgaaaggaaggaaggttcgtctttagctatcgtcccggtgactatgtcgaggacgtttgctgatcgacagagaccgttcgacctggtttgctcacagagccgaattgtgcgatggttgacgtcgatcgtgagtgttttatgcttgtttcgataggttgatccgagggggatcaaaaactgacaacgaccgggctttgtcttttttttttcgaccggtggtcgatgtagtcttactcctcgcgcttgaacggatcggtcaagtctttgtggccgagtaagaatagccgatcgttgaggtctttcctttgtttttcttttctcctcaacggagatttccaaagcctatggttcctcaccgttcgttgctgggcttatcgacagggacgagtgtcgaacgacttctacgcacgacgtgcagtcgtgatagagttttctctctccttttttctctatcttttttctttcgtgtgtgtgtgtgtgtttgg

SEQ ID NO: 120 - DNA, 28363 bp, Xanthophyllomyces dendrorhous
gtgtgtgtgtgtgtgtttgggggggggggcagatgaattagagtcaggactattgagcgcacaagtatctttcttcactggcaagcagcaacaaaccatttccgtctactccgtcctgaagctcgataaaaacctgttttatcctgtctctttcctctgtctcgtaaggaacctctcctagcttcgggagacacagcgtagctaggaggccatctaactttgtgagcgctctcctccggcgattggaagatgaccgagctgaagaaagctggaaaaggaacagagtgtgaggaattgtcagtcttgtgaattttgaagaatcacaattttaaggaggaaaacgatctcacatcttcaagaattggggctaagaaaaccggaatatcgctcatcttattctccagacctgtctgtccaggtgtacggaacgaagaggaaaacacaacaagcaaagagagagggtaagaggaagaaggtgatcttgtacgatagaaatcagtcacgtcgccccgtcgcccggaaacacctcgaaggtgacgcgttttgggctacgcgttggtctctaaaaggattacgcaaggaacgaaatcataagcggtgctatcacatgactttggccgagataacacggttacacttccttctaagcacccgtcgtgccctggttcgcccctccttcccctgtgtgcctgtccatccgtccttctcctcttctgaacaccatccatcctcccctcctcccctctcctctcctcttccttccatcctccatccctcttctctgcgcgcgcgcgcttacatatttctccgctgctctaatggatcccaacattgatcagattgctccacagtatgccgatccagaggcggtcgacacgccccggacgaataatcgaaaggtcgcatagttcgttttttccctttctctcttctctgcctctttcccttttcttcttctcctcccctttacatcctcttggataattgagtggatgaaaaaggctgatctgctatctctcttgttcgttatacgaatgtccatcattccatctgcgcgcgtcttcctcgctgggtccatctcttggtgcgggctgatctgtacccttagtttctacgaccgtacgtccctatcgttctgttctctttctatgtgtcgcttcttgttctctgctccatacagagcatcataagagatcaagattgggagttttacaaagtagtcaagagcgaagcgcatcaatgcgcttcgctcaaaatctgctcgtttgatgcccgctcgcgtccgatcaacgagtcagcgttcagaaagagcagcgatggactggatcctcaagaggcttcctgaacgtctgcttgagcgggtcaggcttctttgatactggcgcgctatgaagcatatcattaaggaatgatattggagtggtccgttggctttggttgattgatcctcagatcagaacgagggagagcagtggagacacattttgattcatctctcacatcgtatatactcttctcctgcctgttctatcctcaacgaagagcaatcgcctctatgcgcattgcctatcccattcatcatatcataaaacatatccacgatcgtatccatatatcgaaactctggaatctaatatcctagttggttttcaaacagacgacgtcggaaacttcaactatggactcgggcacgtgatgaagcctcatcgaatgcggatgacccataacctgctcatcaactacggcctgctccaacacatggatgtcttcgtacgtctaagcctgttcgggcgtacatcacagtcacccgaatacgtgttgaccattgtctctacgtggttctggtcttctgacgatctaatccatatgctcgattggtattatgattcttacggtgcatcgtatcggcttctaccatcttatgactatcatcgatatcgctgtacattggaacttgaatagagaccaactcgagcgactcacgaacagcttactagatttcataccgacgagtatatcgatttcctcgaaagggtaaccccagaaacggttgaggagcttaccgcttccggaagtcggtgtatgttctaattctttcctcagatgagcctaacaccttgtgtgcttgattgtagagtcagcagatgacatagatccaacacttttgttctgatagtcattgtaggagaggattgtcctgcgttcgaaggtctctacgagttttgcacgatctctgctggaggatccatcggttcgtccatcaccttcgtcctttcttctatctttctaccccatgagactcacattttctcttctgctgttcatataatgaaccgaatagggggagcccaacgattaaactccggagcggccgagacgtgcatcaattgggcgggaggtcttcatcatgcgaaaaagagagaggcctctgggttctgttatgtaaacgatattgtgctcgccatccttgagctcctgaggtttgttttttttcttctctatatttgaaccaatggagattaatctcgatttggtgaatctatgatatcaattataatatagatatcatcctcgagtgttgtacatcgatatcgatgtgcatcatggagacggcgtcgaagaggcattctactccaccgatagggtcatgacctgtagttttcatcaatttggagacttcttccctggaacaggtgacgttcgcgtatgtttcgttctcttccttctcctctcttatgtttacctctgacatctcggagccttccttttgtttggatttttgaaccgcaggatatcggattagctagaggaaagaactacgcagttaatattccgctccgaggaggtatcacagatgaagcctatcagagcatattcgagcctgtacgtcccacgtcgtctcgtgtcgtcatttctttctaacaatttcttaattgcttggtgtgtttgtcgatgccgctactggcgatggtattcggtttcgacaatttaataggtgatacaacatatcatggaatggtaccgtccaggagcggtcatccttcaatgtggagcggatagtttagcaggtgacaagttaggaggattcaacctgtctatgaaaggtttcttcatctcttcttctcattctacatttccttatgtatgaatatcggataccgtcggagcatatcctgatgttctcttgtttccccacaggccacgcgaattgtgtcaaatttttgtcaacattcggagttcctttaatgctggtcggtggaggtggttataccaccaaagtaagttctctcttttctttacttctctgttgaatcaagaagtgaaaagagagttgggttgaatattggaattttgatatgtgattgatttcaatagaacgttgcccggacatggacgtatgagaccggtgtaatccttgggaaagagctcgatgagaatctgcccttcaatgattagtgagtctagtttctgaccttcagcaaccagattcgtgttgtatacaggattcggattttttgatagtctgtaaccatgccttcctttgtgtaaacagtttggagtactatggtccgagatacaagctagaagttctggataacaatatggaaaaccagaactctagagagtatcttgataacatcaagtgagggctcccttgtctctcaatctatctgtttgcatttaagtggaaaactgatgatgttggattttctctcgtctaaatcacacgattagatcgagagtgatagacactcttcgaaacatgccgttcgcgccgagttcaggcatgcacgaagttcctagaatgtcggttggcaaggcgattgggattgtgggcgaggacgatggtgattcaggtgacgagagtgatatcgacgggcagattaatcgtgagttttctaagcatctcaggaagagtgatcgtgaacaaaacgagtattaatggatgttggtgtttgattgatctccgaattagagcgtttacgtcaaattcacgaggccaatcgagagatggaacgagcaggcgagtacgaatctgatgctgattcgtctcgtatcgatatggacgaggatgatttcgatcgcgccggttcgtctgcccgaaatcgaacgaacaacgtatcgggttccagccgacgggcacacgatctctctcgtacttcttcctcgacgtcttcttcagcacacaacggttcttccaatcaccatcatgatcaccatcacgtcagcaacaacggtggcagtggtagcagctatccttaccagcaaggccatctgagtcatcaatcccatcagcaaccttcgtctcattcatatacgcattctcactcagcaaatcttccatcgtcccattcaatctatcctccgagctcgactttatcatcaagtcgccagaatggtggcaagtcactctattacctgccttctaccaaaggcgaccgagcggccatgggcctcccaacatacgatctgacaggcgcaggtgtagggtcatacaatgggggtggtcctagcggccattctggagggatgggggctggaattggacaccctttaggttctgtaccggggggaggaagtacttttagtggtgcaggaccgagcacaggaagtggccacccaggacaccaaagaaaacgaagctttttctcaacctcgggggtcttgcctggtgccacgggatatttaggtctcaacggaggaactggctcgacaggaggcgaaagcggtggaggttcagtaggtggttcgagtgatcaggtcagcggtagagctgctggtgtcccggccggtggttggggatattagcatggctgtccgcaatcatctaccatcttcaacatctggactttcctcttagtcttctctccctgttcactttgtctattcaagattttctcttctttttggctcgtatgcatcggcttataatttttcatctcgttttttttccttctcttgcccatctttttcctttgaattttttcgttcccctcatatccgactcttcccaggaatcattctacatggattgttcgatcatttgggaaagggggttatccatcgctacatcaacgagaacagaataacgaacaggatcagataaagaaatgaatatggggatagaaatcacgagacacgtgattgcatagctattgtcatcccgccacattcctatcaagttttggatttctttcagtccacttcctaccggagaagcctctatcccttcttccctccgctatcccttaccttgttctttttaaatacgtaggaataatccgtctagaaatatgggtggaatggctcgtcataacggtcgaggtgctttgctcacctcgaacttgcctcagttgcaaaatttgatcaagagagatcctgccggatacaaggaggagttcttggctcagtggtaagtggacggtcgccgacatggttgtatccattgtaacaccgcgtgtctctcatgtctttgggtcaaaccaggtcacttaatcgaccttatgtttcatcgaatcaacaggaaccactatgaatccatgagacggttgttcgaattaaaccccgatgaggagggaggcagatttagagaggtccttgggtttatcgctcaggtaagtttttctctgttcttgttcagcaggctcagccatttcctcttactctttcgattttgttgaacatacaatctaggtctcccaatgctatcctgctgaaactaaggagtttccgagtcatctgtcttcgctcttattagaccaccatgcgacgctctcgcctgataccaggaagagcatcatccagaacttgatcatgttgcgaaacaaagatgtcattcaatccattgagttagtctttcatgtgttgtatggcttaccacacatattcaaacgggacaatttctaatacggtcattcttctacctcttcggaacagcctccttcgaaccctcttcccgcttttgtctattcttacttcgtctcagcttcgatcgtctattcgaaagaccattctgaccgatattcgaacggccaacgccaagacaaaaaaccataaactgaaccgaatggttcaggctttgctctttggaatggttgagagaggtatgggtggggatgccgagggatcccgggtcaaaggaaagggaaagaagatccagcaggatgcaaaagggggggaggccatgtgggcggtcgtcttggtcaaggagctttggcgaaaaggcgtttggtatgcgacgtccagctctgtgtgttaaggatcgtgaataagatactcgactaaccgcgccatactcctttcattgggttttcacatgacaaataggaatgaccctaagtcggtagctattgtcgctttggcgtgcaaccaccctaacaccaaggtccaatctgccgccattcatttcttcctcggaagcgagaacgaggaggaagactcagaagacgaagtcgacgaagggcctgatcttcgaaagcttcaacatcaggctattatcaacaagaagaccaagtctagggataaagcccttcgagcggcagtcaagacgaagggtcaaaagcgaagggagaacgcagccaatgcgggtgtaacccctaacttcccagccttgcaactcttgaacgatccccagagtttcggcgaaaaactttatgatggcatgagcaagcacggttcgtcattttcttgttacttctcaatactttgttcttgctctaaatcttcaggtttcttttctttgtctctactcttcagacaaggtctacgcgctcgagcacaaggtgctgatcatgcagcttctcagtcgagtgatgggtgcccacaagctttgcatccttggtttctattcatacatcatcaaataccttacctatcaccagctctccatcacgctcatccttgtctcgctggctcaatctgttcacgacttaactcctcctgatgtccttacacctgtcattcgaaagatcgccaccgagtttgttcaccctggagtaggatctgaagtcgttgccgctggtctgaacggaatcagagaaatttgcagaagacagccgtggtgtatggaggaagatttgttaggtgatttgatcgagtacaggaagagtagggataagggtgttgtcactgccgctcgaggtctattgcagttgttccgagaggtcaaccctggattgctcaagcgaagggagagagtaagtgcttctgttcttcttaaatggttcgatatgtcaaaagctctcagtcagctgacgcctatgtgcattttctttgctcttcgttatcgtttttgtagggaaaagctgctagcatgggtctcacctcggatcaggttcccgagttcggacaccaaaaatcggctccttctggaatcgacggtttggagcttctggaggattatctcaaaaaacaatctgctgaaggcgatggagacgaagccggctctcaagctggatccgatgctggttgggatgattgggaggccgaatctgaggctgagtcagatgattctgggggatggcagaacgttatgtctgattcggaagacgaggttgacatcagtgattcagacgatgatgaagaggagaagactaggcgagagaagaaacgggcgttccgggagaagcgatccagggatctcaatgctcttcaggaggctgaggaagataatgagaacatgcaggacagtgatgccgacgaggaggaggagaaggaaaaagtgtccctggctgctcctgctgagaccaggttttctgcccttgcttcccagaaggtttgtctttacttatattccattacaccttccttttgagcgatcaaaccaagcagaactgattcttgttccacgtcgtgggtctttggttcatgctgagctagattcttactccggccgatttcgctttgctcaatactctccgaatcgccgctgctaccgaagccgctaatgccggtggaggatctgccgcgaagcgaaaacttgccttgcttgaagcaaacaagaagacaaactcgtctggagcacaagatgatgaggtcttcctatccgaaggagatatcttgggacctagaaagcgagcaaaggagaactacgaggagcgaatggctagaattgcggagggtagagaaggcagagaaaagttcggatcggcaaaaggaaagaagaaggcggaagcttatacttcgtctactaacaaggatgtacgtcttcttctttctcatgtcgttctattttttgttcctgagtatgagaaacattcgttaacatgattgagctttttccttttctcgatcatttcatggcatcaacagaaacgaaagaacaagccgctcatgatggcggttcactccagaggagttgtcatgaagaagaagcaatcgcttcgggagaagcaacagaacttgcgaaaacatatcgagaagcagaagagtgcgttttaatttcttctcacactttggtttcacgcttgtcagatagcctgatgggataaatcattgacgacctaattctcttcctttggttctgaaccttcttatccgaattttttctcagagatgaaggtccgttgtttttactcttatgtcacttgtcttccttttctttccaggtccttagttctgaccatcatttttctctttctcttggtattgaccgaaacagcactagaatacaagtccaacaattttagagcgatttgttcttttttcaaagcttcaccgctcttgtgtagttacatctcttttctctcactgcagatctttgcccttccgttgtctttctttctctctattgttcttttctctgtttctagttctggttgttgtcttctgtctatatcatcattcggttccgtcctcgtccgcctctttgttctcagcccgtgtgtcaagccattctcccaactattcctttgctcatgttctttctccttacttcacttctctctgggtttgtgtgatagaggacaagattgggaaaatagtgctaaatagaaggtactggaaaacatttgtatcagatactgatcacggaaggaaatctctctcaatcaaaacaacatacgacatagataagaagaaaacataaggaatacaagttgatcaaacagatgtctggggggtcaagattgatacatatcgtgtctagcagacggcgtgggtctttccgtgtttacccatcaaggaatcttccttgtcgccttttccatgaacggccgatcgatcggtatgagcctgtttctgatcagccgatcgtttgtccatgttttggtcgatcgtcttcttatcgagcgtatcgagatgctcgcatgttgcattgatgtctcgaatgactggaccaagagagagaacgagaatattagaaaagatgagcgagtgaaagaccttcaggacgctttggatgaataaacacatacgtctctctgctcgggctttcgagaagtctgatcgacagacgactcgaagaagtttcatcttatcagctccaggagccatcacgtaagcgggcacgatccagtttcgggatcggagagcatcggcgatggcaaattcgtcgtaatgatatccatccttcaacttgaaggcaacgacagggagagaatctccatgtccaggagtgagtaagtcaaaccggccggattcaacaagcttgtcggcaaaccagtcggcaatgacagtggtgctgttcatgatggctcggaaaccctcctttccattcctgatcaggatatctgtgtgtaaataagaaaccaagtgagcatgaatgtctatcatacgaagacaatgtcactcagagcaaaaaagaaaaagaaaaaggaaacgaacagtattgcgccaggatttgtacagcgctcttggagaaattgagcgtgaaggatgcttgatcggctccaaggtaggcgacgtggaagaccaagtcctcgggtaggtactcgtgagacctccagattgcccatccaacaccagctacgactaggccgtacttgtgtccagagacctaatggagtagattgagatggaagaagcttcagacccgaaaacaaggagagaagaaggatagagagccaagtataagatcactaacgttgatagagacaactcggggaattctgaaatcccagacaaggtcaggcttaacgaagggagcgacaaatcctccactggcagcatcaactgatatgagtgaaatagaacagacaatctgagattagtgacaggttgaccaacgttgcacgaaatgaagaagttctgtaccatgaatcttaacgtccaaaccggtctccttctccttttcgtccaacagtcgagcaagctcagcaacatcttcgtattctccagtgtaggtggttcccaagatggcgactacaccaatagtgttctcatcaacgagcgaaacagcctccttagggtcgatgacgtatcgggctggatttaaaatgaaagaaaaatattagcaaagagaaattgttcgagaccaaaacaagaaacagcttgcgcactcttggtcacattgacaaacttctcctcgatctcaaggtatcgagtagccttctcccaacagactagacggattttgaaaacagattcaatatcatcgtcagtactggattatttaacaagacattgactagcaaaatcaattctcaccctgaacggccgaggacatgaccaggttagggttctctgtggacttgccactacaatgattgaggacaaagaagagtgaacaatctctatcagttcggagacatacgctgagagatattgcataagaggaaagctcacgcagccttccgagcgaccttccatttcctcttcatggcgagaacggcgaggatgatagcctctgaagaaccaacagtcgagactcctactgagtcgggtgagttggcgtcgacgggagcgttaaacattctggcgatcatgttgacgcatcggttatgctgtaaacaagggaagcagcaccatgcgtttagcaaaaatcggacaaaagagaacatgagaaagtaaaaggttcacactaaccaactcgacggtcgaggggtactcttgataatcaatcatgttctttccgagctgttcggtcatcagtctcatcgcctggtcttccatcgaagtcgacacaaacgaggctaggttgagggaaggggttccatccagttcgagctcgtctctgatcagactgtatgcggtgtctggaggtacacgcaaaagaagatgcaagaatttataaatagaaagggcataaatccgatggtcaacatcgaacgttctcattcttctgatgggctaggaatgataatagaacggaccggcgggcatcgactcttcgggcatttcccactgagggatgtctaccgaggtaaacttggatccgtagatgagctgttcatcgtacttgggctccttctgtgtaaaagatctatcagccagagagatctaagaatgaaagtcgaacaacgtcgagggcctaaccttctcctgcttgtggttcacggattcgtctgacctgacttgacccaatagtcccatttttctttgatttgtttagctgagggggttgattgagagatggatgcgagagatggggattcaaatcaagaaagaagaacgagtgaaggagaaaaaatcggaagaaacagcgtatctttatatatagccaacagacagccgaccgggcaaagtatagtcatctaccagcctattccctccgctgccgtcatcatcatcatcttctttcaccatcttaaataagacgctcttctactattgaatttacttcagctctctcatagcggaggcaataatcaagatctttgaatggagatgtttgcatctgcgataacatacacccgagtgtctgtcagtcctttcatccatggtccaactggctttttctgagagattcggggaaagttgatcaggcaccaaagaggattgatctcttgcgcagtcgggggcaatgtgcaagtgatgatgacatcatttacgactgcgcaaagtcacgtgtatctattgccgtcgaatacacagtttataaccggattggaagggagcgcacagtgatatttgcctcaacttgagagaataaggaagaggaacagatcaaacatacatccaatggacacaagggtttatcatttcggacgtctgttgatgagaatacaatagtcgaagatcttcaaggctgagcgcaaggttaccagaacacagcaaaagagaagcaagacgttgatgttcgctttcctcagcaagtctatatgctctctctccgttcttataacctcctgtgtcgagctaaactgccacagacccggtcaacacacatgtttagttcggagcccaaagacaatgtcatacttcctttcatcataaacatcaatccggttagaccattgatacaaccttcatttctcttattccttccgtcttgaatcattcgacacttgttctttatactgcaacccgagagttagacaagagcagaaagaatagaacaaggaatcgattgataaaagtgaccgtatatgattacgtcatcagatccgaattgtttctatggcaacgccccttggctcaacttctacccttccactcgattcagtctccctccgcttccttcttctgcttctggtacatcatcggttatgtctgccatgctcacggtagaagttcaatatcatttggctttaatcctgccaagatcatcatcgaaatcaaccttggagccattttccactcctcccctccaacatcttccttcgttcgatcacgcacagatcccacgcagctggacatggagagatcctcttcttcctcttcctaacaatcgatcggatggactcgtccacactggagagatcattgcacaaagctcagaatctacggtgctcagccttctcatgtcgtatgtctgttacttctcaacttacctctatacaaagtcccttattttatcaaactatctcaacacactttctctcctttgtcctccctgactatccacagccgaacgcctgctttaccacttgctcatatcaaatcacttcttcaagggcctcagctacctgatgaacttgccagctctttactggatattatcggctttgatgatggaggctgggaacttgttgaaatgcttgtcaaggagagggttcagattggaagactgatcagcgatgaggtatgtgagatccatccatcccaccgtcgaaataaaagtctcctgatatgaaatgaacctccaactttttcaacaacgccaggcctactctaaacctgcatccaatcaaccgatagatcctgactttcttctagctcaaagtctgcgacaaaacgctcagcgaaatcttcccctcgccgctgttagttgatccgccgattaccctttcatttagatcaaaggaagaaaggatcaaagcactgatcccacatggatcatcgttgacttcctatcgcatttcgtcacaggcttcctccgctcaagaagtttacccacatgtctaccaagccgcaaagcatagcggtctagctggcatgagctacggtggcagattcgctttaccaatgggaactatgaggtttgactatgatgtacgtttccctcaaggtcacttcatcgtcagaagatagcgtttggacgctaatcctcacaaccacattgaatatatctcagcttcatgaagaaggtgagcttctcattcctctacgtgcatgttttctcatggtacatccttgcgttttggctagtctaatgatttatttgtacttaatctgcaattgaagtcactgttccaccatcgagacctatacctcccaaaacgaacgagaaactcattcctctgacagaaatggacaatctctgtcgggggtcttttcctgttcgtccatatgtgtttcgtagtcagttgcgcaggaaggagatttagtatcgaatttctatttaccttcatctattcacctacaaatcacgatcaagggttacacctctttaaacagggttcagagcattatatttcccaccgcttacggtacaaatgaaaatatgttggtctgtggtatgtaatttacaattctaccttcattcagcttaactttgttgaatcattatagctttggctgattcgagataatcattcctgtgttcgatagcaccgaccggagctgtatgttgaatatttcaaccgttgttaatcatacatcagagttttgaacgcttttcttcctcattctcagggtaaaacagaggttgccactctttccatccttagagtactctcgcaaaatctccttccgaatctgcccaactcggtcgtcccccggatagccagagatgatttcaaaattatctatgttgcacctatgaaggcacttgcggccgagattgttagaaaactcggaaagagactcggttggttaaaaatcaacgttcgagagttgaccggttcgttcttgtcttcatctttatttacatatttttcctttgaaccgccgtatgaacatcttgaagcgttttgtttgatcgtctggccgcatttttaggtgatatgcagttgacgaaggcagagatagcggaaactcagatcattgtgacgacgcctgagaaatgggacgttgtcacccggaaacccacaggcgagggagaactagccagcgtatgtagcttcttttcgaacagtcctgtctatacatctcatagtgccgaaaaaggatactacttacatgttgagtatcgtcgcttgattctttctgtgttattgcaacgattggtcatggattcgcagaaggtcaaattgttgatcatcgatgaggttcatctgttaaacgaagaacgaggtgccgtcattgagaccattgtcgcccgaactctgagacaagtctgttccttcgtatttgattcgaaattgatcttccacagttcttaatccctcttcttttttcgtctcatggaaaaccaggttgaatctagtcagagtttgattaggattgtcgggttgagtgccacattgcctaattatgttgacgtcggtgactttttgaggtgtgtctttcattctctcgcaatttctatcgcaattcttaccgcaagggatttagtcttgtctagggtttcatgtatgagctcaactaatcctcctcttacttgcgggaacgactgatagagtctcaagatacaaaggttagaaggattagtctagaagtcatgtactttcatacaataacgtttacctgattttttgtttctctttcttccctttcttcctccttgccctcaaaatcaaacaaaaggactcttctattttgactcttcgtttagacctgtcccacttgaacagcatttcttgggtatcagaggcaagaacaacagtccgcaacaaaagaagaatttggatgaagtcgtttttgaaaaagtacgtacgaaagccaaccacatgaaccttctaatttcggatgtataattctcaatacgcgttcatatgattaatcaggtatccgagatggtatcccgtggacatcaagtcatggtttttgttcatgcgcggaaagaaactgttaagtctggaatgactctacatgatcaaatcatgaaagaaggaacagcagcggattatgattgttcggataacccggtttgggaaaagttcaagagagatatcggaacaagcaaaaataaggaaatgagggagctgttcgggtatggaattggtatccagtaggttcttttctcctccttgcttcctcacatctctctgggcagatattcttttgtacaaaaaaagaaagggaataaacggtttataccatatatctgctttacatagtcatgcgggaatgcttcgaaccgatagaaacatggtcgaaaggatgtttgagtcagggtgtcttaaggtaggtttcataccatgtctttctcggttacacgaatgcttgcaaatgatatttctcgacaactgaacacttctcgatttgctgttcttaaggtcctattttgtacatcgactctggcttggggagtgaacttaccggcacatgcggtcgttatcaagggtacgcaggtgtatgattcaggggttgggaaattcgtcaatctctcgttagtttgttcctgtcaaccatttacaactctgcgtctttctacatggcagacaatggggtgaatagatctcgtcaagagatgaagctgatcgattaaatcatcttgatataaaagaattctggatgtcctccaggtgggttccctttctctgtttatgactcaatcacccaaagaaacagctatttaatgacaatgacttcttatgtgatgtacatgttttaaatgaaaacagatttttggaagagccggtcgaccaggtttcgaaacaagtggggttggatatatttgtacgcctcaagaccaactggatcactacttggatgccattctatctcaagtgagagtttttcgtctagtattgcagaaacgagttgtcctccgttgactctgtcgggtttgctcatttggtaataatttagcatcctattgagtctcagtaagtgtttggagtttcttgtttgaatgggttgattaactgatgctcattcattgggttgatgaatgaaatctaggttcgtggccgggatgatagactctatgaatgctgagatcgctcttggcacgataacggatgtcggagaagcaggtttgtttgttctacttcctgcataccgaatattatggttgtgaaagatcgaaaggttcatgagttttggttttaatagttcaatggatgggatacacatatctttttggtatgttatttcttaacgtgattctcaaagtagacctggacaaatgtttattttcttgttcttgcgtcatcacgaatgtttggcgtacttgttctagtccgaatgaaaaggaacccgttcaactacggaatgccccatgacgtgacggccgatgatcctcaactcggtaataaacgacatcaactcgttcaactagcagctaagaagctagtggaggccaaaatgattgaatttgatgagactagtggaaagatgtctgttacagatttaggaagaatcgctgccaagtactgtctgtcccaacccttcccttcattctcttctcctagcgttgagccgaggaaaggaagttcaaaaaactcaatagctcattccttgacttcaatgttcagatattcgagtggcaagtatcgagattttcaatgagaactttaagcccagacagacagaagcggatgtgctgtccatgctcgccatgagtactgaggtttgtcttcactctgcctctatctttctgtcactgagacttttacatgctgattcgactacaacttgcccccaaagtttgatcaaattcaagtgcgcgagaacgagattcccgaattaaagtttatgatggacgaaattattccgtgccaagttaaggtcagcaatcatattctctatctgaatttggattggagttgaagctgatttccatcatctttctctctatttcaacggcagggaggaactgatacaagtcaaggcaaagttaatatcttgctacaaggtcatatttctcaagtatttgtcgaagactttgcccttgtctccgataccgcctttgttgcccaaaatgcaggtcagtcactatccagaatatagctcttctcctcaacttttcctggaagtgagcgcttaagtacacgaattatctctcttctaggccgaatcattcgggcgctgctagaaatcgccatcagtcgaaggtgggcagcgactggtgtcgtgctgctctcgttgagcaaagcagttgaaaaaagaatgtggccttacgatcatcccatgagccaattcaaccttcatcgagatgttctttataatctacagtgagtcctgtcttagctgtctatcgggcagaacaaccagtatgccttatgaaaaattcgatactgacacttctgaaatatctatcaatttctgcagacaacacgcggatgatacgcccgttactgatctggctgcttctaacgcggaggatctaggaaacctcattcgtttaaacaaaatccatggtgcggctttgttgacggccgctaggcagtttccaacactggatatatccttcagtcttcgtgagtgtcgagtagcccttcagttcttcaaacatgtcaattctactttcattgatctatctgtctttgttgtgtgtatgtttcctgattccaggtcctatgagccatgacctgctgagtattagtatcgacctttccaagcgattccaatggaacgaacgtcttcacagaaccgccgaacccttctgggtatgggttgaggatcacgaaggtgtcaatattcttcaagtctcaaacgtccttatccgatcggctacatcctctgttcatctcgatttcatcatccctattcgttcaactgctcgcccgccattcgttacaatccgagcgatatccgatcggtggatgggagtcgaagattcagtgacaattccattcgatcacctggttatgcctaaaccgtcgacggctcatacatctttgctcgatcttccgtatcttccgctcaaatgtctagaaaaccctcagctgcaagccatctattcaaagcaatttcaagtcttaaatggaattcagactcagtgcttctggcctatgtatcatactcaagagagcgtgttggtttgtgcgccttctgcttcaggaaagaccacactgggagagttcgctgtttggttcgttataacctttgccttcagcatttatatttagtactgatacaatacgtatttgtttatgttgtattcgcttggaaactgatatgcaggaatgcacttcggtctgatcatccctgtcggattttgattgttgctgctcggagggatgatgctcgaaaccacgcatctcggctccgtgggacgtttagtcagagtatgaaactcgacatcaaccttctcctacgctcgtccgactttttgtcaagaccctctactcagtcattcattggagtaacccatcctggagctcttctctcattctatgctaacgcatcgcctgacgacttcggaaggagtctgtcgttacttctgttggatgatcttcacttgatggacgaacaatatgaattggcgatatctcgaatgttggtatctactcgagcggcacgagtccgaactatagggctgagtgcgtcgttgaatgatccgttggatataggatcttggttgggagtggatccttctttcattctgagcttcagaccgaaagaccgaggaaccgcattttcgacgacagttcagacgttcacacttcctcattccgctgtactgctaaaggcaatgacaaagcctgcgtttgatgtagttcattcgtatcctggcgaaccgacaattctattcgtaacttctcgggctcaatgcctaactgttgctcgagacctggtcacccaatcgggagctcagatggatctcaatgggttcctcggtacatctccggaagggcttgaaccatacttgcgtcgattaaaggatcgagcgtcggcggatattctgattcgaggaatcgggatctttcatagcggcctcgcgccttctgaccaggcgctcgtgttggaactcttcgcacttcgaattattcaggtcttggtcgtccctcgagaggcttgttggacgttgccagtccgttcgtctattgtagtcgtgatgggcactcaatatcttcagatcaaatcgggtttcgatgcctcttcatcatcgtcggcaggaggagccgaccgacaagtagcccgttacacaaaccaggagttagtcaagatgcaatcgttcgccgttcaacctcctacaacgacaacctcaatttctacgacaggaaaatttgtgttgctctgtcaagcagaacatcgagattcataccttcgtttcctgaccgaaggattgcctctcgagtccttgcttcatctgccttcgtccaacgttcttcgatcggcctttcaggcagagatggccaaggggacaatcaagacgaaacaggatggacttgatttcttgacacacacgtttcttattcatcgaattcgatccaacccgaccttttacggcgcgatgacttcagacgaagaggatgagtatgaaaggttgagcagggttgtcgacaggtgtatggatgaggaaaatatagagacggaggaaaaggttgagtcgaaagtgttagagaaggtaaaggagaatgcaatccgagttgtaccaggctcggcgcctaaagtgtgacatattttgtgttcttgttcgtaactatgtctatgtgtttgtgtgtgcatgttcagaaaataaagcattgtgttgatgtttggtctgtagatatgtacatctacacgggacaggagaatgatgagcaaataagtaatgggagagggagagggaaaagatgagaggggaatttatactcatatcaccttctctcttgatgacagtccaattgattgattgattgattgattaaacgattgattttcggtcatgcgctgactggacaaggtgggactcgagattgttgaagaactcagagggcaaaaatagcctggttataatacaagcagcccagcttacgatgtctgccatggatgctcgagaatcatcaaggaagattcacataagcccgaaaaagcactttatccaagtgatgaaccaacacaaggtctggctgaaggataggaagagcacagaacactatggctacgtggattttcccgacaatctaaactatatcttatctcatcttatctacccatatttgtttgatctatttattttccatgccctatttactttgagtatccttcatgaaccattctccatagccactcttttgcaaaacagaattggtttcgcttctttaggaagatacatatgtatcctgcttctcaacagatgcaagttaacgaggaaataaaaggaatcaatatttcatctgtcctggtgagtactggttttaagctccaacactatcttacggagatcttaacccagcccacttttcttttctcattgaaataaagactcagcgcttagcaaggtttacttgggaatggttcgatgactaagtgtagtatttgatggcaattcttataaaccatggtcttaaattctggtttctcatttccatttcaacttggcgctagggtgctttcatatgagatggtatagaataacatgaccgctttcgtcttgtcttttctccgcttagatttctctgtattgtatcttttcttcgtgataataagtggcactgtgctcaacactagtaccgccagatgatttacgacgaaccttctgcaaatttcaagctcaagattgaacaaatggaaggatttggatagaatatgatatatacgtcatccgttctctatcccttcgtatcgtatctatatggtctgtatcagtcctactcgcaggtgatatatatcggaaggttggcccacttgtttggtcgagatccatatctctttactgaaccaagaaactctagagcctccagcgccggtctcgacctaccttctcgatataagtaggtggtaggagggccgagatcatcaaataggagaaatgtgttaggtgtgaggcgcgatggcaatggggatgatgtgttgggaaaaagctgacatatacaagggcttacgctgatattccttactttacgctttgactctctattccaccagtccatcactcttcccaaactgatctgaatctggtaatcgagtccctttcgtaatgtactccctttttgattaaataggcgttgttttcgtttgtaactttctttgagaaatgttatttctcctaatctcttttgttggtatctcatactctatctgttctctatctgttcttgttccaaggcctgatatttcactcgtttgcagctgtctgtacatgtattggacttgtaaatcgtctttctgctcactaaaccttgaaaacagatttgaaataaaatctctgaatttttcgcaaatcattgaaaatcattgaaaatcatttgaggtgtcaagatcgctgtccttcatctctcttcctcactcacctcccacacacacatctttacacacaaactagtaatcagaagcaaagatgctgctgtctacactccccctgctcttcctctcgaccctatctttggcacaacagaccgctctctcagtcccccaggtgtatctttaccctgctccatctagctcgaaagacactaccgcttcaactccactcactctcaccgacgatcaagcccgatccgtccttgcccatcacctcggagctacaagagggattcacttgccagaaatatgggaagaagttgagggctggagccggatgcttgttggagggatgtttggtggcttggcccatcgggacggtgacgacggtgaaaaggggagggtattgattgttcaaggcgttgaaaaccctcttggttcgtgttcttcctctatatcttcaacttcaagtgcaggctttttttgccatgtgtaaatcgttcaaggtcaatttactaactttatggtgaatactctcttcaaatatcagacatcacttcccaggacccttctttccaattgacctctgactcggcttctcttcgatctctcctcaacccttactttgagaagacgtccgatctcttcaaacacgctagcgaatcaattgagcatgtccacgttcctggattcttactagatttattcgatatcaagcaggatggtatgtccgatctacacatgttgaagagcttacaatctatttaaggaatcgacgttctacaacactaatagaattttcaccacttgatcatctccaacggaaccctatacagaggctactcagactcttcacagagagcttcagatgctttcttcttgggtttttaacgcccttccctcatcacatctgtctgaggagcaagacccatacgatgccatgtcgattggttcgttacagggtgtcaaggcaaattcagaggaatacaagctggcagtgaacgtagtgaagggagcagttgactctgtccgttctttttcacatccttctcgtagtcgagatgtatggctaactgttcttgcttcttttaactgccctcaatcagataacctcgacttctcaacggcctttcatactgatccttactcctccttccgccttggtctcttctgctacttttgataagcgagctcttgctccatccccctcatcaaactcttctttccctggaaataactcttatccggctcccaacctacctgtttactcgacttcattgtgccttgcctcttacgaggcttgtcagaactatacatctagctgtaatggccgaggatcgtgtgtgaaggtgacaagagctggaaagtcttgctacggatgcgcgtgtggcaagtctgaaaacgggactagctacggaggtgtggcttgtgaaaagaaggacatttcctcgtgagtagtttgctttatactgacccagattggatttcgttgttaatcacgattgtttattttcattttgaagaacattcactcttctcctcctcacttccatctttatagttgtcctcatcgctgggtcgattggccttctctccaccgttgggttggatcctttgccgagtgtcttgaccggtggatctatggccggccctaagaggaatgattaagaatgatcaaaagagattttttttgcgtcttgttaagtcgttggccaaaccgagagatcaacttctcatagttcagagacgagctctttcctcatttctcttcttacactattattttacatgtttttttctgcttcgattgttctctttctcctttaatctcaatggcttttagcagatacttgattgaatcttgatacttaaggaaaagttcgaggcttatgattagttgatgcggatcttgttacttgagcgagcaaagaaatattggcaagcgagaggaagctatagatgttacgtacattgaatacaatggtgatgggttttttccttcgcgcgtatgaaatgaaggtcatcttcatcttgacaccttactaacaacctgtctgaaacatggccgctaacttctgggcctcatcccatgcgtgagttcaggaggcttgttctattactcgcacatgggctgaaactttatgtgtttcttcttttcttgatatggatctaggaaacattggttattcgatagggcaacattagatcaagctcgagagattgatcttaagtacgcatcaaagaaacaacttgcttgtctctctatccactttgccaaccgttcgtctacattttccatcttctccttctcgataatatgaacacactctttccagtaaaatgtgacatttcacacactcttctttaattctatttcactctgtttttgaccggggtttacaaatgaaaccaaacagtccttcaacgactagggaaacgcctacagctccggcaaagaccgatagccacttcgatcgtctactttcgtcgtttctatctgaagaatgcatattgtgacacagatccttatcttgtcttagctacgtgttcttatgtagctgcaaaattggaggaaacaccagttcacatcaaaagtgtagtagtcgaggcgaggagcatgttcaacggtttgttcccctcactcctctacttccaacccttgtctcgtcggtcagtttctcccaacaggaacattcattcatcagcgtctctaattcttcttgcgtgacaaaaaaaaacagatctcaagataccgataaagtattttccgtcagacaacgccaaagtagctgagatggagttctacctgcttgaagacttggattttcacttgacagttttccacccttaccgagcgctagctatcatagctggtaaagaaaaatctgacacaggctcattcgatgtgtctgctggacccagtggacagtcggatatagaagttgaaggggtctctcagttgagtagaggcactggaaagggagcattgattgtggagaaagagatctttgaaaatgcctggtgagcttccccattcctgtcttcctcttcctttcccctccttccttctccatctcctctcaatcagatagctctctgactcttttacttcttggcaccgtaacgaaacaggtttatggtgaatgatacctatcgaacagacctatgtttactctacccaccttacatcatcgccatcgcctgcctctacatcgccatgatgcattttcaatcagttaatcccaagaagcctatcgcccaccttcctcaaaatacttctaattatccttctagttcgacctcaacttccaacaacactgctaccatgagtaacacgaccggatcatcaactaacgaatccagaacaaatgggtcgtcgagtagctccttgccatcattatctacttcaggaaaacactctcgtttaccgcctgcacccaagaaccatccacttcccatgaacccgctgctcaatcaatcttcttcctcctcttctacgaccaactacaactcggttgacccaaccggtgtatcgtcaactttatcgacagtagacagacaagacccgacactcgatataataacatacatctctagtataagcgcaaacttttcactggtagctcaagttgttcaggaaatcctctctctatggccactctgggatgcaatggaaggttcgaaggtgtctacgtcttcaggagccggaggcttgatcacggcttcctctgcctccttctctactactgttcccacatccccttcattaaacagcccaacgacattcgctgctgcttcagcttctctagcaacgacaagagatcaaggaaaaccgacgctcaccactactggtcctgggggtgggtcctcttcggggagacaaattgaagaggaacatatacttgaaggtcagatgagcgctctagtcgaaaagatgagaactgaacgtgcaaaagataagtcttcgctagagagtcgatggcctgtcacgggatcaacaacaacaacaacaggcggaggaggtggaacaatgagtgggaaaacagcagtgacagggtcaataggtgtaggtggtcaaggaaacaagcgggtcagagaatgaactcgtttgggttaggagatcattaaactacaatgattgatggagtctccattaagagaattttgagcatttctgctcgattatagcagaatgcaaggactagaaaatacacgtgaaaaaaaagatagacagtcatgataacatacatattcaatacgatctaggttggccgttctatcacaatctgcctttcaactcaactccatatcccaaattcaaacggaagaaaagcaaacaaaaggaaggaaaggatagaaggagaagaagaagaaacgatatagctagtaacaaaagggagcaaatcaagaaacggttgttgagagaacagaacagaacgatgagattacagtatgcttgcagggttcacaggaccctcctgccgagtcaccttttccttctccgtcgattgcatttcatcatctaggcctcgagcataagattgagactgcgaggctagtctgtctgaatcattcgaggcacgaggagcggatggtggtggcggaggtggagatgataaggacgcagtaacggtggcagtggcggcatccccctctatcgcctgtagtaatccattaacgatttcctctacatctccttctccgtttctcacacccgcactagccttgataatctttgcgtacttttccatctctggtccggtcccgagctctgattggagtctaacaaatctggaaaagagctcctttcttcgttttcgtctcatctcaatctcttgattaagcaatgttcgttcgacctcaagtcctgtccctcgatcttctgctgatcctccttcgacgggttctgcgtgaagctcaactaagtcaattgtctcgtccgggttggcggcagagggatttgccaagtatgcgcgctctctcgccagatgagatgatctccaatcattccaaccagccgcatatcttctctccatcctgttctccaactctgcttccaactgtcctaacttttcttttccttctgtcagtctgtcgcccaaggttgactggaggacgccgacttgacgtttagtctcgcctaattcgagattgatactgttcgctagcgaatttgcctgagtgatatcacgttctttcgcttggagctctgcgtcgaatgatttagcgagcgaggcaagaaggagtgagagctcggtcgtcgtttgaccagcgacaagttgggcagtctgtgaatggtaaacctttggtaacaatccggatggatgtactgatgaaactgaatggtgatgcgagtgagattgagagtgattggaagggccagcatgagtagacggattgatgtacccagtataggacatctgaccgctgtacggtccaccaccagatgatgaggatggacctagccggctaccaggctggtaagatccgataacaggagaagatctgaatcgttcatcctcaaggatatagtcttccgctgtcttgccatcacggttggccagctttgggtctgctccgtgatcgagcaggctcttgaccagtcgtttagagcgcgctcgggcagcaagtgttaatgctgtctcgccttcatcatcctggaagttgacaacgtcgccgagttcttttggataatcagcaagcctgccgaggatggtctccatataataccttgccgcgtgagtctttcctttggacagcgcgacgtcagcaatatggtgaaagacggttcgattgttcttatcaatgttcagagttgaccgatggaggagttcgtatagttccggaaactttcggacatcataattgttactgaacatgacacttcgcatgagtgcggtctgttcagagtgattgacccggaagatgtccgccccggctgtcaacaataatttaaccactcgaatccgacccatggcacaggcccagtgaagggcggtatgaccatcatcatctatcggatgatttgggttaaagtccgcaggcgggttcaccaggaatggagggatttgagaagtctctgagataaagtagtccaagatgatatcttcgtatctgtccgctccgaggagctcctgaccagttgcaaacccagacatctcgcttgatggaagcgctcccattgaaagatcctcgcctttaggggttggccgttgccgacggcttgaatgagccggatcgtatccgccacggaactttcgtttcgtgccagaccctccttcacggtaagttccatcgtcgccgtcgtcgtcacttcccaataatgggc

SEQ ID NO: 121 - DNA, 697 bp, Xanthophyllomyces dendrorhous
acttatatctatatatatctatatatatttcatgaaaaattcgcttcttcgttgtcgtcatcatcctttccgagatctccacgacttaacctgactgcgttttgagtatttcgatctctcgtgagactccttctaccaacccagcgatctccagcccgacgagaccaccctggggctttccgaacccgactcttgactctctcagcgcgtccatcagaacggtccgggcgaggacgagtctgtggatgggatctctggggatcgactcgatctttgtctgagccaggtcaaacaggttcttgggcaggaccgaacgggccgcgtcgctagggttcggcgagtgttgagggacaggaagaagcggcggcggcggcggcggcagcagcaggagtttaccgagttccgcccgggcgagcgctcggaccggatggttgtccgggtagatcgacggcaggcccatgcactccgacaccaggagcgcacaccggatcgagtcttccagccggtcagtgtccgtaggatgggcgccgagcgaggtcaccagcagggtgcacacaagtcggacaagagggaacaacgggtacgcccatggtgggtaaaagtaggcgagtgaaccaatgacgctcatcgggcttgctttgcttagtagttgatcaaagtctgtttgaaagagaggttgtgtgtgtgtgtgtgtgtg

SEQ ID NO: 122 - DNA, 1046 bp, Xanthophyllomyces dendrorhous
aagaaaagaaaagtgaaacctgggaaacccacctgttcacccgggacaaggtctctgagggcgacgacgtccatgcaattgccatcggccttggagccgtatccaccgaaaggaaagacgacgacggcgttcggccagcatgagtgattgaagagcgcgaccggtggtgagatcgccacaccgaccggggcgagtgaaggggaagaaagcgtgaaggagtttgtcatgaacgccgcgcatagatcgaggacttctgctacggatgcgaacccgaactgggacatgtctgccggcgggatctcttcgttttccgagctgttggaggagtggagggcatgtccgaggtagacgcctagttggagagcgagttgagcgtagggcgctggcgcgccggtcgagggatctgcgaggggcatggctgatcgttggcaatcgagttgagcgatttgtgtccaccagtagtcgatttctccgcctttggctttggctttggccgaggcttcgatcagtctctttcgtttggcacaaagtcgactcaacgctctaacggcctctcccgggatccatccgtcgtcgtcgtcgtcgtcgtcgtcggtggtgccatggtcgtctttgtcgctgttgcttttgcctttgatgttgtggctgcggaggtggtgtgcatggagagagctcaacgcacgacactccaactgatggtctagccagccggtcgatcgacattcagacgagcagtaacggaccacgcgacacccagtacactctgtgagctcgggagtgtcttttagagggaaggagtttgacggcgtgctccgtcgacgactacggtcttgatggatctcgtgggggttgagaaaacaggccgaacagacggttcggagggaggaggtggatagactggctgcgtagggtgctgtcgagaggatggttgagcctgctttgaaggtgaccggggctgactggacttttttgatccatacggctctgcctttggttgggtgtgttttgatttcgagctgtggagggaggggtggtggtggtggtga

SEQ ID NO: 123 - DNA, 738 bp, Xanthophyllomyces dendrorhous
agccgggtcagagtaggcaagagcagagtgcactgagctgcactgagctgcactgcactacactagaacaggccagaacgagcgatggccttgacggaccgcagagtgtgctccagcggtaggccggagagagtactatggagtgttccacagatcacaccgccaactgtgttacagcgttgatgaaacgagcgacacttgccgagttgtgtgtctctatacgagcccgagcttgactgggggtgtgttggagggcatgaagagagcttcaagagagcatcaaacagcatcaaagagcgctaggaagcacaacagaaggagcgctgtgtgttctgtgtagattgcttgtagtccattttgtagtacactcccaaatgcggtctgtagtgttctttgtggtccactctgtggcactctctctgatgcgctctgatgcgctctgatgcgctctgatgcgctctgtagtatgctctttcttgtactctttcttgtactctctgttgcactctgtgttgagcgttgtaatgcactgtgtagtgcactgtgtagtacattctctattacaactttccattacaaatcctaatacaacttcctaatacaacttcctaatgcagccgtccccagccgcacgcgttcaccagggtgggtgagtcaccggcaaattttccgttcctgagaaacgtattaggaattctgaccggccgtttgtagtgtggtattagggggaatttgtag

SEQ ID NO: 124 - DNA, 819 bp, Xanthophyllomyces dendrorhous
ccgttgtctcgcaccttcgtcgtcggtttcctcgtttgtcgtctcgcctgttgctctttcttcgctcgtccgtcgtcgccccccccggttctctctctctctccctagcctcgaacctcagaaaagaaacacgtcatcgaaaagaaagtaaagaagaagaagaagaagaagaaaaaaagaaagaaaaaaaaatccaaactacatttctctcttctcctcatttccccccccccaaatccatccatccaaaggttttaggctaggtcactgaaaaaaaaaacatacacacatcgtacgtcttctctcgtctctctttctcttagccttccaagacggcgtgtttcctttgcggtgttccggtgtgttgcacaaacacacaccagtccccaccactgtactcgatgggtgagcgtcgaatgtcagtcaaaaggacggctggctggctggttggtttacaagattctctcggaacatccggttgagagagaggagagaatcaaaacgaacatttcccaacacacaaacaatcatcccatcgatgggtctgtccatgggatgtgataaagactctccccctcccccggcttaaggccaacacactcagccccgctcgccaggctcttctgattgattgattgattgattgattgactgcctgcttcccaccgagcggtgttccgttgtcggcagtcttggtgtcttgcgagctttgaattttgtcgattttttttaaatcgtcaaccgaaatctcaccacctttttttattttttttggtgtccttccctcttcttcttctcctcctcctcggctcctctctc

SEQ ID NO: 125 - DNA, 770 bp, Xanthophyllomyces dendrorhous
cgcgaacgccgccaacaacgctcccccctcggcctcgctctacgtcggagagctcgatccctccgtcaccgaggccatgctcttcgagatcttcaacatgatcggccccgtggcttccatccgggtctgcagggatgctgtcaccaggcgatcgttgggttacgcgtacgtcaactacctcaacgccgccgatggtgagcgagcgctcgactcgctcaactactctctcatcaagggtcgagcctgccgaatcatgtggtcccagcgagatcccgtcctccgaaagaccggtcagggaaacatctttatcaagaacctcgacgaggccattgacaacaaggtgggttttctttttttcacttgcctttttcttttctactctcttcaattccatggctatatgcgggcaggcccttttttttttcctcgctcctttcaaaacaaaaaacacacacgctcacctttcgtctttctttcattcccctctacaggccctccacgacacctttgccgcctttggaaacgtcctttcctgcaaggtcgctaccgacgaggccggaaactcccgaggttacggtttcgttcactacgagaccgccgaggccgccaacgacgccatcaaggccgtcaacggtatgcttctcaacgacaagaaggtctttgtcggacaccacgtctccaagaaggagaggcagtccaagctcgacgagcagaaggctcagttcaccaacatctttgtcaagaacattgatcctggtcagttttttttc

SEQ ID NO: 126 - DNA, 744 bp, Xanthophyllomyces dendrorhous
aggacgagttctcggccatgttcgacaagttcggagtcgtcacctccgccgtgctcgccatggaggaggagggcaagacctccaagggtttcggtttcgtcaactacgagtcccacgaggacgcccgaaaggccgtcgacgagctcaacgacaccgaggtcaagggcaagaagatctttgtcgcccgagcccagaaaaagtccgagcgagaggaggagctccgaaggtcctacgaggcctcccgacaggaaaagatggccaagttcgccggtgtcaacttgtacatcaagaacatcgacgacgagtgggacgacgagcgactccgaaccgagtttgagaactttggaaccatcacctcggccaaggtcatgcgagacgaatccggtcgatcccgaggtttcggtttcgtctgcttcaacgcccccgacgaggccaccaaggcggtctctgagatgaacggccgactttcgtccaacaacaagccgctctacgtcgccctcgcccagcgacgggacgtccgacgatcccagctcgagtcccagatctcgatgcgggcgaaccagcgaatgtcgatggtgaaccagatgaacccgatgggtggcttctacgccgccggtatgccccctcccggagcttacccccagcagcgaggaccgatgttccagggcatgcccggtggcgtccgaccccggtacgctcctcctcccggttacccccagggcccctaccccggaggaatggccc

SEQ ID NO: 127 - DNA, 498 bp, Xanthophyllomyces dendrorhous
tggtggctaccgaggcggacccaacaacgtccgaccccgagcacccaacggaccgatgcccggtggaccccagggttcccgagttcccccccgacccgtccagaacggaccccgaccgggtggacccaacgccggcgccctctcctccgccggcctcgcctctgcttcgcctgctgagcagaagcaggccctcggtgaggccctctacccgctcatcgccgccatcaacgagcccttggccggaaagatcaccggtatgctcctcgagatggatgtctatgagcttttgcacttgatcgagacccccgaggctctccacgccaaggtctctgaggccatggccgtcctcgaccagtgggccaacgagtcccaggccgcccctgctcctgccgccgagggtgaggccgctgctgctgctcctgccgctgccgccccggctgccgaggctcctgctgccgagactccttccgcctaaagaaaaagagagagagagagaga

SEQ ID NO: 128 - DNA, 410 bp, Xanthophyllomyces dendrorhous
gagagagagagagagagagacagacggagacggagaggaagtgaaaagagcgagaagggcgaggagtgcgaggggtgctcggttttggtcttttctttactttgacctgaatgtcattctttcctttctttaactcgcttcctttttctttttcttttttctcctttctttgagttcatctctcctttgaaatcttcctctatttctttcttgcccttttttgtttcattcttttctcttcttttctccttttacttcaatcattttatttatgtctttgtttcttttttccaaacccgcaagttgccctcgtcttgctctttgcttccctctctcttcctttcgtcatctcaccttccccgtcatgttgaccttctcttcctcttctatttcgttcccccttccccccc

SEQ ID NO: 129 - DNA, 17237 bp, Xanthophyllomyces dendrorhous
cccccctttctttcatatcctcctttcacaatcttttttctggatgaaaagtctattgtgccccgagatcaagagtcatcgtcatccttctcctctttccggagcgagcgcgaaaagaataccactgctccgcacgtacaaaaatctctcgcttgatctgtgtgtgtgtgtgtgtgtgttcccgggaaaggggggggggaaagaaagaaaatcgacgggaaggaaaatcgtcatagatggtgtaaagacgttcgagcgcacggacgacagagaaagaaagaaaacaagggggaaaaaaagaggccgagtcgattagggatacagttaaagaggaggggggaagaacagaagaagaagaaaaaagtgtatggaaaagaaaagaagacgggaccacagagggaaaaaagaaagaaaaaaaaaggaaagccctagtggtggtcctttctagacagagacgttgattagagatggtcttggtaatattaggatgagacgaaaaattaaaatgatgtgttcatgtatgtataaagttgaatgtcctggggtcaatttcactcagctaaaaaaaattgaaaaaaaaagaaagaagaagaaaaaaaaaacaggacaaatccaaaaactatcagtgactgtcttgacggtcgtgaaaacaaagacatccaacaaaagggaaaagcaagaaagcaattcaaagaaagggagggagacaaactgtttgaaggcgcccatgatggcttgaatgccgctcattcccaatccatgggatgggtaacagatgtacaacttttcttcttccgccccgaacttttctctgaacccggtcttcctgctcaatccgaactggttcaacaaaacggaacagtctattaggtcaggaaaaaatgttgatcgtgctttcatgcagaccgccgacgaaggtcgttactttaaaacaaaaagaaaaacaaaggaactcacactcttggaaacccggctgtatacaccagaaagaatctttgcctggaacttggagatactgttgacagcctctagatggtctgccgcgcccgcgccgaacgtagccgtcttcacaccggccccgctcatcaccttcatcgcttccgtcaacaacaactcggatgtcccgttcggtgctccggggaacatcagggaccacttgatctgcagtccgttctcggcggccagatgatggagcacggtgaaaccgacgacgtgaccttcggcgttccgggcgatcaaatacgttcggtgttctgcatcggtgaacggtcggatctgatgagggcgaaaagcaggagggtcaacacgtcgttccaaacacacacacacacacacacacgccaaaggggatataatctcaacaacaagggggaaaaaatgacgcctgtcgggcttacactagtggtgtggatctgcttgctgctcttcctgttctcctgccatcgggcgattccatcctcaatttcctttcgaagatcagccttgatctcacgctcgatcagttcgaccgtgactcctttgttctgagcttgatggaccttcttctcgatcgctcgtccgtcgtcgctgtcgtcgtcgttggcctggtggttcttcggtcgtccttgtgggctcaccctttgttcgttcgtcaccgccaaagctggaaagtatcaaagaggtgtatgtgtgtgaggagaggaggaaaggcgagataaaagggtgggaggaaacgtcaataaaaggcatcaagaaacgagacgaagcagataaacataccatgccaatgaagaccgttggtgaggatttgctcggttccctcattgcagttcaaccagatcggcttgagcctcctgtgatgcttcaaccaatcagtgtaatctctgatgacatcaggaagcgccgactgtgggcaaagaggagatccccaggtgatggcatggcctacgaagagaaatttaagaaatcagtgattcgttcttacgagatacttccctgaaaggaaaaaatcgatcgtcacctttagagtcggtgaacccgatggcgtaaccgtgtctttcctctcgccagatctcgtacccttcgtctgtccaagcctgaagggtttccaatcaaaaggaatcagcctggagaacccccacttcgggacgagcgaaacaaataagaaacgagcgactcacagtactggtcgagtctccgtattttgcgatcagatcctccaacttggggtgtttctccttcttcatttcatccttcgagagcacgttttggtcgttctcactaccagcaaccttggtgggcacaggcaacgcggcctccgcgacctctgccatctctttcagctgagactttggaggcgccgggaacgaatggggatccctggggaacaaggtggcgtgtctgatgtttccgagtttgaggaacaacatgacaagtcgctcgagaccgattcctccaccggcgtgaggaggcatggctgcctggaaagcctcaagatagtccgacatcgagctctctgcgatatgagccttcttgagtcgttctttcatcacggcggccgaatgaattctctgaccgcccgagatgatttcctccccacggacaaagacgtcgaacgaatttgtgatctctgggttgtcagcatccggcatggtgtaaaatggtctggcggcgaccgggaatttatcgaggatgtagtagtctgggagagcctcatggttacgtcaggacatagtgaaggagatttaaaaggaactgaaagaaaaagaaaagaaaaaaagctctgggacctaccggtattgtacttctctttcactagagctcctagccgaacctctgccctggtggagaggtcgtccatatccggagggtcctcgtcccatccagaatccatcaagagttggacaccctgtttgaatgtgagaacaacggtctcatccgggaagacaaggtcctcggacggatgtttcttccggacgacatcgatctcttttgcacactctttctggacggtacggaagatgtgcttgagcatattgtcgatcatgtgcattgcctcgtgataactcgagtcaattgccatctcaagatcgctgttcgatgtaagaaaattcgaaatctgagtctgatggaagagaaatagatatgaaagagacctaagaaactccgtagactcacactccagtgtattcagtcagatgtcgatgagtgttcgaattttccgctcggaagactttgaacaaagggcaatcatcgagagatcagtcaagcgacacgtaccaaaaggtacacttataagcaaagctcacctggtccgatctcatagaccctctcgagatctgcaccaatacacatctctttcgcgagctgggggctctgtgcgaggaaggcttcacggccaaagtattcaaccttgaacacagacgcgccagactcggtggctccctgttgaagttttgccgagtgaatctctaaaaagtcatgcgagtcaaggctggcaaggaagggcaatatttaaaatgatcagagcagagaacgaagaaggatagccagccaagaacagaccaaaaactactaacaacccacgggccgctcgggtgacggcggcggtgaccctgaagatggcgtgtgcgtctgcagttcgaagggacaccgctcggtgttgaagttggtaaccaaagggaacggtctgatgaggctcattctggtcatcgagatcgacatgatctgcctgtgcggcaccaaaaggaagagtggaagtgacttcagagaggacaaagattttgtagatctcgatctctgcctgatgaacctcggccgacttgacgcctccctgaacctctggcttcttgactttgccttcgacaagaacgattgtttctcgcggcaatttttccacccagcggaccatggtttcggacaccggagggagctcattcgtatcggtcgagatcggttcgagcaagtttttgggagaatgaccgtccgcgttgggaccggtaacggaggatgaggcgttgatggaggatggggcagtgctgacggcggtagaaatggaagagtcggcagaggatgtggcggtcatgggttgggaggcggtaacatcggtaataggtggaccgagatgaagattgttcagatcggtgggcaagtcggcagagtgatcgtgagtggagacatttatcgccctatcgacgctgacggtggcgtcccggctgtccggactgtctaaaacgtgggaagcctgggctgaagaatactgggagtgaagagaaggtgtggaacttgattcctgcgcgatgtgctcggtgctcgtgcctgtgcctatccggacaataccctgcacggtctgcagtctatggcgaaagaccacaaatgctagcttggaccctaagagtgtatatatgtgtgtgcgcgcgcgcgcaaaagagagagagagagggaaaggggaaaaggagaaagataaaaaaaaatcgaagagagagcatcagtcagtggctcaacacgggcacggagtgtacgttccgcttaccgagccgacgggtagagtgaattctcgctcggaacagcacggtatcaccgatagaatcttctgtgatgtgctcaagcggcgttcgctctctgccttcgacatccttggttctgtccttgccagagtgctcgatgtgaccgtacctgcctgcggctggatcgttcttgatggcctgagcaaagttctgtttgagctgttgctccttctgttcgagctcccgcttatgtttttcgtgttgctcctccttctgtttggcttcctccctctggcgcagccttctggcctcttcgtctgagacctgactgctccccggacttggagtgtgaatcttctgatggagtttatgtatgattgatgacatcagaaaagggggaaaaagagaggtatggacgggagaagagagagaagagaagaagggaaggaagagaaaagaggaagaaactgccacgcttaaaaaaggaaaaaacggtggaaaaacggctacgtaatcgaagaggcaaaaggggaagattaaactataacgtcaaaaaacctctaggtggtaaatacaaacactaagctgaccacacaatttaatagggagagtaatacgaaccgactacaaaccggccaagaatgatacatacaagcacttagcccctccggcgaagagggaggatgacgtcagctaggtccgtatgcgactgtggaaccccgcttggggtgataaccgttcctcgacgcgcaattggtacgcgtgcggacgcgttcttgagacgcaacgatccgctcaagcatattcactggggacggaattggaagagtttccccacatggccggctttcttttcctcttccacctcaaccctgaaacacgtgtcgtcatcagtcaacgaatcattttcacgtgtcctcacagcttaatggtcaacacgtgatttgcttatatctagctcgtctttcaaataaccttagacaaccttaaaattgaagactgatgaatttgaacactccctcgagtgtagaaagcagagtagaatatacagtagacacacacacatatacttaccaacccacagcacctatagtcccaccatggccagaaagagaaagaacagaactcatcttaaaggagctgccaaggatgagacgaacgacgttagtgtattcctttgtatccggtctttcgctcttgttcttactttaccttctatgtcccttctctcacacccgtttggatttctttcgaaacagccgaaagcacctaagtcattcgtgattaaagtacgtttggtctcattctcttgaacgtttgattgagccactttcaacatagttaacttttgtgttgtctcccttgcactctcttctccgctccatttgtagtcaggtcatgtaggcacatctgtcgctcagcttgttagagacattcgaaagatcatggagcccaataccgcttccaggctcaaagtttgttatctctactactatgcgttctttctagcgttccacctaaccaccatccctgacttctgtctcgcttctctatattcctataggaacgagcatcggccaggctgagagattatcttactatggcccctgctttgaacgtgacccaccttttggtcctcacgctctccccgcagacagcctctctccacatgagagttgcccgattgccagccggtccaaccctgacctttaaagtagagagatatagtcttatgaagtgagtgccttgtcctcttctcctttgatccctctcagagtctcccgtttcctgggcggaattttttgttgttgtcagcactcgttgttaaatacggtttcctccatctaacatacatcgccctttcctatcaacccctctgtagagatttgtcaaacgcaaagaccaagaatgtaggacacgcgcccagcttgggagagttccgaaccccccctctagtacgtgtattggttatgcttcaatacgtgagttgatcgtgtatgctaatgcaagctatctcacctttctctcatgctagttggtgctcagtaacttcaatcctgctcctggggagaaaccacaaccgcaactgaaactgatgagctcaatgttccagggaatgttccctcccatccagattgacaaagttcgtttgtacccttcatttttcgctcgatcattctatacccagatcctgtaatgaacccatcacgtctatctttatggtttccttcagtccgctttgccctcattccggcgagtgctcttgatatcctaccatgcgccgacccatctgatctctatcagacattatatcatctccattcgaccgactggtgtgtccagacggctccgacggacgctcgaatcatctaccaaccctcagtcgttctcccgaccggttgacctgtcgaacgacaatgatatctccgactatctccttcgagctcaacaggatggatacgaaaccggatcagaaacagaaggtgagagcgagggtgaaggaagcgagggcgagaacggaatgaagtcaggtagggtagagcttccggccgactatgtcggtagaggaaacaaaaagggaactaacaaggccgtcaggttggtcgaggtcggacctagaatggagtgcaagcttgtcaaggttgtagaaggcatcgttggtagtcttcgaggagagggtgagaccgtgttccacgaattcggtgagtgtttctcttctttttctgttcctctttgtcttcctcttaccttcatactcatacttctcttgttctttccttcaccgcgccactcttctcagtccataaaacggcggctgagagatcagaactcaagacatctcacgcgcaacgccagaaagaaaaggcggcccgtcgttcagaacaagctgcgaacgtggccagaaagaaagaagcggccgagaaagcggccgctgccaagacttccaaacgtggtaaacgacccgatgccgctgatgctaatccggccgatggggaggaaagtgaagacgagttagtccacgattactccggtgaagacgagtttgagttcgaagaccgactcgccgctaaggctactaagaagtcttcccgatcgaccgaggctggacagcccgaagacgaagatgtcatggaggaaagtgatgccgaagacgaggttagagtgggaggtgatgaaccattggatttcgatgaggaggacgaagcgggtgatgtcagttcctccgaggatgaagcccccggtggagaggacggcgagtcgagtgagagcgatgatgaggttgatagaccggcggcggtcaagcagaggttcatcaagaaacctagggtcgttagcgcagggaagacaaaaggtcggattggaaagtgagaatatatcatgtaacaccagaagacaaataaataagatcccaccggaagataaaagatctcatatacatatatatatatcaatcatcttcttacatcacaatcaaacatatgaacacctcaactgaacggatcaaactcatcggccacagctttcagattccccacgcgaccgtccaaaccagtcgacgatgaatgagagctcgacttcatggttggctgtaagactcctccggaagcataacccggtggaagactcggttggtatgtaggtgtgcgcgtgtttgacgtgaaagaagatacagctggagagttcacagaaagatcgtacatcgtttttggacgttggttgtaactttgtgtcggatgggaattcataggaggcgtaggaaacgagaggttgttcagagtgtttggattaggacttggaatagttgacgatgatagtgcagaagcaggggcagatgcagtagcgggggcgatcggttttggcatgaatagagaggggttgatagtattgaagggcaacggcctagccccaaggcctcctccactcttcgtccgactattcgatccaactagaatttgagaaactggttgggcaacagccatcgtagttgccatcggactcgacgcaacgccggtcgggacggaatcccacgagtcatcaccccatggatcaaccgaaccagattcttcaaccgggcggccggtggatctcttcgaggccccaccgacaagcgactcgaacgtgacctcgcctgtggacccagaacgaccgttgagagcgtcggtaaaggaagatccactagtagtttgactctgaatccgttggttctcccgaaggtgttgagcttgttccgtttcaattcgatttcctagagttttgatgctttatttgtgaccgaaacttatgatatcaggctagatttatacaaagaatctatgcaatgaaatgactcacgtcgacataaaccgattaaactgttccagattcaacactatcaagagagaaataaacggtgaatcactcgatccgaaggataatctgaaaatttggtcggactcgcgcgatctttactcacaaggacccatggagaacgtccaaagctggggcaatacaagagtagccaccgcttcccggtccactttggcacccattctctcgtgtacatctgaggcgaatttccgttatacatgtcagcacaaatcgaaatggatcgatagttcgcttgtgttatcaaaagaacaggctactcactcaaagtcgccatctgtacaatcaaataagaggccattcagcatgtgttacacaaacataccaaagagagagggacgaaccataacatccggttccttggtcttgatttttgctagcaggggtactagtttcgaggtgagagtcatctgttacacgatgcgatacatgagctatttgcgcagaggaaataatttagaacaacatgatcagaaagaaacttactttatccaacacatttatcatagcaaggaaacactcgagtgtcttgacttttactgtgaacgaaaaaagaatgacgtttgtgtgtataacatagtctcacagaacttcggaatggtttgtcaaacttaccactcaatacccttgtttttgtaaataaaatctaccattttattcacaccgggaggaaaagggtcaacgaaagataccggtatgcaaatgagagatctcaacaagatgtgtactcaccgccactctcacaaacagtacgtcttgcacgcttcccacatccagtacatctagtagattgggaatcgctgcgagagccttttcttgaacctgtccgtcatctcagacatcacactatcagctcgggcgtcactgaaaaacaagaacaaagaagaaaaatctacctcgggatgttccgaatcaagagaattgtaaattaatggcatgatatctagagtgcattgtgagatggctcagctattgtgaaaagagagtggcagaaaagacaacaacaacaacaacaacaacaaaaaagctgacgtactttcccgaaagactctcgggtttgttttctccatgaacagaggcagactattcaacagagctacatgtacatggtcacaaggatcgatggttacgacattattagccatagaagcgagaaatgtatagagtgattgaacgtactgagcatattctgcggagggtctgtcaagctgaatagcggcttgagagcagccaacgtgatagcattgaactcttctaacgattgagatttagagatctcgaaaacatttggcaagatgaacggtagcaaccatgcatctttcatctatggccaaattcgcgatcaggtaagctcaagtatctggcatagcctgaagcaaaaaaaaagaaacaaacctcttcgagtagacttggcagaatcttcctcttacgcaatctttcagagaaggttggaagaacgttaagcaacccccttaggaaagttgctttctcttctttaggttttgaactaaatgttgatcgatccaagaagaggagggtagagatggccatgttggaaaaaaagggatggcttgggagggtcaaggcagtcagccgattttggggataccgagttatgaggtttgacaagatgtctacacagaaagaagatcagaagcagatctgtaacaacgcatgagacatatacacaagcgaaagaaacacaacccatacctttgagatcattgctcagcctgccccaagcggcaggatttccaattgcccctcggccgagctgattgacgttttgtctcaaattggtcaacgcgtttctattttggaagggaggccttccacctaggtgaacagcgtagatgacacagcccagagaatacagatcggacgacgtgcagagttgctcatctagcgcgtactccggtgcttgataggtgtaatacgactcaacattgtgaattaacaaaagttccggaaattaaaatgaagaaaaacaggtggattactcacccatgtagtcccattttcgttgaaggctctctggcattcgactatcccattccggaaaaacccatctacctccagatcctccttcgtccgaaagcgtggtagtaagaccaagcgcacctagcttccaatctcctttcaaatttatcagaactgcttcaggcgagatattttggtgaatgattttagcttgggtgtgtaggaaagagaggccgtgagtgatttgaaggattcccttctgaatctaaataacgaggtgaaagcgagtttgaggacttgcgcacaccactttatgtcgtcaagttcgatgcaaaagacatacctctacttcatccaagtcaactccttctaatacaccgccaggcctggccgagcttaaagtgctagctaaagatgacagtataagctcggtagcgaacataagctctgatctggactcctccataggttccaccgtttcgagtatcgaaggatgtctaagtctagataaagacgttgcctaaatgtatagaggggacgtcaaacaggaagattccaagagttcgacaaaagatgagtaactcatagttaatctcacctcttttttgaggacttctagcgcctggtcttttgctggtcctcggagactgtcgaggacatttttgttcaagatccaaacagagacaacctgacgatcgatacagatcctgaccgtaagccaagacgttttccgatcagagagtttaagagaacaaaccttctgagtggtcttgttggtagctcggacgatcttccaaaggccgacgtagaatggcttgtcgtctgattgattggaggatgcaccaaaagcgggtgatgctgatgctgactgttggctatgaatctgatagttagcagaaattgaggacctgttgaacagtgaggaagcaaccgcaagcatggctgtcaggtcctactggataagcagaaggagagggtaaggattgaaaaagcgagagatcgagaatgtatgctgtagtggattggatgttgatgccaaactcgggatgccggtcgataaggttagggttatttcaaggtcagagatggggaaatttcgttatatcgacgaggtgttcaatacccaacaattactctcggaatgcctttcagtacaacagaaatgtcaaatgaaacacatcggaagcgacagatgaagaatcaagaatcgtcaactcatcctcaagaatgatagagtgttagcctgtagataggcgtcatacttcatgtcgccggtctcatatttattggataggtgcgggctctgcaagtcctgtccataacacatgtttcgaaggtagggttacgattacggttacggttatccgcatagccataactacacaagacctgttagatgaagctcaagctgtggaaatgatttctcccgaagagcatgcatcacacaagacaagaaaaagccatacttgaacgctcccgaagcagggagaaccaagagactgtctgattcggtatacgtgtttgttcatcagctgttctcctaacagacaaggctgagtacaaacggacaaagttgaatacaagcggatatgattaacactccttgggtttagaagatagctaacgttccgcaacaaatatcgtcggtgatcactgatagttgagagcgtcggcgagattcaatgtcaatcagtcaagatggtatttcttctccactaaccggagagcaatgatggggtttctttgttctcatgaggttcttcaagtgaagaatgacgaatagactaaaatgataacgtcctcccaaggtcaagtccgaagaaggtgagagattgaacgaaatccgtctggtcgctgacgtgctttgacttttctagtttctcatctctccggttttctcattcttccgctctgcattcttcacttgaccttctcgctgcttattttatcaatccaagctctatcagcccggatattgcacaataattcaaggatgcctatttaccggtcttcccagatagaacgacttatgtcctaatccttgtccagtgaactttcgcacatcggcattttataatctcttctatcctctctatttcttctccactttctctccctctacttatccatcctttgagaattgaatgatggtgcaataccgcacgatactgagcacttcaaatccatttcccttctaccatcttttttttcccaagcattattcttgtcggcatatgtcgttttttcgaacatttttcgtaacgtggtcttcagaaagctgtatatatacccaaccatctctcatgtgttcttgatcaagaagagaactcaccaatctcgaaacttgcttcagtatccttcagcgccaatgtctgctcctcatcaccactctccgattgctgagcctcaacctgttccctccgcccgttccaattcggtcacatctaccatctcggcagaggacaagaagctgtatgatgataaagtgatcgatcaggtcgtgctcgcctccgacataccgcctttggctgaccgagcgtccattgatggaaacgccactattggctcaaagatattgatcgctctcagactaaagaaacgtcctgccgtccatggcctcgactcgatcgccacccagccatcagtgtacgatactgctcaagccgaattctataaacctagaagcgactgggaggttcgtgcaatgatcttgatttaactgagtattctagtttcccttgcccactttgctcatgccttgccatcttacccctcgccattgacactgcagaacatctcattcttcgatccgttattccgctggacctggagagaagaaaaaacggcagtgaggaagatcgatctcaagatcatggcctgggtgctggtcatgtttctggctctagatatcgacagatcaaacatctccactgccactgccgataatctgctggatgatctaaatctgacacaaggagactacaacctgggaactactcttgccagactcgggttcttattggccgagcttccgtcccaactgatctctaaaaggttcgtttttctaccctcatggcctttaatgtccctagcgctatactaaaatcataactcatctattttctttcgcatcaaagacttggtcctgatcgttggatccctattcaaattgtcattttctcgttgatatctggtgctcaattcttcatgaaaggccgatcaagcttcctcgctatcagattcttgatgtaagccaattaaaagttgtcaatttccttcaattttatcgcttttccagagggctgaccatattctattttatttacgccagtgccgccttccagggtggatttattcccgatatcattctgtatttgtcttacttttacacaaaaaatgagcttcccgtcaggctctctttcttctggtccataaattatgtcgccgacatgcttgttggatttctggccgtggggcttttgcaaatgagaggagttttaggctacgctggttggagatgggtaagcccacttttctcaattcgtaacatatcttgaaaatcgctgatctgaatactttgccttgttcacttcagatgttccttatcgagggcctctttacctttgtaattggaattgcctccttctggctgatgccaagtgaccctgttgcttcttcagtatctaggaagtggaggcccaatggatatttgaccaaaaacgaggcgaaaatcatcgtgaacaggtctgttagagacgaccatgccaaagttcgtcccgtaattctattcatatgtactctatcttttgacctggcttataatcgtttttcatccatatctctagggaggaatgcacaaccgacagcccctcaccttgtcaatgatcaagcgatccctctttgattacgacctgtacccgctgtatttcattgggttgacattcggcattgctgcagtacctgtcaagcaatacctccaactatctttcaagacacttggattcagcacgatcaacgctaacttgctttcgatcccaaacaccgtcatctcaatcatcaatgtaagtcgaatggttgttgtttatcctgtcctcgatggttgctgagctcaactttgttatgtcgtccatacagttgctcgcaatcactgccatctcggagctcgtagacaaccgatctttcgtgtctatggctgaaaacttgtggatgcttcccttattcattgccttgtgagtctggtccttctatgctcttattctcttcgaccacgttcactcaatatcatctgttacctatctgcttgatcagagatgcactcccatcgataggtgcttggcagtactttgccatcgccactgtgttgctcgggtttccttacgttcatgctatccaagtttcgtggtgtagtcgaaattctggaagtgtgcgaacgcgaacggtgtctgcttcagtttacaacatggcaggtaagtcagacggccctatcagccaaagtcgtatccgaagaatcgtcttgctgaccaagtctccttcaatttgtcctccaacaacagtccaactctcgtcgattattggagcgaacgtataccaagcctcagacaaaccccggtatcacaaggccaacaggtggctcattggaattctgtgctttaatctggtaagtgaaatcatttctcatctactgtgtttgatggtacctacaatactggctgatcaatcatgcttccgtggtcaattggtttgcattgggcacctagataattgtgtatcccggcacatacttctactacggatggagaaatgcttcaaagaacaaaatctgggacgctatgacgtcggaagagaagtcggaatacttggccactactaccgacgagggaaacaaacggttcgtcatacagttcccttcttttcccttgctctctggactgactttgactaacccatttgatgctctgatctctttgtgttgctccagactcgactttcaattctctagatagattatctctattcctacatcatctttctgctatatctttaatcgttgttctgtcatctattgaatcggtttacagttgtatattaccgtatattgccatacaaaaaagattgtatgtctttggctcctgaaaagtgacatcaaccgatgatggttgatacatggcccttccggacttaagtgccttcaaaccacccagattccacgagccatgtgtttggtttatgccagcttcagcctcaacagtcatggcagtctcaacgttagcctcatgagcgacagcctaaaaatctcagattcttgccacctggattttctcttgatgaagggctaggtgcagcatgttgcgcgatgcgttccaatgtctgttccactaatcttgagagagagcagagaaaacaataagcaattgaaacactatcctgagacacgcgatacacgtcacttactcgacagacgcttcgacactccatgtgcgtccacgctttgctcctctctgagaactcgccatagcacttggagcacaccctcgacgtccgatgctcccagactttacggacctggagcagtgcaggagcatccagcttggcaaacagcatcttgacaggaccaggagcatgcccacgagaggccaatgggaaggcgccgtccccgaaggctagagaaatacgtagatgtccttccagcagacagaccggcagcttgtagtatgcttgctcgcggctgatatgcgcgctccagcgaagacacctccaccatcggacggcgaagaacgtcgcgagtcatgagtggaaccgagaatgcgaggcgagagtagcgcagagaccatcgagcctggatgttctgaacgaaggaagacctgacagaaggaagcaaaacaagaaaaccaaggtgagtagagcagttcacaaatccggcaaggcaatttgtacagtcggcatgagcgtgagcgtgagcggcacttatcacggagagctgttaacacttccgcgttgcttttcatccacagccgctttttctgacggtctcggtccatgcccacaaggcacttccatgatttgagagagagcgaccactgcgtgccgtgctcagccagaccgccgttgtccagagacatgtcgggccctcctgcggtcgtcgagagcagcgtccgacgaccagagtcgtgagtcacggccttgtcctctggccgcacaccctaccgaacgcaccctgctcgctgtcaacctttgtcttcgcccttctatctccacccttagtcgtccccttcaactggtgtcgacgtcggtctcagcactctggtagacgcccagacaccccgatgccgtccgtactgagtgaccggacgaatgactagacgagcgaccgggcgaaccgtcggtgttgggtctcgactctggatatac

SEQ ID NO: 130 - DNA, 17427 bp, Xanthophyllomyces dendrorhous
agcttggcagatcggagcgggtgaaccgatgagatagatctatctggacaagatggcatgcgacaacctgggtcaacctgacgtcatctagtccaaggtgatccaccggtcggtcagtcaggtattgcatgttgcatggtgtcgaacctccaagatgggttcctttcatataccgataagctgctgtgaacagtcgttcgttatgacactgataggtggatcatgagtcgctccgaactactttggccgccgaactgttcgaaggaaacggcgtaacttgcggtcatggctcgggcgcacatcggcgtagtcatctggatcttctcgttgataggaaagtccgtagtgaactcacgagtctcgctcgaccacatctacaagtaaccgatttccgacgacttccatgacatcctcccgccgtcatcgtcgtcgtcgtcttcatcgccatttgcagactgactaagatcacgtacttcatgccgtatttgaccaatgacagtggtagagactttgccagatctgtgcgagactggcatccatagacttcacggcttgctaatgggctttgctctcgcaggggtacgctggtcgtaccaatgttccggtgagacgtctgcttgcaatttgacagcaataataacctggctaccgcattctggcttacaatcggacagattgaccggaggctctgacccacatcgaaacagtacactcggatgttctcggactgcttatagactggctggtcgtagatgctgacacctgcaaggttcataaaggcaacgtcaataagtacagcgtcatgagtgtggggtggttgaggtcaacttctagagaacccatctttctttgatccgatgcctgccagcttctttccgactccagtgagccccaacgatgatcatccccaacggacactcgagacttttggcaatcatgagacgggtgtgagtgaactatgggctataaagctgcaccagttttgtgctgtcctcattctaagtttctttttcgcttcttgctgatcttctttccccaccctaaatgagactcgacttgagagaaatgctttactctgccgtcgttcctgccctctgggcctccctttctctggcctattctgtggacgcggctcctttgacggcccatcagaccagcacgtccgatcctgccgctgtgttcaacacgacgatgtttgctcccggtcgtgagccaggtgtctactcgtccaacttttcccgcttggtcatgttcggggattcactcagtgacaacggaaacggcaccggtgtgctctcgaatggcacgagaccaaaccccgacgtaagaaactccctgtttaattgatgagagacgtggtaatcgacaccagcaccctgacatccgtgcacacttgtctgaacagcttttctggagataccgctggtcgaacggaccggtctggatcgaagatctggctgaacgtatgtcggcttcgttttgtagtcaatggttggtgtgaagtcttctgatctgtttctcatctatgaccatttccagggatggacgtcccgttgtttgactatggtctgtccacgcaggttctgatatgtgtgctctggccgagcgtggtttcctgatctgacgaggtgtgatcatatttctctacatcggcgtcgtcctctagctagcggaggggctaccgtcaacaatactcggacgcctgcttatcttaccaatgtcaccggtcgtgttccgtcggccctcgagcagatcgatacgttcatcagcttgacaaactcgtcgtccggtcgcaacacccttgacgacacgctgtttgccatctggatcggatcgaacgacctgttcgccaagatcgaaagcaacatctcgttcacaggggctgatctcatccgggataccttcatcggtatcgagaagctgcaagctgccggtaagttctggcatgttctcatcgtgctcttctatcattcattctactgtgcttctcgttctcggctggccggctgcttgcatcggctgtggagcgacgtcaccacctggatgggacctgaagactgactagatatgactgtttcaggtgccaaatactttgtcatcaacaacatctacgacatcggccgccctttcatcgatctcatgggatcagaaatcgcgtctgtgatgacgaacagcctgatcgactacaacaacgctcttgactctgaggtcaattcccaggcatcagccgtccagaacgcgacgttgcccactgctgagttcgtcgtggtcgacacatgggtggctgcgaaggccatcctcagccagcctcaggcttacgggctggcgaacgagacgatcggccggaggtgtgtcatcggctcgagcatatgttccgacccggactcatacttctactgggatgcggtgcgtcttttcgttgctttgtatatgtttactgatggtcgatgatcattcgaactaagcatggctttctgtgtatctcttgagttcagatccatcctacgcgggtggtgcattccctgtttgctaaagccgtagccgctactctcctcagagcaggttggatctctcgaaaatgagtgatgcacaaacgctactcctatgagtatcccatccatcgagaagggatttgtttctttctcatgagccagctctgggtagtcctgctccagaatcggccgctgccgttctcacactgagatgtgaaggcttttcttcctttcttcctttttactttctttctcttgtaccacttctctcctagattagttaagtcaggattaagcaacataaggtacattagttcgaaactgtcatgactttgttgattgtggccaacttctctcctttctgtattcatcacttgattcttgttctttgggcgagcgtcgtccgccatcagtgtctactgattttcctacatggtaacataaagccaacaccctcatccgctgaccctgcgctacccacatctgacacccttgttctcccttccacttttgtcgcacttatgcctatttttgtcggatcactactcatgttcatttagtacgatggccgcgccggtagagtagcggagctgtgtgctcatgggtgtttgtgcttttatcacccgttgtgtctgaagcatatgctttcacttcctaccttcttttccttgtcgcctcttgttccgccatagctcaagatcctgatgcggatgaggaaaactcggagagtatgggagtaacaagtgcgcttcgatatttttctgatgatcttctatatgtatttcttgagcttagacctcttcaatcatcatagttgcacatcagaaaccttttaatgttactttccctctcatttctaacaatctctgatcgcatatacgtccatatagctgccaggcatgtactttgtacgaagcagaatatcgacgaaatcaacattttgatcatattggttgttagtgcggattatttgtcttgattgaaaattccccaatcccctctatacacattttttcagttctctttccctttttcctgtcctttgcttgtcaataccttctctcttggttttttttttaatttcatttgctttctacctcctccttccattccctcattttcctttctccttcctctcctttctcatttctgaatgtatcctctccgctttatttcatgatgctcaaactgagtcgtcctccattttgaaatcctttctttttcgatcatattcttgataaaatagcaaattggagctggcaggattcaatctgcgctccctgaactacgtagggccgctcttcccactgagctacaaccctgacgttaaagtgaagaatgcccacattctacaatttctccacctctgtctccgatgatccttttccttttcctttcatcatctcttcataagatcaaaacttcggctatgtacatatgtatagatattgtatcctgtcacctgaatgtagaagtataggatgtagtattggcagaagcccattctgctcagaacaactaagagagaggataggatcaataagagtagacaaaagccttgatcatgtgtcaaagagtgtctgtactataatccgaaggcttcgttttcgaattcatggtcagagatgttgatcaaaaggattgatttgacaaagaggattgagcgcaagacggatcaggataaatagtgagaatgagaaaaagactctcagcaatcaagtcaagcttcacaagggcttgatatgacttgatcgtattcatattgatctcatcattatactaaatagacaccgaaatctggccgtgcttgatctgaatagttgccatcgtctcaggagaccatgcgaagatgtccattaaaaagagaagcggctggaagacggtatgcgatttggaatagtatctaatgagtacaatctgaatttaaggagaatgacagaggctacgatactggacattcagcaaagcgagcctgaagaatattgaaagcaggttgtagaagatgacgagcttgaacatggtgaatatgaccggctagataagagaaagattacttgactcagacgataaatgacatgtagaacgaacggcgagacggattgatctgtgaaagaaatcagtgcgttggtagatgcccaaggcaaccataagaaaaggaaggggtgggccgatactgtcagtaaaacctcatgtgtcaacgtcatgtggtgccttgatactaagcaagtagccatgaccgttgtcgagcaatcgtagtgatattgacgagtcaaatagtgaagctattgaaaaactctcgcagtcttccttcttcagtacgaactctttttgttgctgctatataatatcgaggcaggcgcaaatcaaggtcgcgattttcaattgtggacaacgcttgatagatgatgatgtacaagtccgtctatcggtggctttttttgtatcagctttagcatgctcgacagagatagaccgagttgaaacgagccaagagatgttccgaagccatctgtggactgtcatatttatatagaaagcggggagtccgaaatcaggatcacagacatcgcctgatatatcaacctcgcataagaaagaaatcactatgatcatggtattcattcgtgtttcctgttcatttacaggacgcgtccttgacttggaaacaatgcttgcgacgaattagtcctgcatcgaacttttgtgatacatcgcaggtgtttctagacagcatcttcggcccgagaaacatgaaacatacgaacatgcattggcaatgagaggtaagaggtgcatcgacctcgatgaactgtatgagttgtgtatcgtcagatatgcgtccatcaatcgaagcgctcatccattagatgccggtcacaactctgattagttgggcggatgtcagcgcacagataacatttttgtacctcacatgagtgagcgaacagcgaatttggggaactgttcaagttgatatatatggaagagtcatcgagatacagcgccaatatacttcatgcttgattgtatatttctcaacctgggtccaataataagacaaaaaaacgttcctatataagatgcgataaggtagttcagaggatcaggaacatgacgaaaaaaataacctattgtatatatatgcgtttgtgaaatctgtttgaactacaaacaaaacgatcaaaaagcatgcaatgatactcttaacactagttccatgactaccgaataccagactcatgtcagaaatgatacatctaaacagcgaacgatgagaattttgaagtatactctgaactctcactgttgagatgcttatgaaccgccgatttcggcttttgagagatcttatgatttgataagctaccgccttcaagttgagaccgtctcgcaaggcaacacaccgcgcgtccgccagtcacactgacatatccctccaaccccctctacgttctcctctttgcctgacatgaagtggtttgacagtgccaaaaaatccagcagtgaatctacaagcctcgtcgactgcattcgccaatcagtcataggtgagggcaacatcttcgatggtcctttcggtcctaggcgcatcacctacgcagactacgctgcgtcaggtcgaagcttgtcgttcattgaagatgtcattcgtctcgaggtgttgccattatatgccaacacgcataccgaggcttcccagactggccgtcagacatctcgtcttcgcgaaaacgcaagagatatcattcagcaagcggtaggcgcaggagtcgaagatgtggtgatttttgggggatcaggatctacctttgcagttaacaggatggtggatatactggacctcaaaaatggggataacgtatcggacgccaggaccgtcgtctttatcggtccgtatgagcatcattccaacattcttccatggcgagaagcgaaggcagatgtcgtagtcatccaagcgagcagctcgggacatatcgatcaagtcgaacttgcagctgaacttgatcgatataaagaccgccctatcaaaattggcagtttctcggcgggttccaatgttacaggaattttgactgatgtggacgctatcagttccctccttcatcaacactctgctctcgctttatgggattatgccgccgccgctccacacgtcagtatcaatatgaatcctgatggcaagcaaggcccgcgaaacaaggacggtgtttttatctcgcctcacaagtttgttggcggtccaggtacgcccggcattctagtcatcaagcgacatcttttgaacaataggaagccaactcagccgggcggtggaactgtagcatttgtctccaaacactcgcagcgatacgagaagaatccggtgcatagggaggagggaggaacaccggatatcattggatctatacgcgcggggttggtatttagaatcaagcaagagataggagtggattatatcgagaggcaagaacagctttacaaccaattggcaatagctcaatggagccgaaatccttctatcgagatacttggtaatatcaatgcccctcgtctctctataatcagctttgttgtcaagcatgcggagggagcgctacattacaactttctggtcgcccttctgaacgatctcttcggcatacaagctcgaggcggctgctcctgcgccggactatacggcgcagatctgcttaatatcggcgacgagcgattacacaggctggactcagtcatctcgcaggggtatatcggcctcaagccaggatggacgcgtatcagtttcaattactccatggcactgccgtctattcgcttcatcatcgatgctgtcgactttgtcgccacgcatggtggggcgtttctgaatcaatataccctgaatgtgtttactgggttatggacgcatcgcaacaaccgcccagtgaagttactaccatccgtgacctctatgctagcgacccgacgaccgactcctaatgttggagaggagacatttccggtctatctcaagagggcacaaatgctcgcttttaatgcctcatgtccatcagatgctgcgacatcaactctgccagaacatgtcgaggcgatgcgatggtttcctctcgttactgatgagaagtagtatggctttcaatgtattatcttaaacatgtatgatatggaccggcatcgtgagtccttgttaaagtgtgcttttcattcttggtcacagtcagaaatgcttccagcttgtgattctggcgatgatgagtacccaaatctctccaagaagaaagagtagaaaaaggcaagtaaaaatggattcggaacggatcatggaagcctttttaagtcttataaagatatcaggttgcatacatacatctacacgatagcagagtttgtctcggcgtgacttccgtgagcttcagtagatgctatagtaacaacgataaatgtgtcgttcaatctctaccaccctcaaagagactgttgggtggcttgagcggaatgagcaattttttaacggcacggcttatgtgtagatcctcatacgacggtgatacaaacatcgacatctagtgagaatcttagaggaattaaacaaagagcttgcaatatcaactatacataacctcaaaagtatatctggtctatctccgggcaaccagcgggagttgattatatagcgcattggtatacagctgagcagtgatgaggaaaaatcttgacagaagttgaaggatgaccaacagccaaacccgatactgtaccaaaagatcaattggcttatctttactgcgataagtttcgtagcctcaaagcaaattcaagtcgctggagaacttccaggcgaacgcttagccatgaagaacaacgttgacaagaaataatgggcaaagcgataacaattcgaagaattcgctatcctcctcactgtcatcctctacttccccctctactccttcctcattcatcttggttgtcgccggcgatttatgctttgtctgacttggcaagtgtctgggattaaaccgggtgggttataccaaacatcagtagatacattcctgactgcacaaatttctcgtctagcccctctcaatattcatatgcactctacctgtcttatctttatgcctgagcaacgaaaagatgcaggcgctttggcgcttgtcctttcttcgaaattctctctttgtcttcctttctcttcattcctcaattcggatttggtccagacagatgaacgagacatctatatatacatatggttatgacaagagtttatttctcttttccatttgagcagatgctacatggacagaaaaagaagagaaccaaccgcaccgattagacctatctgattttaaggatgtaatccgtaacacgagcccacccccagcagcagtagtattggcatagcaatcatatagagatgtgaaaagatactttgacacctagcttgatacctactgtttcaaacaaacatataggtcatcctgattgaccttcttatgtcctcccatcttcgacagaacacccagtgccatcaacagcagttccgccctcttcctctctgagttccataactatatctctcttacccctgcctctccagatctctagagcgatctggttatccttctgattacaccaatcgagaacaccggctgcacaagcgataccagtactcatcgcgacagtgacgtgggccatcatcacgcctgtatcgccacaagcgaagacgccaggcatactcgtactgttgaaaggcggagtcgcggtgaggtagctcccgaaaggtgagttcgatgtctcaagctccaactggctaatcaaatccggaaccgagggctcagtaggaggtttatgggcaatccaccctaaatggatagacgacgttggattaggggttttgctagcacaaatgtcgttagcaagatgtatatgcacaccctccttgctgtctggaactagtttcaatactttgcgttggtcgacggttatgccgtaggcggcacaaatctcgagggcacttgcatggctgggttcatcagaagggctgagaggaccgttggtgaagaatgtcacttttgactttgggggtgacgttccacttccctttccggatggaggtatgacacgcgctctgtctggtggaagagagatgaagtgcgccgtggtgagtagcttgatcgtcatgggattgaagaccgggtatgctaagactcctgatggaagatgagatcgctcgtgaccgtcacaaaagaggcactggtagctgtaaagaaaaggtacaggtcattttctcaatttctttatcaaaagattgaacaagaggaaaggcaggcaaagaaaaacacaaacatgttttccccccaattatctgcgtatcctgcgagatctgggaagatatcgcggcatccggtggcaaaaaccaaagtgcgtcctctccaccgtcgtcctcccttgtcagcatcctcctcgacaacaaactcataattatctccagcctccttcttcaccttcgtgatcttgccctcgataaagtcggtatttccgtaacgctcgatctgctcgcgaccaatccttcgaatctcttccggatcggtgtgatcgcgagtcaaaattgcatgagcagcgtggctccgtgcgttgcggtattgcgagtttgagattacagcacaagtccggtgaactcaagcaaggccaagagcagtgctgagtcctgcggggccagagccgaggatgatagcatcgtatattttggaggctgtcatttccaagatggagagtgtctgaaggcaaggagcactatgtttgtatccgttgaaatctgtttcgaagtaacttggctaatagcgagaactatctggttttatgctgcctgagaaagcctatcggtggtaaacttcaaaagtgaggtagaacggaattgcgcgacgtcagtgtcatgtcaggaggtctattctgaggtcggcacagtcgttagtcacttggcgcagagactaacatcatgactgttacaaaccgaaattcgggacgatgagggcgtcagcttcgagtgtgaaggagagctgagaaagagagatgaagataggagagaactaagaatgcgattcgagtgatttatcgaacaagctagaggagaggaaggcgatggccaaaagagctcagacgaaatatagtgaataaacacatgaccttgactgagtagaccgtgtaaggggcggaggctgggttggtaacaaggttgcaaagtagtaaccacacaagacttttagatttcaagggaggagttcaagctctcgagacttggaaacaggattgatagggtcactaggaccaggacaagagagcaaggataaggacaaggataagaataagggaaggagtggaatcaacaaaaaattcaagactggggttttatctacaagtggtcagaagcctgtcttgcacctatttttcagaccctacaaacagtatgaaaggacgcgctggcattactgtgctctggcagtacaatgcgctagaattaggagcgggagaagtagtggaagtgaaggtgtagattatatgggttacggcttatcaatcaggcggaactcaggttacattcctgacagaccgacacacgcatgagactgtcctgaacccttgtcagaaatgtgacccgagtgtcacacccaggtaaccttcttctacttctgtttcttctcctgcctcgttattcctcatgatctctcattgcaacaacacgcaggtatatagtctggtagcgtaggtgcttctagcacttcctatgatatgttctcttacgcataatcgttggagtctgaggatgatatataagacgtgattcctttaccaccgatagtgtagtttctgaagcctgaatcctttgtcactctttggttccctagtactcttgttcccagtgtcatatcaatcttgtccttccaacctctctaccttgcgccctcgtcacagtcatcaagtcagagagcctgaacttccctcctgccggccacattgccgtctggttagacccctcgtaacctctccgttactctctaaacccggatcccgacatccttgacacaaggcttctaggtcacggggatcatgagacgcttattggaactagtcgctatcgagggaagttcttgcgcgagaattcagagttgcaggtctggaggaaacaaggacaacatttattggacagaaaggacagcttgtaaaaggtagtcaacaaacaaataccaatttgaagacccgcatcaaaagaaatgcgcaagcgctcctttcgtgtcatcatcaatcagaatgataatgaagcagagaattttcaagtgacagatcaccatgcagtcgcatcaagagaaatgaggataagttaggatcatctagtgcattaaatggaaaggaaaggcatgatgacatgggaaggcatgacgaattatagatcatgagaagcgtccaccacggtgcgtgcacatgttacctgatctttgacagtgttcgcacgtcgactcttttcttctcctgcttgcccttgttttccgtcgatcagctttgcaaatgttttgatgaatgcacatacaatgtacatgtacacacaaactcgacttgaatttgttttaggcagaagtcgcgggggaataaaagacaattggtgcttcagtcaaaaaaccggctttgtcttttaaggggaaccagtcgaaacgcatgcttcatggttaaacatccatcacaaaccaacactcagaacagaaagacactcatgttcgttagcattctcttcttctgctttcagtatccaaacatgtctctgcgatctgatcgatgtttgacgggtgttctttcccacgcctctcgatgtgatacagatgaacgtacgaagcccatggcaaaatatcgatctgagacacgctcaccgtctgttccaccgaactcagactgaactaccttgacgtggtagacatgtccttctttgttcagccgactggcccccagcccatcagagctaccgactcagatggatacccgtcctgtccctccgatcagtttagttccttcctaccttgtctatgcccgtaccggaaccccatcggttaaatcaccaacggaagaaggccgccctccagacccggcccgcagcaaacgctggtgaacgacgaccggtcgattacaccggcgatgtcggctccgaaggccatactccaactctgtctccggtatattacatcccggggtcactgacagcggccgcggttaccgctgtctgtctagcgtgtcttcccgaccaatcactcaccatccaccgtcttccgtctggcagaacgaatggcagaacgatcgtcatcaggccctcagacgtaggctcgactgcagcgcccgtcatgtccgatgaacttccttttagacttgtagcgttcgttgtctgaacgagagaggggcgacatatatagcaagtgagtctccttaggatacggctgaaagcttcttgttcctcacaactcctctctctctctctctctctgtctattcccggttgtccattctctttcaatctacgctttcctttcctgttcccaaaagatgcgacgtgcattgagtccccttctcttgggctctgtcggccttgctgcctctctctccgagatctgcacgacgtcgaacgtccaggctgcccttccagccgatggcttcatcgagggtgtcaccttcaatgcgtcctctgttactgcagctctcgtctacaacgagacctacaccggcgagaacaactttccggatgccacgatctcctactgcaacgttacctttgcctacagccatgccggtctgggtgacaacgtccaggttcagtactggctgccgtccaacttctcgaaccgatttttgaccaccggtggaggcggatatgccatcaactctgtcagcaccagtctcccggaggccgtgttctacggcgctgtcggcggtgcgaccgacggtggctttggcgggttcgacagcgagtttgacgctgtcttccctctccggaacggaacggccaacttccctgcgctctattcgtttgtgagtggagagcgctcagagcagtgtcggatcgtgtcagacagaagagctgatggccattgctttgacctttttctttttcctttttttcttttttttctttttttacgatcttgtttgacctcttcttttaccctttcactggcctttccttcgatcttacctgccacaggcctatgagtccatccacgagatgagtgtgtttggcctcgagttcaccaagcagatctatgagatcgggaacgacaccaaggtctacacttactatcacgcctgctccgagggcgggcgagaggggtggagtcaagtccagcggtacggcggccagtttgatggtgccgtcgttggcgctcccgccttccggttctccttccagcagttgaaccactttggagcgaactttgttcagcagacgcttgactactaccctccttcgtgcgagcttgacaagatcatcagcgagaccatcgctgcttgtgaccctctggacgggttcaccgacggtgtcgtcagccgatcggacctctgcaagctggacttcaacatgacatccctcatcggcaccgcttactcgtgcgaggagagcagcgcatcgtctgtccctctgagaaagaggcagatggtcacctcatcggccacgcctgcccagaacggatcgatcaccgcccagggtgtcgccgtcgtgcagaccatcatcgacggccttcatgacaccgatgggaacgccttctacttttcctatcagcccggcgcggacatctcgtttgatgctgcgaccgcctataactcgaccagcggcgagtgggggatctctgtttccggcgtcggtgccgagttctaccagcggttcctcaagctcgttgactctagcagtctggactcgatcgagggctacacgtacgacaccctgaaagcatggatgatcgagggttggtacaggtaccaggactcggttcacaccacgaaccctgacttgacagagttccaacaggccggcggcaagatcatccactaccatggcgaacaggacaactcgatcccgaccgcatcctccatccgatactgggactctgtccgacaggtcatgtatcccggtatgtcgttcaacgagtcgaccgctgccctcgccgagtggtaccagctgtaccttgtcccgggcgctgctcactgcgccccaaacacggccgagccgaacggtccgtggtgccagactgccctgggagtgatgatcgactgggtcgagagcgggatcgagccggtcactctgaacgcgacctacctggcgggcgactacatcggtcagaacgctcagatctgccaatggccgttgcgaccgatgtggtcgaacaacggaacgagcatggagtgcgagtatgaccagaggagcttggacgcctggttctacgactttaccgacagcttgaagcttcctttgtactagacaatgacgtttgctagcttttgtattgaaaaagagagaaggatcatgatataatgtggcacttttgttttgtacactcgtttgctggaatctagagtattcagtcaaacattctgtgtgaacatgcgtgtattttgtcggacaagtaatgaatcgaacagaagaaactgaagagattgtcatcaaaaagagacacatctctacaaacgtagagacggctgactgctggtctggacggcatcattattcagcccacgactgtaaccctaactcgccccgaggattcctcagttatctctccttactacgatcgcgcattcatccctaacctcatctcaacacttaatggtggcaccactgaacgccttcaccgaccatgcttgacgaacctcttccgatgtcgcttccggcgatccttgtcaatcccaaacctgcagctgtctcttatcctcgtctggattccagagcgtctggatcccggtcgatcaaaccgcttacatccaccaagcgagctcaaggtcggagggctcggctgagaaaggagaacggtaagtgttgtgcttcaggtgctcagtgttgttcttttctagtctggcaggtactgatcgtgttgcctgttctgtttgtctgtggaaacatatcgatgttcagactctctggctggcaatccccatgccgtcgctcctagccggcacgatcttccacttgctcctcagaggcttccgccaccgatattcccttcgcctctgccaccatcccttcttcctcgaacccgcccagctccttcgcctgctcttccgtcatcggagccagggtcgacagaagccggctctttttcgatgtcgctcaaggggatcagaagaacactgcaacgaagaggagctagggctgaggacctctgcaagatcgtcgaggacgagctgacaagctggaagaaggaggttaggcgagaggtgatcgtattttccggtcgaccgcaccagtcaaacgaaggcgggaggatcgtcgatgcttttctggttcccacacccgctcgagacagcccgtcgactccatatcagagtgccagtgggcgggccggacctctgccgctggacatggtgagcagatcgttcgaccatgacggtttctgtccggccatcgtagagcttgcaagaagcgaaggaagcctgacgtgggcgatagcggaaggtttcgaaaggttcgtcttgcacatcgcctctgcatgggtctcattcggtagtacctttttgacgtcatgacgaccattctatagatacgtcgtacactgtgtcgctcgataccacggccttgtgactttctccaagacatcaccttatggcactcgactgacatacatcctcgtccggccatcccgtgttccggccagatcatcggaccgcacggtcacagccggcactttggatactcctccgacaactgacatgtctagtgttggtggaagcggtacagacaccgatcgagcgctcttcacggatgggcagagcgagagcgaggtcgagactggatggggagggtgggattcggagaatgagcgactcgaagaggttgagacaagagcagaggaagagaaggctcgattattagcgcggcctaccggacttgtttccacggttccgaaaaccctcgagctggtctccctggcgaatcatcacgacctggaagctgatgtcgaatcttcagacgatgagtcggcctcgtctacgactgatgcacttgcgtcctctctggtgtctctggactttgtttcgacaccttcctctccatcaaccttgagtcatgactcgtattccagctcgatgtcccgtgtcatccgaccatcatctttgtcattcttgtcttctgccatagcggaggacgaagaggaggatgctgatcagactcttacctcgagtccatctttcgaaacttccgcacacgtggattcaccgacgatcgatcgtacgaaagaggatgcttcaccaggccctgtggacgatgaagaaggaagaggacgacacttgaatggaaagagcacacgtagtttttggcagtacgtgtacggctgaacaagtgtcaacagttctgtcagacggcgtgcatcagcatcaatatcggcatcagcagcatcagcatcagcatgaacatcaatatcaatatcattatccagcattagtgaaacagtagattgtcatcaagctcattatggaatattccagaaggatatatgtctgtctgcttgtgaattcgagcttcttcttatgagatgttggctagcataaggacatgccatcttgtaggtatggcgtgtctgggtctaccttcatcatcgacattagggcaggtaatctaacatgagcggcggactcaactatgtatcgagcgtgaaactagaaagaacaaaaaaaagagcagagaaaa

SEQ ID NO: 131 - DNA, 1701 bp, Xanthophyllomyces dendrorhous
atattcccttcgcctctgccaccatcccttcttcctcgaacccgcccagctccttcgcctgctcttccgtcatcggagccagggtcgacagaagccggctctttttcgatgtcgctcaaggggatcagaagaacactgcaacgaagaggagctagggctgaggacctctgcaagatcgtcgaggacgagctgacaagctggaagaaggaggttaggcgagaggtgatcgtattttccggtcgaccgcaccagtcaaacgaaggcgggaggatcgtcgatgcttttctggttcccacacccgctcgagacagcccgtcgactccatatcagagtgccagtgggcgggccggacctctgccgctggacatggtgagcagatcgttcgaccatgacggtttctgtccggccatcgtagagcttgcaagaagcgaaggaagcctgacgtgggcgatagcggaaggtttcgaaaggttcgtcttgcacatcgcctctgcatgggtctcattcggtagtacctttttgacgtcatgacgaccattctatagatacgtcgtacactgtgtcgctcgataccacggccttgtgactttctccaagacatcaccttatggcactcgactgacatacatcctcgtccggccatcccgtgttccggccagatcatcggaccgcacggtcacagccggcactttggatactcctccgacaactgacatgtctagtgttggtggaagcggtacagacaccgatcgagcgctcttcacggatgggcagagcgagagcgaggtcgagactggatggggagggtgggattcggagaatgagcgactcgaagaggttgagacaagagcagaggaagagaaggctcgattattagcgcggcctaccggacttgtttccacggttccgaaaaccctcgagctggtctccctggcgaatcatcacgacctggaagctgatgtcgaatcttcagacgatgagtcggcctcgtctacgactgatgcacttgcgtcctctctggtgtctctggactttgtttcgacaccttcctctccatcaaccttgagtcatgactcgtattccagctcgatgtcccgtgtcatccgaccatcatctttgtcattcttgtcttctgccatagcggaggacgaagaggaggatgctgatcagactcttacctcgagtccatctttcgaaacttccgcacacgtggattcaccgacgatcgatcgtacgaaagaggatgcttcaccaggccctgtggacgatgaagaaggaagaggacgacacttgaatggaaagagcacacgtagtttttggcagtacgtgtacggctgaacaagtgtcaacagttctgtcagacggcgtgcatcagcatcaatatcggcatcagcagcatcagcatcagcatgaacatcaatatcaatatcattatccagcattagtgaaacagtagattgtcatcaagctcattatggaatattcctgaaggatatatgtctgtctgcttgtgaattcgagcttagcttgactcttcttatgagatgttggccagcataaggacatgccatcttgtaggtatggcgtgtctgagtctaccttcatcatcgacattagggcaggtaatctaacatgagcggcggactcaactatgtatcgagcgtgaaactagaaagaacaaaaaaaaaagagcagagaaaa

SEQ ID NO: 132 - DNA, 1785 bp, Xanthophyllomyces dendrorhous
gccaactgagctaaatccccttgtattgaaaatgagagtgatgcttccatataatgaactcagcagcgttagatgttttgaagaatattactgaaataaaagggtgaaaatggctttttcgttctggcacttgttcccaatcaagtttcactggtttcccaaaccatatacacaccacccaggtgtttcagtaaaatggattgagaaaccaggataacagaagggaaacccgctagaaaatttatagctcttcggagagagaggcttgggactccgcgcaaacggaagtcggaaggtgatgcctcaagaagaaataacaaattgcaaccgaaataatgtcaagactgctgaaatttcaacaccaatcaagttctcaccggtctcccaaagccatatgtatactgcaagaagcatggtgagagttacctcagccgatggtgatcgatacatggtccttttggacttgggtgtccttagaccataaaccaccaagatccccatgggttatgggttcaatttgtgcctgcctcagcctcagcgatcagcgtaacagcagtggtgtcaagcaccagcattcttgctccttcgttcttttcctggtgaagggcaaggtgcatcatgttgcgtgatgtgtttaaatcactgtttcaccaagtctgagagcatgtatagcgcacagtgagcaatcgacacatgatcttgaggcacacaacacacatcacttactcggcagacgctgcgacactccttgatcgcccacactttgctcctttcagagaactcgccatggcacttcgagcacaccctcgatgtccgaaactcccagattttgcggacctaaagcaactgaaaggccctcagcttgggatgcatcatcttcgcaggaccaggagcatgcccacgagaagacgacgagaaggctccgtcgccgaaggccaggaaggtgcgtggacgtcctgccgacagacggagcgccaccttgtggtacgcttgatcgcggctgatgtgtgcgccccagcgaagacatctccaccgtcgagcagcgaagaatgtcgcgagccaggagtaggactgagagtgtatgacgagagcagcacgaagaccatcgagactgtcagatatgaacgaaggaagatctggagaaagacaccgaggtggtcaaggcagttgcaaggtcagtaatgctatctatacagttagctcaaacgtgagcgtggacgtaagcggtactcatcacggagagtggtttacactttcggatggttcttcatccacagccgctgtttccgagcgtctcggtccatccctgcaaggtgcttccatgacttcagagagagcgaccactgcgtgccgtgctcggccagaccgccgttgtccagagacatgtcgagccctcctgcggtcgtcatgagtaacgtccggcggcctgagtcgaaacctacgacctcgtcctctggccgcacacccacggaacatactctgctcggtgacgatccttgcctctgccctcccatctccatccgtagtcgtcgatgccagatggaggcgacgtcggtttcagcattctggcagacacaccgatgccgaccgtactaggcgaccgggcgaaccaccgccatctggtctcgactttggatacataaaacgaccgcctccaccaagtgtctgagtcagcccgaaagaacttctgcgttaccccgcgcacatgtcccatttttgcatcttccaatctgagctgacatcaaaggttgtaaagaatcatggcatctacaaagacgtaggacg

SEQ ID NO: 133 - DNA, 684 bp, Xanthophyllomyces dendrorhous
tctacaaagacgtaggacgaccggtgagatgagaggggcaggagtgacgatgaattaaactaaaggttaaacaagttaattcgggctcggcgaaattcagtcgtctaattaacctttatcagtcggtcagtcatcgatatcggtcccgtcggtaacgaccttggcgttgatctttgcctgaccgaacgatagcgttgctgactgagcaccatctttgcttactgatacctcatcgatttcgataactatctgctgtctactctttgttctttctgctgagtgagcatgtcggattgttaaagattgctcatcagcgacagtctataagaatgaggagggtagctttaagaaacggctccatttgattctcactctcatccgctcacacacacacacatctctatcactgaacctctcttgaaaatcccatagcactacttttcattctatacactaatctggatacgtctttcgttatgtcgtctcctgacagttcgactcgtcaccccaccgctgaatcagaagcggcgcaggtggtaacatcacctgctccctccctgagtaataccgtgattggtctcaatggagctcctgagaaacatgacaaaacaccacttccagtggaggagcccttgaaccagcagaaggttgaagccgaaaggccaatgaagctctctcagagaa

SEQ ID NO: 134 - DNA, 2218 bp, Xanthophyllomyces dendrorhous
cccttttccccgcatgtgccccagatcggtaggtgccgccctgagctagttcaaaaggttgtagagaaccccggtgtccagaaaagcggaggacgatcggttgaaccaggccggcaggggcaagaataagatcaaaccaagatgagcaggagttgatccgggcttggcgagattcagatgtctggtaaagttatattagtcgatcagtcactgaattcgatcttgtcagcaacgactatagtgctgacctcgacctgaccgaatactgttgctgctgactgagcaccatcattgcttactggtgccgcgatgcttactgataacacatcgattttgattatcgatcactatctgctatctactcttatttcttattctgctgagtgagcatgtcgggctgttcaagactgctcatcatcgacggtctataagaacgaggagggtagcttctaaaacggctccatttgaatctcactctcatctgcatacacacatctctatcactaaacctctcttcgacaaacccctagcactacttgcatttcatatactcactagacacatccttccttatgtcgtctcctgatagttcgactcgtctctctcccactgaatcagtaccgacgcaggtgataccatcgcccgttccttcattaagtgacaccgtgattggtctcaatggagctcccgagaaacatgacaaaacatcacttccagtggaggagcccttgaaccagcagaaggttgaagccgaaaggccaatgaagctctctcagagaaagaaatggtcgttactggctgtgttttcgctaggcttctttgtggacgtgtggtcatacagtgctttcttcatcttcaccggtccgatatcggagtcgctcgatattctattcgaacaacagacctgggtgatcaccagttatgccgtcaccttcgcggctttcctgctcttgtggggacgggtgtctgatctttggtctgcaaagccagtgttctcgtatgggtaggtctggctttctcgtctctcttccggatgtagataacctatcaatctcagagactgactgtatcacgcgcgttccatctttcatcctcctagattcatcgttctgggcatcctcgacctcatcatctccttcctacccgacaagtactctttctttgtccttcgagctatctctggtatcgccggcgcgactctgatcccggcgtcgttccggctgatcgtcgctgttttcgaaccgcacgagctcggcaaggcttttactctttacggaatgtctggtgctctagccaacacgactggtatcatcatcgccggctttgtggagtacatcccgaacggtggccagggtgaggcgtggaggtggttcttccgtatactcgccattctgatcatgcccttcgccatcgggtcgctctactttatccctaccccgaagggtgcgatcgcccaagcggatgacaagtggaagcggctcgacattgtcggtactttcagcatgctcgccggcatcgtcctcctcatcctcggtctcacccttggggcgtcgtacggatggaagaaggccggcttcctcgcgccgttcctgattgcctgggtgttgatcgtgtttttcttcttctgggaggccagactatcggatgagtgcgcgatcttgccgtccaagacgtggaggatcccgaactttgccgtgcttatcactctgggtctgttcatctacggctggtggtccgtcaactttctgccctttgtcgagatctttgtccgggttcacaacgagagagcgatcatcgcggccgtccggatgttgccacaagggatcgcggctggggtggtgaccgtggtgctgacgctgtatccgaagcttacgtcgaacccgagatggccgatctcggtcggtctgatcggcggagctatcggtctcatcctgttcacccagtccgagggagacgtcgtcggctctggctactggcgatgggtgttcaccggcggtgccatcggaagttcgggcgtgatgatcgcattcacgggtacgaatgtcggggtcatgacatccgttcctcccgagatggcgggtgtggccggtgcggtgctgcaggtgtcgctccaggtcggctcggctgtcgcgctctccatccagagcggtctgttgacgatcaacccggggaacttggagaacttttcgaacgtcaaggcttcctggtactttgagct

SEQ ID NO: 135 - DNA, 808 bp, Xanthophyllomyces dendrorhous
gcttcctggtactttgagcttggctggacgctactctggctcgttggtttcttggtcttttatcgacctggcaagagacctgtaagttcggcggaggatggagccgagcagggagagagacctatcatggcgcattagatgtgataggacagagtgtgtatatacagtgcttgatagactattagtagtatatatgtacgatttaatccttgtgatccgagcactattaagcaatttgatctagacttgttcagtaacggtgtcgtttgactaacttcgatcacgaaatatttacgccaagagaaatgaccgttgaacggatgaaagtctgctagggttttggcagtcttgagacggtctcgaccattatcagagatatcctttttcaggcgataccttcagatctcgctcaaagtctgaagaacttctctccgaagggctttacaatatcgcctagcactcctctttccttgtagtattttcattgtttatttgtatcttctgcgctaaaatagctaggtgatgcaatctggggtttagagtaataaaagggagcacttggtgggggttttctagagtagtctcacagacaacgatgtaatcctagtttccgaatgcgtcaatgatgtttctctggttcttctggatcgaattcctcaaataactgatgctataacgctctgatcctgaatctaattctccagttctctagttctctcaaacaattgtgcacacacacagtgagcaagttgattgagagaaccagaaagaaaaaggaaaaagaaaataaactagctactgtatatac

SEQ ID NO: 136 - DNA, 5132 bp, Xanthophyllomyces dendrorhous
agactgctatatccaatatagagtaccattgaaatcctcaatgtcaatgtgtttcaaagtggaagattgatcgttcaacttgcgtttgtgccaaaaatcggtcatactctggataaataaactttatacaaactcataagaatggacattttaaaaagatcgtatagtatagtggttagtacttccgcttgtggtgcatcagccgaaacgcaatatcgcggacgacgggtgttcaattcaccctacggtcaattttttctaactcagtcaatttctttttgtcaagattttaatggaaaacgtgataaaatgagatagtacaaactatcagagtatttgggacatcgtttgaaccctcaaaacaaactttagacttggaacaatgtaaactcttgatgatgtatgtgaaacgtgatgtaaaaacattgtaaaataaaaagctgatgaagacgagattcgaactcgcgccacgaatgactgcgaaacaaggctgaaaacctgaacacagcgccttagaccactcggccacttcaccttttcttatattcctgaaagcgttgtttcttatatcaaggacttataccacaagcgccaattttttaaaatttattttatctcgagttcaaccatcatcattctgggttaacaacctccaaagatcaaaagtggcggtctaaagaatagcgtaacacggcagaaaagaaggcagtgtgtattacttcaagggccgcgaatcaacatgaattatcactgcattcaaccttatggctcttctccccggttgtcctttgcctttgaccaagggctcggacgacaagcatttcaaatttagccaggttgttcccttcagcgttcatctcaatatccaagccttggagtgttaaaatctcaccccttcgagacagatcagattcattctgtaagctcgttgttcaggtttgaacgaagtcattcaaacctctagggatactgccactgacatcggctctcgtctccttccgatcaatgatagcaacgataccgttctgcccctccacaacacctacgccggatgcgagtactcagccgacggcttttgctcattcgataccgtgttgaccgcgctcaaggctagaattgacgagatcgattacgaccacgtctgatatggaaatcagtaaaaacctttcgtcactttctcccatagaaggcgttgcgttaggtaacaataaacctggattaaccatctgtctgcactattctcctacagcactgttaaggctggtgtgaactacaacggtcttgctccatatccgtaaagatgggttgtctgttaacggagatttatatgactcattttatcatcatctgactatattcataaaactggatattgtgtatcaaactctacttttggattaatattcattgttataaacaacatctggcacaattgagccaacgagtctgaacaaagaggaatataatctagcaagtcaaatattcgaggatctgctaaattgagcctgtgtacacgggtgattcagaacgacagcaagaccgttggttgactcaactatcttgatattcatgttatgtaccttacaccagagttccggatgaagacatgagattgcttgcatgcgacctgctcagatatatcatctatgtctcttcgtatctctattccatcgcctgatggtctccctgtctgctcatgttcgtcttaggggagcgtgtcgagaactcatcgctctctctggtctctctgctctaccttagactgacaccgctgctgaggatgatgtctagactgaagctgctctatcgatggggtgactttaacccatggccggtgggatcctagtggtctgtgggctgaggtcctccaagtccaagaggggcatgtatcgaccatcatcggttaagatcactctcaccatgactaagctataccaaccaaaataatgtatttactccttatccgaaacaacttagtgatacaatcgaattgttaaccgcagccgcgacatagttcatttgattgtttttccgactcacacggataaacaaatggcaaaccctccgactccctcacatgtgtcttttaggtagcataccaacgactctacaggttgattgcagcggcggaagacgttgtttatcgagtgatacgagtagtgtgaagcagtggtatatttcaaggatcttctataaattatacgacttacgaacggagggacggactggccggctatgacgccaagagactgaccgattgatcgatcgaccgatcgaccgaccgaccgaccgactgaccgaccgactgacagatcaatctattgcttggctgacagattgcctcttcgatatagaactacatagattcttgttttcgggaacagatgaatgggttgcattcgtttacaaatagatgtacagcaaagagtccgggatgaaaggacatctttcacagggcacccgattccttttgtcttatccgtctctttgatcgatttcattgtcccttaagaaatcgtccctttctcgatgagcgtcgggagagctggctgaggatcattgctcggagccgactgatcactcagcttccgagtgtctttctagtgggctgtccggtattgatcaaaattactatttcagttgtctcggtctgttcaaactgatatcatcatccgttgagagttctccggaatgcttcccgtaggaaatttggggaagacttttgagttcagtctcggatcaacttttctccctcctcgtcctccgttttgtctttttctcacttctgccccatcgatccttgtgttccatatttctgaacgcatcagggtccactcaactataacttcatagacatgcgtccttcctcaactttgtataccctggccaccggctcgatatgtttgttcttctatgtctggggtatgttctctgaggcggatcaatctgtcggtctctcttttagggacgagctcatccagagtatccgcggccatgaccagggaacgacatggagtagtatctatgtgatcaacatggccacccgcccaggtatgtctagctgtttccttgtctgtgtccgttctcttctctattcactttgcatccggactgatcgttgacaagctattgttacctgacgcttcctgcagaccggaaagagcatatggaactgatcgctcatgctctagagctcaactttacctatatcgatgccgttctcaaagactcaccggtggtccactggatcatggaacgtatgcgggaagagcttgtcgtgaaagatctgaccagggaaggcgcctactccccaatgcagcaaagcatggcggacagactttgggatggcaagacctggtaggtccttttgtcttgcgttgcttatatttatcttctcaaatggacagatctgtctgatcggctgaacccatcgttgaatgcgcacacatcttaacaggagagagtatgtgctctcatctttcgatagcaacagcacagagtttcttctcgagggaacgaacccggacgtgcagtttgattatccgctctggccacctggtgaggcttgcgtcagtttgtggtctcaggcttctggctgctctggactgaccgatggccacctttcttgtcgacgttcatgttgatctagaggccccactggcgtgctacctttcccatctcaagacctggcacactgccctcaagaatgacgacgatgatatcctgatcctggaggacgacattgatgccgagttctcgctcgtcgaacggtggagggagatgactcgctctcttgccgaagaggctgagggctgggatatagtgtacgtcttggcgactgttgcagatgcgtccgccgcccatccgtccttgctagggtttgcttactggttcctctgtcgaacacctaatcctataggtaccttggatggatcctcggacaggaacgagtgaacaaacctaccttccaccccggcctgcgcaaatcaaaccatccgatgggaacccatgcgtactcgctctcccgccgtggtctccgccgactaaatggcctcgtccacgacttgcccaatctgttctcggcgccagttgaccacgagcttccgttcaagtatgtagcccagcactacaacatgggcactcttcagagcttttctgcaacgcccgcgatcatcattcccttttccgagttgggtacggacatcggaggatgcgcctcgaaagactggggaggcatgtaagtgaccttcagacttatacaacctcatctctactgtagacatcaatatggtctcattgcctctccttctatgatgcactcatctgacatccggtgttttctttttgcacgatagtctggccgactccactgtagagagaatagcagcgtgcaaaggccatcctctccccaagaagaacccagtagacatctggatgatgcaaagtgtggaagacatgtgatgtgtgttagtcacttattcatcccttcctctctttctctctctgtttcttctctcttcgaagggtttcgtggccggcccaaagtagccttatagttcattcttccttcgatttttctcttcttcttcaattctttcgctgcccttgttgctctttcttacaatcaagcgaactagaatattttgaatgaagccttacgtaaactgtcttatgaatcaaagcagttcatgaaaaaaataaaaataaaaatcgtttggtcgggtagactgtactgatttgaattactatcggaaatagttctgggcgttgcatttgggtgaaacgtcatgaatctcatttagttccggatcatcttttgttaagaatcacagccatgcttgccacgtggacggagagagctgagtgatcggccgtatggatgaacaccgccgagatcagctgcgcgcggctgataaagtgactgatctctatcaaaatgctctcacccttgtctcttcgaatattgatctctctccatctgtttctttgtttgatggtttcttcatctgttcgtgttcaccacaggatggttcgttaaacaacaattctgctctctgcttgctctgagacttggtcgaacagatatgccatcgcgtctcgcgacatgctctgcctggccctgcaccaggagg

SEQ ID NO: 137 - DNA, 308 bp, Xanthophyllomyces dendrorhous
ccctgcaccaggaggagaacgagggggcttggatactggtccttgacacggttgacaccgctgacgccgccgctctggctgcagatgctaatggacatggcgattgaaagaggataaaaattaatcgactggtctagccatgaaggtttttctgcgaaaggtttttacatcctctttgtcttcacggatatcttctggttgtcgtcctttcttaacttcctcatatttagggtcttagattcatagatagttcttttagcaaggtctggttgtagcgagcagaaagaagaaagaaagaggaccgacag

SEQ ID NO: 138 - DNA, 1211 bp, Xanthophyllomyces dendrorhous
gcttcctggtactttgagctcggctggacgctgctctggctcgtcggtttctcggttctctatcgacctaggaagagacctgtgagttcggcggaggatggagccgagcagggagagagacctattatggcacactagatgtggttagagcgtaggatatgcttagtgtgactgagcggtagatagatcatcaaagtgtatacataaatacgacagagttaggtatcaagattgtattattatgtaaacgtgttttgtatcaatcttgcttttcgatgaatgtctttagttggccatatctttttcttcctcttggatcttgtcagcgaggcagcacaacgagatctcacagactctctcactctcactctcagagatatgttgggcaagtcattcggatatgcatttactaattgaacacgttgctcaaggtacatttgttgcagaggcaacacccaaatctggaaacccattccaagggacgagcgatatccaattaggttatgagcccggaatccagtcgctcagatcgtatccgacatcaggaagttggatctgacgtgaacgactcgatgccgggctcatagcctattggatatcgaatgtttccttgggagggttgagtctagctttgagcaaggacgctcaacccgatgtgttcagcagatgggatgaaagagaaagcaaggtagggttagcgaaattgactgtgtttatttttatttttaatagtgtaagattgatgaaaaagaacgtcacggccgcccctccgtttccgtgacaacaagaggagggcaaggagaaaattaacgaggtactatgcgtgattgagacaagttgttcacgcgagccagtcacgggctaacacgacttaatgtttgatagatagtatctttttttgaagcacactcaacaagatcgtatagtatagtggttagtacttccgcttgtggttcctcaatcgaaacgcaaaagtcgcggacgacgggtgttcaattcaccctacggtcaaatcttttaaatttttctttttctttttgtggaaaggcatctttcttctttctcttagacgtatatatacatgtctattagaatgatgtttgaaggggatttttttttcttccctggattgattttcattgttgttcttatcagtgtacgctcgcacgcacacgcatggtatgtttcattatagtagaatacatatatat

SEQ ID NO: 139 - DNA, 1574 bp, Xanthophyllomyces dendrorhous
atatatgtgtgtgtgtgtgtgtgtgtatcactgtcggataaaagccaaggaaaagaaggatcattggggctctctttctgaccgtggacagagtatccagccttgtgctgtcaacccgacacgacctccgagagtgacggtgctgacgagagcgcgatcgagtctgatggatccttcgacgagggtccgtctgccggagggcgggcggtgaccttcgaggaagctgtaccgggtctttccgttcgctggtgtcaagggtgtgagggagagggcgaacgtgaggctgtaaaggacaacagagggaaaaaagagagagagagagagacagagagtagattgacgataaagtaaagtcaataaagtgagggcaggaaagaagaagaagaaagaaagaaacagacgaacgccaaggcgagggatgcgcaaccagaggatgtttcgtggtggccagtctgagtgaacgccttggctgtggtgaggacgtcccgtttcttcccgaccgagccaatcttgaggccagcccagaagacgacggtgagttttcggatgtctaccgatgtagaggctgtgtgatcgatggtaaactcgcgggcgagaccggcgatctgctcggggtcgagatcgagctggtcgagatcggtttggaatgggagttgaacgaagagataggtttggatgggcgtgtcgacggacgaggcgcttgttattgtgatggaggtcgaggtgagtgatcgaatggaggtcaagtctgcatacgggctggtgaccgtgtagggcaagaggtcggcttggacgaggatgatggggtccgacggattgaacgggcgagacacttggagacggacgggactggtatctccggtgtgctcgtgtgggacttgggtgatggttggatctgtgggacgaagggcgcctctgttgaggagtctgtttgtgggtgggtagtggtgtgaagggcggacgtgaataggagagggagagggagagagagagagagagagagagattatgtgtgagtgtgtagtgtcagatgtaagagttgaatgagcacagagagagagagagagagcaaagaaagatggctttacgaccaacaggctgctatcgacagggctggaccaggatgtcgtaccggctggtgatggaaagggatgcggttggtcaagaacggcccttgatgagagggagggtaggcaaagaacaaggcaaagaacaaggcaaagagccaaagcaacgagacgtacggtgtgtttatagaagggttggatccggaagctgcttggcgtgagggcctgtgcgaatacgatgtcatccaggttgagctctggggacggggtggaaggtacggatgagggtacgacaagacatggtgtttaggggaagggtgcacacggagggagaagagaaagtagaagagaagaaagaaaaaggaaacccctctggagagaaggaccttgtggctgtcggaccttgagagatggtgagtagctcggtgagctcgagctttgtgtccgaggtgaggatgacgactgcgacgggcgtgccggtgtatggttcgatggcgggggtggctg

SEQ ID NO: 140 - DNA, 882 bp, Xanthophyllomyces dendrorhous
agggggtgggagtgtggttgaaagggtgtaatttggtgtaggagagggtgagggcgagggcgagggcgagagcgagggtgaggctgagggtgagtatgagaatgagaatgaaggggtgagagtgtgagcgaacgggttgaggatatcgtactcgacgaaaggcactgtgggcaatggttgtctgtgtgggaagggagggagtaagagagcgtctgggtagggaaagaatggcatgggagaggagtatgtgagcagaaacaagacgaggatgatgatgatggatgtgatgtgatgtagtaagggaagggaggggaaagaatggaaagggaagggaaagaatggaaaatgaaattcgccggtgtgtttacaaccggccttgtccgtttgtgaggacgctctttgtacggtgggtcttctagagagtgtgtgtttctgtagtgagtttttgtagtgattctgtagtgattctgtattaaaccaccactctgatgttttctctgtatgtgtgtgtgcgtgtgtgttgacctgtgtgatgggttgtatgtagtgctttgtggcctgtatgtagtgtgatctgtgtgtgtgtgttctgtagtactctctgacacgctttctaacacgctttctaatacgctttctaatacgctttctaatacgctttctaatacgctttctaatacgctttctaatacactctctaatacactctctagcacagtgcctgatacactctctatcatctcttagggttatcctccctctctctctctttcttgcctctgtgttgtgtgcattctattgactgggtgtgttgtagtgtgtagtctgcatagtgcatagggcatagggcatagggcatagggcatagggcatagggcatag

SEQ ID NO: 141 - DNA, 1098 bp, Xanthophyllomyces dendrorhous
tttctcttcttttctcttctcctctctgctctctctccctccctctccttcccccatcctacagcatcgaaacctccatccatcaaccgccgtacccgtcccgccacctgggtcccaacagcagcagcaacagcaacaacatagtcatcaacaacaacagcagcagccatcccacccacaacagcagcagcaacaacaacaacaacatccatccaccgtgcccggcccatccggagctcacgcatccaggctcggcgacatgctcgacgccgtcaaaagagagtttgaagcactcaacgccgatgccagtctctggaaaagtcaacgagacgagatggaagcaaagagtgagagcactcatcttttttcgttttccttttgccctttcttctctgcctctctgatatctttgtttccttctttctttctttctttctttctttcttgggttctttccctgtttctttctttctttcttctccctccctcgctccgtcgaatctacgcgtcgctctctccttccccgtcggcccccagtcgcgctacagatccaagagaccgctttgatcagacagaatctctacgacctcgaagcccaacacgtcaaaatcagaaacgagcaagtctctctctctttctctctctctttcttcctctactctcttttcctggaaagccttactgaccgtccgacaacccttccatccatccattcattcatccacctactcacccactcacccactcacccactcacccactcacccactcacccactcacccactcacccactcacccactcacccactcacccactcacccactaccacaaacacagctacgaaaacgaaatctctcacctgcgacgagaactcgaactccgaggaccaaaggtcctgcccggaatcccccttccccatcaacaacaccaggctcccatccttccctccgtctcgtcccctcacggcagagaagaccgagggagaaacagcaccggctttatgggtgccccgccaggcttggccggcaaatccaaagattcagtcggacgtgagtttcctcttctctcttctttctgaaatcatctctctctctct

SEQ ID NO: 142 - DNA, 780 bp, Xanthophyllomyces dendrorhous
aggctcacgcgacatttaactgacccgatcaacttctatgggactcgtctccggacgtcaagtccctggtcatcaacattcagcctccacatcatccaccaactcccaaccgcctcaacaccctcttcccagtctttccaacggttccgtcagctccaacacaccctcactccctccgatgcagatccaaaatagctcgattcccggtttgctccctcaccagcagcagcagcaacagcaacctcaatcccagccttcctccactcactcccccttgccctcgtcctcccatctggccggctcggccggtaacactggctcgatccccttgaggggtagtccgaatctgtcgagcgcatcggcaggcccggccttgaccggcccgttcgcgtccaaccctcccccaccgccgagagtcgtcccccagctacaacaacagcagcaacagcaacagcaacaccagcagatgcttcctcccccgcccaactcccaacagcaaagggacattcatgaccggcaggctcgactcggcacaagaactcccactcccggccctggtggtatccctcctccccctgtcggaggggtcgtcagagaacaacagaccgtcgtctcggatatcgatccagacgtcacctccagagacctcaaaaaggaaggctcagactgggtcgtcatctggagcccaaaagcaaaaaaagtgttggacgtcaacctcgttcacaatctcgtccacgaaaggtaagtttttctttttttttgtgtgtgtgtgtgtgtgtg

SEQ ID NO: 143 - DNA, 917 bp, Xanthophyllomyces dendrorhous
tgtgtgtgtgtgtgtgtgtgtgagatccagagcgacggccctctctttctccctctatatgccaatctaaccgactcccactctatcttccaaccccccttccccctcgtgcttatcgatccacagtatcgtttgctgcgtcaagttctcaaacgatggaaaatggctcggcacaggttgcaaccgaacggtccagatctttgacacaaagaccggagccaaaagctggtaagtcgcttttgttttcatctcgctctctcgctcttcttcttttttcttcttttttttttctcttccttctttccatttgtttttcctaacctactcggtacatcctattgttcaccaataatcctctcgttcaccggaccctcccctcgtagtgtgctgcaagacgatagcacgccttataatggagacctctacatccgaacgatttgtttctccccggatggaaagcttttggccacaggtgctgaagatcgacagatcagagtttgtccactcttcttcaaaacttccacctctaaaaaatcttctttcgctcacaaacgttctctcgtattttttccctcctgcttttttcttcttcttctgctcttacagatctgggacatcaaagctcgcagaatccgacaccttctccaaggccactcgcaagagatctactcactcgagttcagcagcgacggcagacaccttgtctctggcagcggtgacaagagcgctcggatctgggatatcgagaacggcgcttgcgtgtttgatcttcgggtcgaagactttgttatcggagagtccggaccggtcgatgccggcctcaccaggtaagtcatcgatccccccccccctttttctttttgtcactcacgacccgaaagcaacaagagataccacagatgtatcgcttgattatt

SEQ ID NO: 144 - DNA, 1884 bp, Xanthophyllomyces dendrorhous
cttgattattgaccccccttttatatgattttatttctattaacacttcacttttctggctttgctcatctcatcctttctcccgaacgcttgcagtgtggctgtctcgcccgatggtcgatacgtagcagccggttcgttggacgccgtcgtacgcatctgggacacccagacgggtgttcagctcggtcgattcaccggtcattccgattcggtatacagtgtggcgtttgcccctgatggaagcgttcgtcgcctcatcttcaatcctgcttgtcttcccttgcgccaagacttgtctgactttcggcattttttttctatctctctctctctctctccccgcccgtacagttcctttgctcgggatcccttgaccgaacattacgaatctgggatctatcccccccgcctccttcaccgccttcaaactcgcggacgctcgagttcatgcccaatggagaacccggaacagggtacggcgcctgccacaacgttcttgccggacacaaggattatgttctttccgttggaggtttgttctctctcctttttttttctctcattgttctcttcctcgtcgctccccgctgtctcgctgtccctgacatcacacccaccttctctatagtttcaaatgacgggcgatggattgcctctggttcaaaggacagaagtgtgcttttctttgattccgctacgaaccagccccagctgatgctccaaggccataaaaactcgggtgagtttcccttccgtcgtcatggcaatctttcaagagacctgtaccgactcctctaaactcgtttttctcctttactctttcagtcatctcgatcgatctttccaagtcgtccggtctgttggccacagggtctggagatctgaacgcacggatatggaggtatgattccgttagggattagtatctcttctttttctttcgatatcttttctctccctcaaggtcaagtgagtgcgattggggaggatcggtccaaatcaagagcgggatgataagaatccagtttctctgctttccttctttctccttttcttttctttccttgttttccttgttttcttcaaccctcccccctttggttccatcttcttttctacaaactcgacgttgttttctcgacagagccgcccttgaccgcttccctcgtaccttgtcttttcctctccttttctgtttcctcgagttcgttgtaatcatcttccaactatggtcattggtttttgttgctttcttttcctttccccccctttttttttcctatttttatatcatctatataaatcttaatccttctttttcgccccgaccctcgacctcgacctcgaactcgaactcgaactcgaccgaccctgctcacatttttgattcccctttcttctcttctcatcttttccttcctactctatcttcctcctctttttctttcgatcaatcctcttgttcttgttcttgttcttcttattcttgtctttttttttctttcatcttttttccaggttctctctctctctctctaatctctgttccttcgccgtctttctcttgggttggcttttgcttcatgtcgccaatcaacccgggtttctctctctcttgctgacccggcggggggggggaacaaacgacacttacccaacctgtgtttcgttacatcttcccactctaaaagaaaaaaaaacacacaacctgaaaagaaagagagagggcggggatagaaatacactgcattacatcagaacacacagccgaggaccgggcacgctggacgggcaacccagatagggcgcgtcagctcggttatcgatagaccttccctgcgttcgtcttctgattagagaaaggaaaaggaaaaggaaaag

SEQ ID NO: 145 - DNA, 1261 bp, Xanthophyllomyces dendrorhous
gagaggaagagagagttatgatccagagggcgctttttagatttttttaatatgacgatacaatatggagagcgaaccggaagtgttgcgctctgcgtatatatatatatacatacatatatatgtataatgggtggataggtgcactgtactaagagaaccgagtctccaggggccagtcgctttgagaaagaagaagcaggaagaaacattaaggaaaggaaagaagaaaaaaaaagggggagaaagaagcgtcctgggataaagaaaagagagagagagagaagtgatagggtaacgaactatatgaacaaacacgaaaagaaagagaaataatttaaaagaacatgatacacacacacacatatatatgtacataaggccagatcttcaagtgaaggaaagaacgagaaggtcatcaaacgactccccctatatcctctttccctctcatcgaggccgtactaaacagtccatcgccagagttgaatccataagtaggtagggccgctgagggtgctgttgctgtcgccgccgctaccgccgatggccggagactatcccaaaagccatcccagacctcgtgttccggtatccgaccgacgcttccgcttctcatccgcctcatcttcttcctcgggtccacccagtcgtccagcccgtcgaatccaaaacccgagccagaagatgatccggaccctatcccactaaaggcagcgagactgcctgaccgcatcaattcctgggacggctcacgtttcatcccgccgaacgggttcatccgggaataggtgttgttcagcgccatcgtcgaacccgtagtttgcttcccggtcgatccgtcgaccagagaagagatctctgttgatgagccttcacgttcgccttcgtcgcctcctggcgaggcgctcagaccgatgaatgaagcgagcttccctcggttcgaattctttcgggcgtttgtaaagttcaaccgaagcggaggcaacgatttgatagcggtggaaaacgagtccgaggaagcctgttggccctgtagggatgatggtgatcgttgctgttgttgctgttgttgaggagcactttgaaaagagttcgtcaatggaggcgtctccgttgaggttatcgtggggagcatcaacgaggaagagatcgaaggtggttcaatcaccgtggctcctcccgagatgacaggtaaactagacagtcgtaacgggtgggacgtctgattgatagcgataggaacgtggtgctgagtcga

SEQ ID NO: 146 - DNA, 61904 bp, Xanthophyllomyces dendrorhous
ggtgccatagctcggggtgagaccaccacaaccgtcctgcataaacatcttccaaatatccttgacgtcgtcgagcgaaggaatcttgatcccttgagagtttccatgggaactattgtagtgaccaggtccggatccaaagaacccaccattgtacgccgttggaggagagaccacctcggtgggcgttctccgccgaggcgcggctggttgttgtaatggattcaactggggaggacgaagcacagggtcgggagaggatgtaaagtctcttttgggaacgcgcacattggtctccacgtgaggatcctcaccttcgagagagagcgcagggaatgcagacacaaacccgtcctgaagatctttctgctttgccgtaaggacagggaaagggcaaagattgaaaagggatgtcaattcaacataaaacggagaaacagaggaaactcaaagccgactgacagtcatgttctcagccttccacccaagaagaggaacgctcgtctccttcttaccagcccaatgacctgtcagtgactgaatctctttctcgctcgaaccatattgctgaagatgaggcaaataacaggcactgggcgaactttggctaagactgccatcgttgtcattatgcgcacggtagtcgctcgacaatgctccaaacaggctataatcctgataaatcgcggaggatttatccgctcccgtaggaggaagcacgttggacttgcgggaggacgaagtatcgaaagatgagccagaggaagtcgatgacattggtgacccatctgtcagagcggatggctgagaaggtaaggtagactggctaggattgtgtatttgagctgctcgccgttgctgttgctgttgctgtgatatctgctgctgcagttggtgcggtagctgaggttgcaagaaattctgacttgatagagacggatgctgctgctgtggttgttgaatggaaaccgtctgggcttctctcgcaggcgagcttgagagaggctcggcaaacggaaccagagggtaagtcgagccaagaaaggatggctcgtaggatgacgagagttgctggctgggatcaaagttgttagagtaggtatcagagagttgatagctatcgtagccaccggagccggtttcaggcaaactcaatcttcgttcgaaaaacaaagactcagtggtttgcggacgagactgggagggatatggttgttgttgatactgctgttgatactgtcgttgctgctgtaacatctgctgttgttgccgctgttgttgcggttgctgctggtgatactgctgttgatacagatgttgctgctgctgttgatacaacatcgagttgccggcgtcgctattcgaagagtcactgctagaggaaagacttgatctagataggacgttactttcggtaagatcgtcgtatggttgatggtgaagcgtttgaacaggataacagtatatggacgaggaagacaaggctgtcgaggaggtggatgagacatcgtacggctgggtcggacgaccatcaagatcagttcgagtgttgatgggctgagagtaagagtatgaggtagatgggaaaggtggagaatctgacgagttatgactcggacatggagctgattggaaaacgagacggtttgagagtgagtgctcgaagggatgaccagataagcgagagaaagaattactttcggtttccgaacgatccgcctggtcacaatcttggcatcgttcctttacggccaatgctaccttttccttctttgttagcgacttgagtttctttccctctttttcgtcctcgcctttgagttgacctaatttaggaactcgaggtttgacgggctttgtcctagtatacttcggaggcggaggttcgctgttggcgccatgtggatgaaacttgttacggtgacgggaaagaagatctctgtggaaggaagcaaatcaataagagatcagccagtggactatcaagatccatagggatatgcggtgcttggagacgatggtcaagtatgcaacatccggtcagagcctctaatcagcctttgtgattgtagagagatttaaaccttcgctcatcactacaagaagattcaggcaagactgaggtttaccaaggtcggtatccttccccgtgtctcagtcagaatgatggccgaagcttagatggtctataatgttccagagatctgatggaaaccgagggagagatgcaaaaatgaagagagaatgctggacaactcacgaccgagcgaatctttctgggcaaaagaggcacggatacggcctatcgcccgtatctggtgagagttagatatacgtcatttacaaagcacagaaaaccatcgatttataacgtcagttgatctgtgctgtctgttgtaacctcctctacggtcgtctttctcctcatcacaagtcgatatcgaaccgataaggcatacgaaaacaaagcagatgagagaaacagatacgaacgggcgcgcatatgcctagctacatgttgaggccgagtaaacgtagcgtcacaaagagggcctgttttaatttcataatttttcgggatgtcagaatttcccatccattcaccggttagcgttttagatttcaaagacaagaatgttcgtcaaccatgagaggaacgaaagcaagataagagagactagatgaaaagagtgatttgacgaaagaagaagcgagcgggaaagggatggttctgaagaacgataacatacatttgtttgtaccgcccatggttgtttagttggaaagtacgatcgagcgacagatgatgggatgtaggattgagaattaatagaagtcgtgttctggcaatgggttgagagacggagaatggtgaaagagcaatcggactggaaggatacgtggtcagcgtttgaaggaaacgggaaagaaagaaaccgtacgaaaggagaggaaaagggaagagaagactgtacgttgtgggctgagacaagaagcgagaaaaaaaaggaagacattgtctcttgagtgattgtgtatttactcttaccgttcaacttcctttttctctgcttgctctcgcttgtctttaattcttctcttttgcctttctgttctttcctgtgacaatgtttaagggtgtttctcttggatgtaattgtgtgcaatgcattttgttgcaaacagaagtcagtgcgaaacaacctgttctcttctgagatatcgctttcttcctcttcagactggatgttggaaggacgctttacgcttcagaagaacactcgtaccgtttatagagaaaggccctatagctgagatgcacgtcatgaatatattcttatgacgtcgataatcagactggcccggtccgttcggctctcgacagttcgatctgaaccggtcagggccggtttcgaatcgagttcaatcctaaccggtcacgtgttgtttccgcaacatgtgcggagggtaagttttctttctaccggcgtgttctaggccaatgtagatctgtcggtcgatctcttcttctgggccctcgtgcatccgtgcctgacgatctgttttcttatatccgttcactcagccccaggcgtacgagagcgatcgcttgaaggcccagaccggtctaggctgcgctctctatctttatgtccctccgaggacattcggtcggaaagtgagtgtgcttgttgagtaaaaacaaataacaaacaaacggcaagaacgaccgctggggactaaaagaacgaaaataacaaggtcctacttattccactctatctcggcaaagcgatagtgtaccagcaagcaagagaggagaaaggtggaaaaaaggaaaagagaacaaggggttcatctagtttcctccatcaccatcgttgcaaacctgaatgagacagggacctcgctacagtttattcgctctgttgtgagtattcttacccacgttcatccagtcaaaaggtttcttcttaaccgtccgggtgttttttttttggttgtttcctctcctcattctcctctcctcgcttcttctccgtctctatctgtttggtcaggcatctgtcgttcgtgcgttcgtttcagcacaaaggtagctggctcgtagagcccttaatttgaactcaaaacaaggggtggagaaggatctctcacgaggacataaacacaagaagcagactcacaccgcttcgacacactccttcaacacactcttttggcactcactcttttttcgacatcttctcataatgccagtcaatacttttcaatcagcgcctgccgtccttctcgtcctctttctcgcttctctcacctccaacgcattacacagctcggaccatactttagaacgacttgccctcaaggtagtcgatcccccatggaccggaacctcatatgacgatctctcctgggtttcctgtcaaaagcaaagctgtattgatgatcacgacgcactcaaacgggatactctttcttcaatatcttcatcttcgccatcagcatccctggtgtccggttcaagcgcgagcgcaacggagaattatatctcaacggctgcgagcacatcgagtacacctgctcaaacgacgtctacggcaaaagcagcacccgctgtgacattagtttcgagtttggttcctgatcctttgtatgttctccgttagagttccaaaaagatccctcttcccttttgattcattttgggcgtggctgagcctgatataccttccattgcttacacaatgccttcttcttcccgtctttctgacctctgggcttatgtatcactcaacatagccctcaaccattcgatctgtcactttctccaaatctgtcaatgtcctgccttgacagtttcgcctcattcctaacctcctctacctttcaagcctgtcggccgttctccttactctcgacctcatcagccttcaaccagctcatcagatcagatctcgattcgaccacagcggtggtcagatcgacgcttgacgaaagcatcgatggaaacgaatgcgagagttatctgaatgacgtaggaaagaatcttcggaagggctgtcagtcggatctggataaaggaaacgcgatagtgaatcaagcgttaataggttaggatactttggctctcgtttttttcttcatcttattgcactgagaattataatctgatttggatattcgctatcttacttgcaggcctaggagcctaccaaatgatgagaaatgcttcagccttgttgacctcctcgggcgcatactgctttgtagaagcactcgctagtgcagagccggatgatctgtactactggagtttatataccggttctccgtaggtttcctcctctctgtctctcttttatctcgttccataagatcgcttcaagaggtcttatctccgaaactttcgatacgaaacgcaaaacaggatcccggacgagactaagacatgctctgaatgcacaatcaagctgatgagcatatatgccggctttgcgacaaacactgatctcgccctttccatagtctacatgagcgctctcaacatgtgagttttttcgttggcttctctctctcgggagatggcggaaggtgaaatagctggtgtatattcgagtcagcgatgacttatttttttcttcttcctcccggcctaccagaacaaatgaagcgtgcggatcgagttggccgtccaacgctttggtgtctaagacggtcgagctcttctccacatctacagctaaagcaaaactcgaaagctcgatctcgctctctcttgtcatcgtctcttctttcttgggattccttgcttttctctaaatctacccatctgcctatctagcaggttgttatcttgatctccaaatttccggggatacagaactttcttcattccttttcattcaccctccccatctgtccatatatgatctcttcatcttcatatgtcgattccagcttatataccataatttgcataccctctcgtcttccttcgaatcagttccaatccctcaatcgattatgtttcttaaacccgactttcaatctggacatggttgtccttatttatatatcccttcgttgtttattatctgtatatcaatttatcatctccctccttcttctttctccttttgatttttttcctctgcttcggtacgattatctgatacccatcgaggatttctatctgaacaagtcttcttgccttcttgaaagcctttgatcggcattaaactcggaaagtcctgaacaagaaaagactcatcagatcatcgaggcggaaaatgatattaagaccagaataaaaccagacaagaaggtccgagtggaaaggagtaggaagtaacgacttagtctactaaagatacagtagattcattagggtgtacaaaagatgaggatacatagaacacaaaacctgatacataacacgcgacaccttcaaatgagggaggtgaacgagcgaatcgaaacgggccatacgcataagaaaaagtcgggagttcaaatcctgatggaaaataccaaatcaagtctcctcaatgtttaaaatactcagggcctcgtccactcccaaaccgaatggtcctgagactaggtcgcgcgtttctcaaggagtcgaccagactagccgttttcggtagttcttcggctgtcggtaggagcgtagtgttgtctacaacagaagcgggagtgggagtagcagtagcagtagcagaagaaggcagattgggattcaagagggaatggtgccgctgaacgaacgatattttcgaaggctgaagggggaggaccaggtgagtcaacgttgagggaaacgtagatatggctcgcaaggcgatgtcctatagaacatgaaactcgatacatgcatcagctctaaaagctatgaaccgcggttggttagaagcagcacaagcgtgcggagaagaacacgaacgagatcgtcttgctgccaatcaacgcaatccttcatcacaccaccttccaaaaacttgctcgtgatctctagctctgaaagtcccctcccggtgatcttatttacccaactagagagctctgttaggaaatccggagaaaacccttgaacaaagttgaattggagagatctgaggtctggtaagaggggtaagatgggtaagatctgggccgatgtcggtttaactagcaatttgcagcgcagacagagagataccaagttgggcgtccgggaaatcacataagatatgtgaggtgtcagtgtagacgtagtgattgtcagatgtcttgttatattccagacgaatccagaaagaaaaggcgtaatcatcaggaagacaaagaagacttagccatagattgacgagatagagacgcatggaaaggtcaaagacggaacctaccgaatgaacgcgccaactttgtccatccgcccgatcaaccaacggccttcatccatactaccgagaatgatgtttgagaacaaaatggatcgcacaacatcctggattctttttccgcccgcaagtcctaaacttctaagatcgacgtttcgttgatgagcagtcgcgaaggatgttggaggtagatactgtaggtcttggatgaattaagacgtgagaaagcgggtagagataagaagaaggaggaatttcagacagacgtaccaagagatcaacaatctgaaggattaattctgtgggtagagacagcagtccaacgaagttctgtttcgaagatggagctgactctgacgggaacctactatcccaagcgaggttaaaggtcagaattcggttggcggatgaggcggtcgaagtagaagcgggaaaggagtttgagaatcctgtggacagccggggtgtcgggaagggagacgcgtatttcgaaggggaaggaatcagcggtgatatcgctgtggatatcatgtggagactactgagtagaagagcgcaaagcaaggtagcggcaaccgagtgagtgaatgggtgggtgaatgaggtgctgatggttcgaaggagaacagaaggaaagaagaactcggtcaagcccggagaagtggttacgtcagtcggtcagctcattacgtttccttcctagtcttcccctatcggttcgtacaagtgctctgtatcttctccagtagctttcgcctgcgctatcgcgctattttgtcctttctgttagtggttctgttgtatttctgttcttttgttctggttggccttgttcaaagacggagtcaagactggctgctctgtatggttgatggttgttgtcgtaggtgacgaaatgagtggttgaacctgaagctgataaataacctcctgctcgtcttcagagaatcttttactttaactcttcagtcgtttctgtttctttccatcagatccttgaacatcttctctcttcttctttatatgtatctctcttgccttcataaagcttctttaagagggtacaaatgagcatcaagtatcgctgtaaacctggcgatgtaaccagcgtaacctcgaacggcttaattttcggtttcttatttttctcctctccttctttgtctctctttctctccttcttatcctcccttctctctcctctccatctctctttcttctgaatcaaatacagcgactagaagaagtctgttctgtgattctagatattttgtagaatctcaccaccctttcccctctttctttacctccttggccggtcttatcacccgaccaggtaagctttaatttccatcccgtcctgggcctatatctgctttttcgtttcctcttcttccctctcttctctggcccctacctctctatagcctcctctcagacaaagagagcacccatacatacaaacagcaggaaatctcgctcctcagatcacaaagggacagcgcgggtgggttaaatcagtgtcaacatttcgcataacgcaatgtttacgacgagatccactaaggtttatttctcctatcgcctcgctcaactcttcgcatacgacatcccggcattcgactcgttctcgtaggaagtttggattcaacagactgctgaaagatcactgatactgttcatttccatattttcttctatttccactcggatgtgtgttcaacagatatcagatcataaacaccgacaaggataacaacgccgcttacgctgaaaaattctccacgcaacactctaaatacaatatacatccaatatggccgacagaatgaatgaggtagatctggatttgatcattgaaaagctggtggaaggtttgtctcgtcggttttcaggattaaagggattcttcctcatatctgactttggcatcacgtaacttggacctatgtctgcttctccgcatgtcctttcgtccttcgaccgttgaatctttctcacctcatagtcagaggtcaccgacctggcaaaccggtccagctggcagagcatgaaattaggtttctctgcacaagaagtcaacaaatcttcatggagcagcccatcctccttgagctgtatgtgcttccctgaaccgtcttctctgctgatcaatgtatcaccgtcactgatcgcagcaccgtcattgtccctgacttatcagagaggcgcctataaaaatttgcggagatatccatggacagtattacgatcttcttcgtctgttcgaatatggaggtttcgtgagtgatcgtcctagtctttcttccttcttgtccgataagaatgtcatgttcactcatctttcctgtcaccgactgccaattgcttctctgcatacattccaaatttgaacagcccccagaatcaaactacctcttccttggtgattacgtggatcgaggaaagcagtctctcgagacgatctgtctccttctggcgtataagataaagtatcccgaaaacttttttatactcagagggaaccacgagtgcgccagtatcaaccgaatctacggtttctacgacgaatgtaagtcccagttcattctctcgtacatctcgtacaacgtcaaagtttagctagtccttggctggtaaattcagctagaaatgatggcaataggctcagtgtgtggagagcagaagcaatgggcgtgttcggggtgttctcatcgcgttgagttgaggtttcggtcaggggaacgtaccatgtcgtcatgtgggaatgaacgtattgagggatgaacgcacagccccgatatagacaccaacagagcttaataaacaagagtactaaccttttgtgtttgactattctttcacaaattaggtaaacgacggtataacatcaagctttggaagacatttactgattgcttcaactgtgtatgccatccgaattatttttttgaattttttaatcgacttttgccaattctagtaatgttgactcgggcttctatgtatgccccctcggacagctcccagttgcggccatcattgatgagaagattttctgcatgcacggtggactgtcgcctgatttacagagcatggatcagatcagacgagtcatgcgacccacagacgtgccggaaacaggtcagaactatcatcatttttccatcgcctcttgtgtgcgatataatgtcggacgaagtgatagatcgagggactaaaatggtcgagaataattttttaatgattgttaccacaggtttgctttgcgatttgctatggtcggaccctgacaaggaggtccagggatggagcgagaatgaccgaggtgtttcattcacgttcggaccagacgtcgtcaagcggtttttggagagacacgatatggttcgtctctcagttttggcttaatttgcctttatgaagtggcggcgtgctcattagtatgctcttttgcgctttgtttgatggaacggggctccatatatatacagcatctaatttgcagaggccatcaggtcgtcgaggatggattcgagttcttcgcaaaaagacaacttgttaccttgttctcagcacctaactagttcgtcccttctcgttttttcggctcctctatctgcctttgctctacatattgaatttgtcttgtaaaatcatcttcttcagttgtggagagtttgataatgccggagctatgatgtcggttgacgaaacgctcctgtgttcgttccaggtgttgaagccagctgaaaagaagaagtgtgcgtcagattcgatcccttactgtgcttctagtcattctgtcttttctagtaattcattcttactatttgttctttcgttcgttgccactcgacatgattcaattcatcttttcagtcggcgtgggaagcagttagtatctaaatatatctttcaacccgtcaaatgagacacgtgatgatctaatccttgactcatgttgcttcttctagttggcaggagtaacccttcaccaccgcggtctaagaaagcgcccggaaagaagtgaaaacagaagaacgatataaatcgctttgggcaggtttttaatgcatgttcctactctcactttcctttttctgcaaccttttacaaaacatcaaccttgctattcatcctctataaccctctctctccccaccctgatataaaaaaagaatgtctcgtccttgtgtacgaaatatgtctgcgtgcgtgtgtgtgtttcgcaatcgtccaagaggttggttggattgtttactgggggctttttcttccttcaatttctctttcatcgcggaccgatgagacttacattctaggctttatcccagtgcttctgttgagttctcttttttcgatagtcaattattcctcttacctgtcctcaccttcgtacacacctctgaggtaaacctctcttctttactttatactatgtacttcatatttctcgatcttcgattctaacaaaccggaataagttgttctcggttatttttttcctctctcactcttctctttttcgctctaatatctctcttctcccttatatccactcgttttcgtgtgccgcatgttttgtcgatgaacgcttacgtattgaaacctgagaggtaccgtgctgtctatggatagagatgagggcatacgttgagtcatgaagacataagaaagtgttttgtaaaaatgacagcaaaggatctgtaccctaatcaccgtttcctatctttcgttcaagcaaaagaccaacgacccgttttcaaagcccatctgtctagctcatcaatctccgttcccaccagcccatctttaagtctgttctccccatcttccggatcggccttagttgatgaaaggaatccgacgcctgaaccacccactcgggcaatataaggggcgaacgatgattgaacgagcgtctccataagagcttgaagggtttcagtcgagaagtctggttgaccaaaagtacaggatgcgcatcggtcagatgtgtcgcttggacggaagagaaaaggagagactttaccatcgggcaccagggttacagcgcaaccacctccaccggcgcctgtcaactttgttcgaagctcgaaaggcttatcagcaccgatccggataatctcttcgagggatgggtgggacacgccaagtgctgctaggtgtgcgtggttctcggagaccaagttctgcagaagaaggaagaaaaaagaagatgaaatggataagacacaatgtcacaaagagtcttgaaaggaacaagaactaacttgaagtcgatcgatcatgacagcacgttccatctctgaatctttcaagcatcgaatagcctcatcggcaatctgctgaatcgcttccaacaaagggacgatcacctctggctcctgaatcagtcgagcattcactcctgcaacgagagatcttgtatcccttccgatacgagaatctgtgatgaggaatcgaatggatgtgaagctatattcgaaatgtagaaagacgttcatcatgggtcaatcagactggagtatggcatatgaagcaccgtgtctgcgtacctcttgatcgcttccattccaccttcctgttttccctcaatctttcttttgaaagcaacagcgcctcctctcgtactgaccgcgttatcaatcccactcggatttccatggatgactttttcagctaagaacgcccatttgtcaattacttctgtgtcggccgtcgggattgttgattctctgccagtcgtcgttggactgaggtgagaaaagtggagaagaaagactagggcaagagaggtcgatagagcggcggatgaacccagaccagctcccatcggaagcgcagatcgagccgtcaactcgaacggctcactttaattgattgaacccccgaaggaagaaacccaacactttctccgtcagttaagagtctttataggcaaaaagaagagacagaaaaaacctaccttggcttccctttgctcaatagcaccaacaaatacaagaatgccatggttgccaccttctccctttctcctccgtttccaccttgaccagcgatcctttcgatttcggcgagcaatgtcgggcagagagattctggaatagacgcctcagtccagtcaggcgcaagtgaccaaggaagagaatcaacaggccaagactgcgtaaagttcaggtccgttagggagatggtaatgtttgtagacgataacgacgatgatgttgttgtcgtagcagtgggtgagagaagagcgtagcatcgaagatcaacggaagcagcgatcccggtctgtttttaagcgtagaacgtcgagtcacaattcgcacgtacacccacacacatagagacacgtatcagggtcagtgactgattctgaacgctgagttttgacgtgagcagaaaattagtgtcgggattggccccccaccccttgatgatttccccaaaataaacatgtccgaaagtgaattcgatttatataggaggaagaggaagagaaaaggcttagcaagatagttcttgctattacaatctaatcagacgtaaagatggccgaaagcctctgaccgaaggatgagagaaatgaataatcaaaggatgctaaaaccaaaggttgttataaggtacaactagacgctcttaagagcgaaatgtataaggaaatatagacagatgcaagaaggggaaaggggcaaaggggggcatccctacaatcaagacgggatgaagagaacaaaaaaggcgaggaaaagttaagatgcaatgagagcataaagctttcatttctcactcacaacaccatggactacagcatgttcgccgaacagaatgacctttcccggtgcactgacaagaatttcttctttttggctctcatcgcccgcaagtctggctgcatcgtctacattgagttcggcaagctgtccttcgacgccggctgtcgagttagaaggcctaacacgctcgaactgtctggctcggtcgacggcccagttggagtgaatgtccgaggcagaatcagaggcaggaggagtgagcggtcgggatgaatctgaggtagagactgatcggattgcgccagcgttcacaagagaggcctccaaatcatcaagcaaatcgtgagggtcctcaataccgacacacagtcgaatcagatgttcggggagacctcgctcggctcgaaggtgagcaggaatagatgcgtgactgaaatgcaagaacggaaagaccgacccaattagtcagccagaaattttagaaggcgcgaaaagaaggcataagaactaacctcattagacaaggcatgctgatcaaactgttcacggctccgaaactgacactgattccccaaactcgggttccgcccacgatggcctcactcaacgcgatatctccggtctcaaagctcatgacggcacctgcaccactcgcctgagagttatgaagttcgtacccagggtcagaaggcagaccggggtagtgaacaagaaagccgagggtgtgtaagtacgaggcgatcaggtgagatgaggcctgctgcttgtccagtcggagaggaagtgttttgagtcctcggagaagaaggaacgagtcgaacggagacaatgcatttcccatagcatttgggaaccaggccattctctgttgtaggcaaacgacatagatcagactctgtcttatggcaatggctttaggcacgacattcaaagcaagcaagcacgaaccttcccaatctcctcagtacgagtagtaatcacaccagccatgagatcgtggtgtccactcaaatactttgttccagagtcgtatacaatgtctactcctagctccaacggccgctgaagatatggtgacatcatggtgttgtccaaaacgatcaaggcgtcctgaaaagatattttccggtagccgagtcagtcggaaaatttcaaagacgtgtcatacaaagaaggtatataaacgagacttacgggtgctcctgagcggacgacctcgacgatggctcggatatctgcaatcttcaacatgggatttgttggcgactcgagaaggaccatagtcaccttgttgcctttttctaagtggggctttaatgcttgcgggttggttgtatcacaatgttggacgtcgaccccgccgtcagttccaatgtagcctagcagtcggttggttccaccgtacaaatcatctccagctaggacggtatctccgggcttaaccacacgaagaatcacatcgagagcagccattccagaggagacggcatgtgccgtagcagatccggagatcttacgaaggtgatgttctattcaaaatggaaggaaaaagttttgagtggaaggagaaaagtatcgagaagtcagtatcgagtcatcattttcttgcccgcgcaagaagggctgataacgatgtggggaagaagggaacggaccaaggaaactacgggtagggtttccggaacgggtgtaatcgaactgtccgttcattcccttgaaggtggccgtctggtagatgggcacagaggacgagccatgttgatccttgaggtccaaggatgggttctctacggtcgcactggtgtaaatgagagagcaatattttgttcgggttatcgaaccgatagggcaaagacgaatagaaattgagaggtcatcgaccgagcaagccaacaaaaggaatgaacaagtgtatcacgacgtcagtacaaacggtacagacacccatcagaagacaaaggcaggtgtagaatctaatataggaatgatcaagacgaaagggaagtatagaaagggcaaggcaggaaccaagaggaacgggacgactgaccattcagtagcgaatctccaatttcggttaggcggcagagatgacacgctgtctgcaatggatgctggtggagttgcgaatgaaaagtctggtttatctgtcattgtatatatgtgtatgtgtatgtgcgtgtgtatgtggatgggtggatggagggaagatgagggaggagaaagataaaagtagatggaattcttcgagggagaaaagaagttggattttttttttccaaatttccaatggcgtctttttcgcgccaggccggctcttgctatttacgccttcgtttctagctcgtccccggtcggcttattggatatcatagatgatgagagatatagattcaggaagagcagacaacagagaactcattttatttgctgataactactgtatggcatctgagatactcggtgggaaagccgagaagtcattgaagagattttcaaaggaggttgaacgagcacatatagaaactcctagtcacgtctgtttcttcaactcgccatctcatctcgtccatcgttgataccatcagtgaaagcatactaagcccgacatccatgccaccagctcacgttctcgcatggctagaccaggcagctaagccgtacgctcagccggctccaaccacgcttgcaatcacctcctctctggacacatatgcttcgctcaagataaagactgatcagttcagtacgtgcatcatagggtttcatcttgaaagagttttgaccgatcaaacgagataatcttcatctaatatcgatccttgtctttttttgttgcccgaatagcatatgatgatggccggacactccttcttctctgtcttcatgggacgcttccaattacatattcgaaagcaaaatacaacgttcctctcaacatctggttcccgatcgagtatccctccttaccgcctatcgtgtacgtcgtgccgacgagcttcatgcttgtacgtaaaggaagaggcgtcgatcttgacggaagagtcaacgaaaatgagtgggattatctgaacggatggagaaggaagccagaggtacgatatcatccggtccagtagtaggatacaatatgatagtatgaggctgaactcttccctttgtctcgctcttacggtcttggctggcttgatgttcattgctgttcacactgaaggcacactcgatccttccgttgttgcagtctctagtggacgcattctcaatctacccacctgtatatgccaaacctaaagacccccctgcgatatctggctcaagacccaatggtatccaatctcagcctcagtctcagtacttacattcatccgcgtctacccctgaacccggcccaacgacgaccttctcttcatccacacgaaattttcctattcaggggagtgaaagaccatctgcttcacctccgccaccacctcctcttccgcctgcagcttttcctccgggaccaccgttgccacctataccctctctgaccggtcaatcatcgcccgggtctccttcccgttcgttctctactggcgcgactgaaggggtttcctatacccaccagcagcaactacagcagcaacctgcttcatatcatccccaacataactctcactcccattctcaccctcaccctcaccctcacctccaaccatactcatatgaccaacaacatcaacgacaacacagttcaggcccaaacacaaatacaagcactcatccaaacttactaccgaacgctcactatcaaccgacaccctcggctcaacagtcattctctccaccccaacatcaaccgcctcaccaagcctttcgacagtatcagtacacagactcacatccagacgcatatgctcaaaaccatacatatcatcattccttttcgccctcgttgagcgatcctagagcctcggttcagcctccctctcgcgccaatactgcgcccggaccatcccaaacgtatcatactccgcctggacccggacctgcttcgcttgctacaacctcagtctcgataccgcagtctcaagctcgaccgcagcctcagactcaatcagtccctatcaaagcccccattcccgatcttttgggaacactcgatgaccctcttccagcatcccgaactcctaccactcagcctacagatcagccggctcctcctcctccaccgcctaatccagagatcctccatctgcagactcatcttcaatcttcgctcacttccactctggacgccactctatccgcgctcgacactcaacggactcatcttcagacaatcaacgatgatctgcgagcggcaaagcctgcgattgaagatgaaatggccagattgaaggcagtgagggatgtatgcatgtctgtaggcgatcggatgagaagtttggtggctttgggcgaggacagagtcagatgggtcgccggaagagaaggaggcgtggacgaggtcatctgtggagtcgatctcgttggaaatcagtgggtcctgtacttcctttgttgcttctctatcttttatacacttaccgaattcttcttcgcttttgactatagattgatcgacctggtggccgaagacgcagcaatttcggatacgatctatcagctcaatcgagcgctcactgcggaaaagatcgatctcgaacggttcttgaagatggttcggatactcgctagggaacagttcatgaaaaggtttgctttgatttccttctcttgttctctctcttgttcttttctctcttctaactgctcgtgagagatatagatgctgatgtgctggtctctttgtgttggctgggagtagagcattgattgaaaaaattcttaaaggctgatcgatgcatggcgatacaccttgagctcctctgaccttaattaaatgtggttgtatcaatgtgctttttctctccatggacttgtttatctttgataggaaggtggagaaagtagttaagcaagcaaggtttacattagaaaatacaagctcacacatttgccctcgaagatggttacgcatcggtaaagtggatggttacatcgtttcggctcttccctcgtttagtttcttcgtcttgctccgttctccatccggctaggactctctttcttttgtactccttcctcccttctctttctttctctattcttttttcgtttccgttcgattctccttccaaaatggtctctccaacgatcaacgtacgttctgggcacctcctgcatgattcaccatcaaacatactcggtcgtctttttctggcactgacttttttcttctcctcttttttttttctccgcgggtttttcctttcccacctctccctctttggcatccatcttcacctgatttccttctctttgcttattgtctaccacttgtctcgctcttcgatctcgcaaaataggttctccgacataccgccctcttcaccggtcttttctacggaattgtccaccgacagacccttcagaagcagcacgacatcgcgcacgagcttcagaaggagcacgaccaaaagtcgcttctcgagaaggcccaggaggcttggaaggttcagcagtccggcaagggcaagaagcaggatggtgcgttctctttctaggtcttttcctcttaagaaacttctttttttcctattagatctcgtatgtgtgtgttgtgcgtgttgctgggacaacttaggaaagatgctcagtttggtgatctcgccatcacgtctcgagaggtagaaggaaagaacagggttggacgagcttagaaatcgttggcgtcgttccaatgacaaaatctggaattgggttgatctttggttaaaaatcgttacttgggtcaagatgccttcgccgtctatgcctcaagattgtccttgttgtcttctttctcatacaatatttcctacgttccggaaacccataaactgatctctgtatcttctatatcttctgatattcctcatacggggcgaatcaacattctcatatttctccttacccattctcttcgtctctcgcatgatgacgttttcactctagatggacccatccgagacccggaagatcccaagtatgttctctctcttctcaactccttatgcttatccactggctaaaaagactgaacatacttatttttcttctaacctcctacgtgtgcatatcgtatctttctcttcacaggttcgacttagaagccctcatcaactgggctgccggggagaccgccaaggcctaaacgttctattcgcactgtttcttcatctctgtcttcctctttttatctctgtttcttgtctgttgagaacctttgggaaacatggaggaagaggggctgtgaaactgggaacaaggggggcggtgaatggtgagagtacgaggtcgaagaggcagaggaggagggtcgtgtgtcttgtttttattctcaatggatcgcagatcgatgtgttccttttttttctcgtttccttttcctctttcctgagttaaggttcaaccaacctttgtctactgtgactctgccaaatcctggttccttgtctttgtccgaatccagcatcagaaacagagaaaacaccccgaagaatcgactgagagtttacgcaaagaaactgacaagctgtgggaggaaacattcttcatagacgcacaacgcggtcgaagagaaatgtagacaagcatatgatcaggaagatccaatcgtgtgttctgtgttgtctgaaagtcattggatagactaaaaatacatcaacggaggtatgcggcaaaaggaaacgtgggatgtgacagattaccaggattcaaggaatggaactatctgtaatcttggacgggtctgtaggtctgtgtagaagttgctcatttatagttggtgctctttcgatcaaatagatcgatgatgttccatacagaaatacatcatctaatcaaactttgtctggttttggtgtaagccaaaaattcagaagaaatctttcgtatgtgattgagtcaatcccagcatacgtttggtccgcgatattctcaggtagagagttgaagtcctggacgtaggtttctcgagctgacgaacgggttagaaagatgattatgtagggacaatctgcaggaagctgtacgcaaatcttttttggtagatctagtgatggtagcggtgtcgaatcagatgacgaggaggaagaggaagatggtggtgacgggttgtcggttgaatctacaatcggaggctctgatccaagactccattgaaaacccggtgaaccagactgagtaaggataagaaccggttgaagctctttcacatcagatattgaggcaatccgtgtagcgatagctggatcgattcctgttgaaactttccccccgtagatgatgatgctcctttgtctcaacagctctaacagtttgagattcttcttctggtctggtgcagagtctaaatatattgcattcaagcaatctcgaaacatcttgttcagatccttgtagtttggatgctgagctggactgttgcatttgttggcaagttcagtgagatccctcttgaagtctttgaatatccgaagggcgcgtgtattggaaagcttgtcgttgagtatagatacactctcgagagcgtctgttggagactttttgggaggtaccttctttttcttaggaagacctgtagactttgaaagatcgatatcatatttctatcaagcgatgtaccaggagttttccttgatttctgaaataaccggatatgaacgagagactaacagatatacttctcccatcaatactgatagatgctagggagtcgaggtctttcaaattcaagacaggtatattcaatttaatgctcgaggttctctttttcagccgatcttgtcctccttgaatctgcagttccgagatgataactccttccgcagacgaaggcttagtcgtagacgtcgaggtcgaaccttggttggatgaacacagagacgggtgatacgatcgttttgagatcgaagagagagtaagaatccgtgttgagcatacttgagaagagttttgaatcgtcaaacgaggtacaagccggaaagtgtattgcatgcgccgagtgaatgtctaggttgaggtcgaggtcgaggttgaggtcggaggtcagacaaacagttcttattggtctggacgtgcccgacgcgtcatatcgccatttatcttcgatgatgattcctcaatcacgcggcgtgataggcgtgtcagatccgcgtgatttggaaggatcttagcagaatgcaaagtgagaacaaacctcctgatggctatgaagaattatgaagaagagacgttttgagaaagatagggagccaagcgaactacctgaacatatgatgcatacatttatcgagagacaaatcatatatcacagcgcgacacaaacagaagtatatagagctcatgagataaaaaggattagtttgttgagatgaaaaaaagaaaagactttctacaattcaaaggctcctccccagccaaacttttgctgtggcttcccagactcgagatcttctagttctttcttgaggatatcgatctgaaaccctcggtaggcggctttgactcgttcaacgttggcttcctggataacgactttcttggcggagctagtcccggttagaagggcaacatttgtgccgaccaaaagctgcatagccaagtcaaacagtcttggtcaggacacccatacataaatagcttgttcagaggtcaaagaaagatagtccgataacaaaaggatgactcacgccaaaggttgagacgatgaacgtagaaaggaaggtggtcaagggtcccggttccgaaaattgtcgtttgtaaacttccttagacacttgaactatatattatccaagacaaaggttcatgagcttctgtctgtcttataatgtgcaggtatatcatagaaaaagacggaccatgctcgccagattccatgatgatctccacgggcttgggagcttgtctaagggttacgagcgctcggtgaatcccgactcgacctctccaggcaagggccagaccaacggcggatccaacaagacctccgacgaatacatggctgtaggtaagggaatggagggattaatttcggagataaaattgataacatgtcagagcctgtaagaaagcctagggaaagaagacacatactttctgactttgccagccgccttcttcaaggcttcccgatctgatggctcgagatctttagagtaatgtgattctgcgaggtccaaataggcctgttagatgaaggagtgagactaagggtggtaagcatagcgaagattgagcagatcagaaacatgcagagctaacttgttgcttagcattcagtcgagatcggacgtccatggctgattgatcgataactagtcagacaggcagatgaatggatgaagagatgtatgtaagaagagtctttgaattcttttagatgggttgcttatgattttcctaaagaaagaaagaaaagaaggaaggagaaaggcaaagagacacaagatggccttgtgcttttaacgcataccattgagaatctcgagcgggtgatgtcgtcagccttttcctcaccgggttgcgtcggcaagagttgagggtaaggaggatgatgacatgagcggataaccctaactgatacgtgtgatggtgattcaatgactaagcagcagttgttgcatggtctgtgttcaggaccaatgacgttgcgtggtttgttgaattcagatgctgactaagccttaaaatgcacgtgtaacctgaacccaggtctagcgaccgagtaaatccgagcaggaccgtgagtcaaccgctcctgttcctagatccgccggtccctttttcctctcattttttggtccgtttcctttacgtctctgttgaacagttctctttcctcaacaccatcgctgtgtatcctttcttccaccgttccctccattcttaacgctctgttcttcgttcttccacctcctttcctcttccacctccaaaacttcggaagccatgcttcgacgattccaaccttcgtcactcagggctctcaggcccacagtctcgtcggtctcatcaagacctgctctcgctctcaaggccaggtatgcgaccgcaccatccccatcccctcatgacaactttgcgaccagcaacaactcatattacacctcagagtgagtccataatgtttctgttgttctgcctggtcgttttatcgccctttcttcggtcattttcgatctatggtcggaagtggagtttttttttcctattcctctatattgttgagatcgcattccttgaaagtatgatggactgcgactctggttccattccatcatcgctgcctcgccagagtgctcctttcgttttgattttgtgatccgtataacgatcaacaccctccacttggagggggtttttaacgaaccagaaggaccggaaaaacccgggtctcagtgagagatccataggcattcctttcgtcactcggagcatcaccattggaccaaatcatgattcgaataccatcaaatgattctcgtctcctttgtcatacagacattctaactcatcctcgttttgctttccgtgtctgatgatagaatgtaccgagcctggaaagaggttagtctcactgttctcgcttttccatcttgaaaaaaataataacaacatttctctctctttttatcttgtactgacaaactctttaatcttcactgcccttctttaggatccctcctccgtacacaaatcatgggctgtctactttgctggcctcgacggaggccttccttccgcccaggctttcaaccctcctcctggatctggaggacctgcctcacttgataactctcaccccgctaccctcgccccaagtcttcagaacggagatgcctcgcagctttcggaccatcttaaggtccagcttcttgttcgagcttaccaggtccgaggtcaccacactgccaccctagaccccctcggcatcatggatgctgatttgagcactgtccgaccggccgagctcgaccttagctattacggctggtccgaagccgatctaaacaaagaggttcgattgtatttgatctctcgggtcgaatggatatctaatgttgacaaacctctttggcaatctgactgccactacaacagttcactcttggtcccggtattcttcctagttttgctgccgccggaaagaccaagatgactctcggagaaatcatcaaggttatgaaccgaatctactgtacgtatccatattctattttcaatacaattcttatcaactacagtgttctgataaccttttacattcttggtcacaggcaaggacattggtatccaatacgtccatattcccgacaagaagcagtgtgactggatccgatctcgagtcgagcttccccagccgtggaactacactgttgaagagaagcgaatgattcttgaccgtctgatgtggtctgactcgttcgagtccttcattgcttccaaattccccaatgagaagcgattcggtcttgagggttgtgagagtttgattcctggtatgaaagccatgatcgacaccagtgtcgaccagggcgtcaaatctgtcgtcatgggcatgcctcaccgagggcgattgaatgtgctcgccaatgtcatcaggaaacctatcgaggctattttgaacgaattgtaagccagaattctcagttctgtttactaaaacaccgaccaatgcacgccctgaaccgagctgattcggtgctcttctcttactttgccttcttgataatttccttcatctcttcagcaagggagctgctagtgacgacgactctggaggaggagatgtcaaatatcacttgggagccaactacgtccgacctacgccatccggaaagaaggtctcactgtcactcgttgccaacccttcgcatctcgaggccgaagaccccgtcgtgcttggtaagacccgagctatccagcacttcgagggtgacgacaagcacgataccgccataggtattcttcttcacggagatgccgctttcgccggtcagggtgttgtctacgagtcgatgggtatgcactcgcttcctaactacggtaccggaggaactatccacatcgtcgtgaacaaccagattggtttcaccaccgacccccgattctctaggtctactccttactgttccgatatcgccaaatcgatcgatgctcctatcttccacgtcaacggagacaacgccgaggctgttaccttcgtctgtcagctcgctgctgactggcgagcggagttcaagaaggatgtcgtggttgatatcgtctgctaccgaaagtacggtcataatgagaccgaccagccttctttcacccaaccaagaatgtacaagaagattggagagcagaagccgatccttcaaaagtacatcgaccagctcgttgaggagggtaccttcaccgccaaggaggtcgccgatcacaaggagtgggtgtggtccatgcttgagaaggctcacgagggttccaaggattacaagccttctcccaaggagtggctctcgtcctcctgggacggattcccgaccccgaaagccctcgctgaggttgtccttcccgttcgacctaccggaaaggacgaggagaccttgaagaacatcggaaaggtaatctccacgtttcccaaggacttcgttcctcacaagaacctcgcccgaatcttagctggtcgaggaaagaccgttgatgagggtaagaacatcgattggtcgaccgccgaagctctcgcttttggatcgctcgctctcgagaagatccatgtccgagtttccggtcaggatgttgagcgaggaaccttctcccagcgacacgcggttgttcatgatcaggagaacgagacccagtacatcccgttgaaccacttgggaagtgatcaggctaaattcaccgtttgcaactcgcatctttccgagttcggagttcttggtttcgagttgggttactctctcgtctcacctgattcattgaccatgtgggaggctcagttcggagatttcgctaacggttgccaggtcatcattgatcagttcatcgcttccggtgagcgaaagtgggttcagcgaaccggcatggttatgtcccttccccacggatacgacggtcagggtccggaacactcctccggtcgaatcgagcgattccttcagttgtgtgatgatcacccgaacgtcttcccggatgccaacatggtggagagacagcaccaggactgcaaccttcaggttgtctacccaactaccccctccaattatttccacgtccttcgacgacaggttcaccgagatttccgaaagcccctaatcttgttcttctcgaaaaaccttctccgacatcccaacgcgcgatcgaacctggaagacttcactggtgactcgctcttccagcgattcattcccgaggtctcgaccgagattgcccccaaggaggaagttaagcgagttatcctctgttccggacaggtttaccagaccttgctcaaggagcgagacgagcgaaagatcaacaatgtcgtactttgccgagtcgagcagatctcgcccttcccttacgatttggtgacgccttaccttgacgagttccctaacgctgatattctttggtgtcaggaggagcctctgaacgccggagcttggtcgtacgtccagcctcgattgttcaccgctttcaagaacaccgagcaccacaagcaccgaacgccgttgtacgccggtcgaaacccaagcagttcgcctgcaaccggaaagaagtcgatccatttggccgagatcaaggccttcttggatcaggcgtacgacttgtctttgactgattaagcgagactcataccagttgttacccatgtcttcacttcctcctccgtttcgtctgtctgggcccgttatgggttctttctaatcgtgtaataatattcgagcaatgtgagggaggtggagggatgaatgatgggaaagatgagctgtgtttatcctcatttcttcctttttctctcttctcggcatcattactctactttatttcttctttctcccttcctctcaatccatattgcctcaaatatcagcatggtcattgttcttcttctttatatctacgcttctcgaacgaataagtttccaaatatgtcagccgtactttccatgcaaacgtgggaagaacgattaatcgactcggttttcgttcgatgacgttatatggtcaaatgagctttgtcattgcgcaactaaccatcttataaaacctccacccgataccttttgacctttcgaccttttcttctttcatcttcatctcgtccatcttacacatcccatcaacttaccatatctttcccacaacctaataatgacatccaccgactctgccaagcctgcgttttacttgtacgtccgtcggctttctgttctccttctttgttgcaccatctttataggcttcaatttcgttctctttcgtccgctaccacatggtacctaatctcctatatctacatcatcatttacgaacagctttgagggatccgcatggtcgactgcgcctcgattggcgattgaggaactcggatacgatctcaagaaagacctcgacctccacagtcttcctctcggagaaggagcgaattttgatccatcttacttgaagctcgcaaaggagggaaccgttcctgcgctggttgacctccagggagaagtcctcgattcgacatttgtgagtctctgtcttcgatctctgttgcttatcttgctgctatgatctcttagcaagaagaagctacaagttcgaaaattctgatatcgttattgagggtttattctgcgctggggacggatacatttcttgttcgtgtttttggagggatagaaagttgttaaatacctagtggccaattcaccaaagcgaattacccttgaaccatcctcacctaatgtgatcgaagccgtgcattccgatcaaatagacccgaatgatgctctacttgggtatgcggtagacgatgagtctcgaaaggcgaaggggagtgatctgcctggtcaattctggaatggtcgacaacgttagtagttcttgcatttatttccctatcattctcttcgattgtcctctaacaaagtttcctgatgctaactatatatactaacttggcatgaaacagaggctttggagaaatacgccaagtcctctcctcccgagttcaaaaacttttacgaggagaagatcaagtacaactcgtactttgtcaagttagtttgtcctttctcaaaaatgcatatcaacgtgtgttttctaaccgattcggagaatcatttcctctgatcaatccctaaagaatttactctggtgaagcctcggacgaggaactcaaagagtactatgctaaagggaagaagctctggagcaacattggatccttcttgagtggtgatcttgtcaaattcctccagaacgataggaaaggaacatttttcgctgggaacactcctggcgaagttgactgttcgtcttcctcgttctctctataccttctcttaaataccatatagagcgtgtatcaggtttgataatcgaaatgtcgaattgacatgtatgtctcttcacttttcaatacagtccatgtgatcgcttggttggctcgaatcataacctctggcggaggagttgaaggtgttgagaagcttactggcaagcctctggacaagtctgtcaagggctactacgagtcctggactagccgggagagcttcaagaagctcgaaatcgtctgagcatcttcttctctcttttcgtttcctttcaacttctctactccatctgtatgtaagaacatgccatctatgctgtcttctcatttttgaaggatggttcttaggtattggatgatcatatgtaattcatctgaacgttgtcttgttacccgaggatcagaaagagcatctcccaaagattgatgcagaagaacacccccaaaagaatcagggcaagaccattaggaagggaatcaatcataacgataaaatacaggagagagagaaaagagaagcttatcaggtagagtatgaagaaacgaagagaagggtatctgcaaaaaccagacaaaaacgtgtctacgaataaatgaatcagaagaaacaaccgcaaggaaggaaaagaagaatgatgaacaacaaaggatagatcagagatatcggcagagaggaaaaagagatgtgcagatcagtcggcgttgatcttcttgatgaaccgacgttctcgctcgcctgttactttcaaaatgccttcgtgctgtttgtatccccccaaagtacaaatacacatacacacagaaaataacaagaggccggtcaacttctacaatggatggaagaaatcgagacggaggacagacaaacctccaatgtcttgacgacctccgagaactctgcgctatcaacggcgacactactttgttcctctagctttttgaccacatccgaccatctcatccctttacttccggaagattcgacgagctgggcaatagctcgtttcaagtcagtcacgactcggcgctgttgttgaccggctccggtgttgatcaaatcgactattcattaggtttacagagaggaagaatagtcaggattgaggtcgaaaagaggaaaagaaagaagacgagacatacgatcgatctgaccagtgacagggtcggtcttttgagtggattcaagtatcagttttcagatctcgagagcaaagcaccaacgggaattaggtacaaaaagagaaaaaagtactcacagcactctctctgatagcttctctgatcagccgtcctccctccttcacatcttccaactcaaccgtctctgaaaacctcattcttgcatgagcttctcccaatcggatcatactttccaactgtctcgtcgtagcagtgattcttctctctgcacttcttggatcaattccgactttacgcatgtcgacataggcttggacgagcgcctgggaggcttcttcggtaaggaccggatggattttggatcgggcgtaagtgatatacgccgtaaggacatcgatcggctggatccgtgggggaagaggaggggattaatttagaaaagaagttatagacacacaagaaggtaagctcaagagcagaatgtctcccgtagggggaaaagaaggtgggaataacaagacatacaatgatatcggtcgagccagagtctggacaatcttcaaggtagagtccaacaaggtgcttagcaagccgtcgatccatgctctcatcaattttgtcgagcacgaggtagagcaaatcaaatctagaaatcaatgtgggtgggagatctgaagaggaatagaagaaaggaagagtaagctctaccgaggttacaaagtcgggatagataaaaagaacaagacatcacggaccaatgttcttcgtgatgggccaattgggatctgatgatcatggatcatagtggatagagtcgaaagttgaatcagccaaaacatcgttaggaacagtagacagatacgcatttggaacaagatagaagaagaaactgactatatttagatcctaccggattagcagccgctagaatggatgttctcgcattcaaagtagtgataattcctgccttagcgatcgataccgtttgttgttcctgtacgaggtccgtttatactattagttggtctatgatcccatgatgccagaaaagcgcaaggagggaagaaaggacaaaccatgacttcgtgaagaacactccgagtagcatccgacatcttatcaaactcatcgatacagcaaacacctccatcactcaacacaagcgcaccactacgttcaatagttaaacggtaaaaacacgagttgtcaaaccacgtcagctgaaattcgtgtagttaagatgatacaatgcagtttaaaacagacatacgattcgagaacaagctgtttcgaatcaggatctcgggtcacataagccgtaagaccgacagcggatgatcctttacccgaagtgtagactcctcggggagcaattttgttgacgtactgtgttgagcataagggcaagttttgtttcttagcaagttgatctaaaattgaagaacaaagtatacaaatttccgggcggaatgaaaccgaaaacgacgaacctgcaggatctgagatttggcagtaccaggatctccgaccagcaacacattgatgtctcccctatatctcggtccaccggctcctcctccgcgagcgatactcttgttcgttccaccaaacatctgaagaaggatgcccttctttacgtcatccatctcccaaatactaggggctagactcctcgccagcagatcgtaaacatcctccctctgactcaattccaacaacctgcgctccatctcctgatttgcgctcaatgcgtcgctcccatgttgcattgatctttcgtgagagcccaaaacctcttcatcgtcctcttcacctccaataccaactcctgggggtttcccctcaccttgccttgtagtaggatcgtaacccatgcgtgtggcgttcgttcgcttgacatgaacaacatcaagatatgttttgaagagtgctttgatggttcgctgccgagggtttgctcggacaggaatagatcggaagataccagtgatcatgacccgatctccaggcttggtcaagtctacaagctcatcataaacgcaaagggagaccgtgtgaggtgtttgtccgtccggcacggcatctatcgttgggtcgaagaagatgatgatgatagcgatagaacatgtcaacatggggtggagcaaggaaagcgccgaataaaggtagatacaaacctggcgtctcttgcaatcgaacaacttgcttatccgagaatgtgcacctgttgtgaatcaagctcatggttcccatggaccgacaggcatccctaggacattgactaggctcggcgatctttcctcggtcgatttctgcttgagttgtatgagaacagacaagacatctgaagaaggctgcgaagaagaaacatggtataacaggcttagcattcagaggaagtgaagtagaaagcatgtcaatatactaaccagtttgcatatcgggaatgataggcgtagctcggatgacaaggcccttgacgcagaccaatttatcggtgtctgaaggaacattccgggaatcaacgagacgcctcccttggttccaattcattgtagaagaagaacgggacaaaaacacaagaactgaccatttgggtttaaatctctcatgttgacggtcttttctgcaccaaatggtcgaaccttgtacaatgatgcgccaatggctcgaagttcctcatctcctaacgcgccctgcatgccctgcatgccttcatcctggtcctgctcagccactttcaacatacagtccttgagcacttggtccatcaacgggaccatctcctgaggatagttgcacaattgatagtagagtttcttagtcggtgggtatgccagcaagttgagggtgtctaagttcaagttgttttgtccggtctgtctcatcaatcggaggtaagcaacatatgtcaagacttctccctgtcgagagttcgagagaggaacgtaatgagcgcctggtgttcgcctatcgtattcctttcgatacttgagtttgaattctcgaaggaaagtatcgaacaaatccatcgattcctggatgacgatgttggttccccagatatacttgaccatacctcctacctggctagcctgagcatctgatgagtgagttgactgggcagagaagactggattgggatctgatgatggaggctcggaaccttggaataaagagggtcggtcgtttgaaggaagagggacctgacgacgagctaaggcagcgggagtaccggaggtcgagggaagggaagagtgaatatcacctctgtgggatcgatgaggtgtggaaccattagatctattgatataaacagcgaatagctgatcagctggctttcaaaacatgtggaaagacgataattagatgaaagcgttctgtacccagggaagaagagaggttcagatccgtcgcttcgagttgatgacatcggaacattcagccgatcgaagtttcttctgggtgtcccagctgatagagaaacaaaagcgaaatggattagtacttgacctgtacctagcaggtttcaatcatgagagcgaagtaatgcagtaaaaccacccgctggacattgcaccaatctagttgatcttctagcgctataaatcaataatcaccattgttgacgccgagcccccttaagggagaactcatcccagtgagcactctgcgggaggccggggtagctctaggtgtagtgtcttggtcaggcgcatccgaggacgggaagtgaagtggggacgaggccatgatgtaacgtgggttgtgggttgtaatgagtggtgtttggaaagaatgatcaaacaactcaagcctggacgcgtcgcatagatggttggttactatccttaaacgcgtcgaaatgtgacttatgtgaatgattcgacgcgttagtatttgaatgttgcacgcgatagatgaattattttgacaatgacgtgtctgtttgctgtcttttgctttgctgcattaaccttcatccttgcctgttgtgtgaccccgcttgccatccttttggaggaacagctactcatacactgatgaattacaaacgatcttcgatggcaccaggccatacaaatgcccctatggcctccatacctcctggaggaggaggccataatggaatcacgtaccctatcctccgaccacatgagatatctgcctgcctccaagaccttcacgttcagttgtctgaggaagaaatcacgaagcccacggcctcatccatccagaatgcttgggcgcttctacttcagacatttacaggtgtaggatttcattcatttgaaaatccgagaacggttctactcggcatggtcgcgtacggcgtacgtcggtgtcccgttttgttgcgcaatcacctcttaggatggagttcactcattttggctttgctctctcttcaactgacatcaaccgcttcgcatgttgattgttatgacaggatcttttgaccgaagccaccacgtttcatatgtttttcttgcatgtcaaacggctggccaaaattgctggggtcgagacattcaccatccaagacttgacaagaccggagccagcgagagtgagagactccctatcgggcgtgattaatttcgccaaattcaagtgggtcttctcttgtgtgttcacacatcttgttgaattcatatgctgatgatattgaactcgccggcatcgtctagacacacctcaatggatctgtttgaggagagaatgatagaaggagagcgaatagaagaacggtgcgttcattctcttccaacaacgaattgtacaacattccggatcgttaatttatatcgattatcggcgcatctcttgcgtctgtgtatatcaaactgtgggattttgttgccagccttcaaatgctgcaaaatgagcatcaaaatgtggagcatgagattcaatccgtcaagtctgttgatttattcctcttcctctttcgaaggcgccatcattcctgactttgtgttcccgtttgatctttctattgtttcttcctccttctagacaacgaaaccaggcggatgagtctcttgttgctcaagctgaacaacgtgttgaaaccatcaacgcggagcttactctactcgctagggaagagaaagcgttgaagcagagcgtatttgctgtgacagaagaacgaaagaaactcaaagaacaacatgttcgtccctttttttttctttgttaactgttccaaaaatcagtgacttgtgtctgaaaagaattttgtctacattccgtgttctcatgttttaggaaacacatcaagcagagatcacagcgctctcgaacgatatagaagctgccaacagccgactagttcgatcacctgaacgtgtccgacgaaacattcttgacctggctgagaggacgaataacgagaaacagcttctgggaaattatcttcggaagggcagagagcttgggatgaaacttgaggtgatcggttcccttgagcaagtatgttctcaaccaggtctttttcttttgtttttctatactgttttcctcaacgccagctcttactttttgatgctttctttatcctttatcttgtataggaaatccgagagctaatcgatattcagaaagaagccgaatcgacacaacgaacattccatcagactcaacacagactcaacactttgacgaatgatttgtcccgagcgatcgtgaccagcaattctcagacaactcgactagaggtaagtttttgtttctatcgttgcttattgaagatatcatggatattaatacatcgcctttttcttccttgttcatttatagcaactgcaaattcaattaacaaacgcgacagataaactcaatcgggctcgagagtcttgggccgagaagaaggacaggttcagacagagcatcggttcgcttagagaacagctcaaaattgttctccaagaaaaagatgaagatgagaaagcactggaggcaaaagagaaggagtacatgattcttaaggccgaggtccgttctcttttttgacttttagatcaaaatcttaagtacaatcttgcaaaaactaacgatcagatggattggcgaactcaacagagcgacgagtatctcgctcggaaccaagcagaggcaaacgcgttgatcaatgaatactggaaactccgggaccacgtccgtcagtctaaatccatcttctcatcctctcacactctcatactctcaattatatccactttgtctaacgtcatgtatatgtctgaactggtctgtctgaatggggtgaaatacgacaggagcgtacatggacgagatgaatactaaacttggactcggattagaccattcataaggcactctttctttactcttacttaacttgattcttcaccttctatgctgcttgtccatctgagagacacatgttcttcttctgagtttctgtctttattcgatttccttctgttctgtcatctttatttttgaacctagttttccgggccttattctttcttcctgttaattgtatctgtacactagatatcaacaaacaaatcttaccaaactaaatctcagatcttcgggtcgatttgcctgtttatcgcctgttgatgcaagcctttacctattcttgacagcaccttccttcattcataataagtttgtacgatctaattgacccagagctctgttgctttttttaaaaggaagtgttggcatcttgttctctttcctttgatctcatctcgcccacctggctaatagtcaagagcttccaagaaaggaaaaaaataattggttaaaagaacattgtaaaagaggaagaacaacaacagctaagagtgcatacaaaaaagaaacaaaaatggtgcagtagaaaagaagatatagatcgtgaaaggatagtcttgagacagattggaaatcggtgaaagatttgaggtacacagaaggaggaaatcctcttctttggaccaacacactctcctccattttcgatctatgttgatgatcttgtggacgagatcaatagaagatcagagatccttgtactgcttgataacctgcaaagaccggagctcgtccaagtcttccagccttcggtcaactcttcgaagcggaacctcgtacgtcgcaccagcgaggtcgaatccttggttctatgttagggtagaagttagtaaggcagttagaggatgcagaattcctttttccaaaaagatgaaaagcaaacacgaacagtctcccaaacagcgacgtagtagacgccaagtgggaaggcgacggcgaaaccaaggatgggcaagatgtttcgtctactgattcggaaacccttgtaaagatcctctctcatagcagaccatcgctcgaccgctgggtctttctgttgtttcaatcgatcaaaaggtatgcagatgaatagatcgaatggttggcatctcgaacaaatggcggggctccttttgaggagaagaggaaagactaaccaagacaggctctttatgaaccaaagtagaagggaaaagtatgagcaaggatgtcaatctgggaatggaactatgacacgggaggagacctacggtagccatggtcacttgctctgaacacacgagtgggaatcatgatggatgggtcaagttgaggtgagtgatgggtatgaaacgcgaactctgggcacagtcttcgagatgggggtgagatctagaggagatcaacatatttcatagtcgacgtcctaatgcggctcgaagtatttctctattgaaccccaaacccttcataatacaaatttatctctcgcaagactacgaaacgttcgccaaaagactacacagagcgatctactactcgacagtactcatctccttccttcctttccctcatctccattctacactgtcccatccttttttaatcatggtacgcatcccgctcacccgtctgtttgtctcaactattactaatcacttgtccgatataaatttttcagcttctcttctcgtgagtttattttatgcttctgaacgtgtgtctcgtcgcttgtcaacatcgttgatttattcgtcttcctcgattctatcattccctagtgtcttcaaaacattgaccgaccaaggtttgtcgtctcgttctcttccttgcgtatccccgccctgactgatccaccagatattctccaaacttgattccacagaggtcaccgtagaactcaagaacgatctctgcatctcgggtacgctcaagtcggtcgaccagttcttgaacatccggctggacaacatcaaagttctcgacaccgaaagacacccgcatatggtccgtctatctatccctttcatgcttatgtaaatgactgctctcatattgaatcaactggttgtacaaattaggctaccgtcaagaactgcttcatcagaggatctgtcgtgagatacgttcagctgcctggtcaggcaatagatacccagcttctagaagacgctactagaagaggtcagcgtttttactttgcagcttcttctaccatcacctcttctctgctattcgacgcgcagagggctgaccgagaatgttctctttcgtattttgtgcttgttttgatcatgttgcctcgatgactcgtctctctttccctccatacgatcttgaacgtgtaacatattgcagaggcccaatcatcgagcaaaccgaaataaaggtccctacttcccgacaaaaataatcaaaaacactctcttgcgacttttttcatccggtctactctagatcacgatctcgattcaaaaccagagcaggatgtacatcttcttgtcttttcctagctgtccattgtgcatatatctatcaatcattcttaacagagataacattcttgctgaacgttaaataagaacactgttcatgactctcctgtacacgtcataagtttcgccgactcccttgtttctacagtcaagatccatggattcgagtcttacgagagcggacagggtcaactcgagaaggataaaatgagtgaagagcagtgtgtgtcacgaaacgagaagtaaatggaaatgagaatgcaacgatgaagaaagatagaggacgtaaaagatgaagagggtgagggaatatatgtgtagcacaacaatataggccgagagaggcgagacaacggttctcgaagaaggttgagccaaactgggtggaaggtgacgatccaaggtatgatgacttttgtatgaagggaagggacaaagaatagagcctgataaagatgtgaatagagaaaggaagaggatgcgaagagaatgcgttacacgaggatacactttgtggtccttactgattttattgactcgattctattttcccgacaacttactcaacaaacttcccttttcccacaaactctttccctgcccaactgttcctgctccagaaggaccgacggaagtttgtgcagatgatgccaaagcggaagaactaactagtgcaagtgccggcgaacttggtctatggtgtgagccttgcccttgcctgtgagtgtgagcgtgggggttaggatatgtagaggtgggcacagttgcagagggggatggcgcgccgggtgaacctgaggtcgaccgggtagaaaagagtgctgggtttgatactgttaatgcttgggactgcaacatagaaccagatggacgatcaagcaaacaacgtaggtcagataactttgtttgatgaagattgaagagcagtcgacgtactctggcagaaaatgttcgtcgatggattgagtcgaacgctcgttcgtcgcatacgaataagtgcatatagtccgcagggtcttcaaagaatgccgccttgtcctctgaacggtgagtaaacacagatcgaggatacatcagcgtatcgctcttcaacaaattgatgtcagtgccatgaaacatttggacgaacgactcttgagacaccaaattcgaccggacggagctttcgggatcggcttggtcaaagtatagatatcaaacgcagagagtgcgcagaggtactgttcgtctttgccctgatatttatcgttggaatgcacaaactcgattgatcagtttcgctatacaaatatctacacaacgaatccatgtcgccgaaaatgtcagaggaggctgaaagtatactaactcggtcattcttgcacacccagacgacaccatctctgatctccacaaatcgttttgaccatttgttcttcttacactgccacaacttgcacgatccaatgatgttaggacgttgaccaggaatattctgtcgtacgaatattaaaaacaatatcagagctatgaacagttatatgactggttgtaaatgaatgacagaacgagcgtacattgatattcaattgaccagacataaggcatcttttgatgacgaacgcgttcagcttagtgatctcattccacgaagaggctatcgaaagaagctgttcatattctcgaataggccgctctgttggtcataagagacaggagaaaattcatcgtgtcaacaatccatgttgtgaactgatgactgagaagcatcagctaatatttaccgataccccaatcctttccgctctcccagactgcccaaccacctttgagcaactcttctccttttcgcccaacatccaggtctccactttttctcaaagagttcaacactacacctgccgtggtggtctctgtcaaatccacatcgaccgactttcctccgatttgctcaaagtggaatcgcatccgtttgatcacgatcggactgggcaaagtcctagcatgatcaggaactgtagatgggctgatgtttgtcgagattgtcggtcgacgcgatcttactctaggagacaccttatctgagaaggatccgttgacaggtgaggacatcgtaacagcatgtgggggcggggtatggacattgtacgtcgagaaattgacgctggcgccgggaagatagggcaaaggcgggacactcggtggtttcatctcgccattcatcgctcgctgaccttcgcttgagtgtagttgaggctcggagggtcttcgacggatgacgggggcaacaggttgagaaggtgatgccaagccggtatgccgattttgacggattgtccccgatcgttcagccctagacggttctttagtagattttgctcgaccaagaggatgcgtgccagccggaggatttgattgatgagccgtcgtgatactagttgcagcggcagtcgtggttgaggtggtcgagaacggatctcgagatgaagaagagtctcctctggagtagcctgtggctacaggcaacgaacgggtggcttccattggaaccggtccaaggtttaagacccccatttcgctcaatggaagcatggaagacccagagcccgcgggttgcacagctgattctgatgctaatccagaagacgagggtccgctcgcgctggactttcttgatctgaccgctgagtgagaacctcctgttaacagagactctcctgcccaagcttgcgtctgagtcgccgagagattcaatgccaacagacgcttctccaactcttctgcaatcagcacgccgtccatgccgataactccgtgagcagaggataaatccttttctacttgttctcgaattttatgccgagcatccgctacgcgacgctctcgtcgcttgcgagttggaggagaaatcactcctctacgttccttcccgttaaagttccctttgtcaagttcggcttcgtggacttctcctctacctacgttcacatcattgccaccagcagcggaagcggcagcttttttctcccgaatcctcctgtccaacttctccttcttccttctcaacctgagactcttctgagccttgagagcggtggaaggatgtgcgagcgcaagcggcacgtcgtcatcctcgtcaccttctcgatctttcgatctttcgtttgggcaagccgagggattttctaaaccctctgtagcgctttcacatccgtcatcagatgatgagtctgagtcaccctcatcttcttcgttgtcttctccatcctcctcctcttcttctggagttgcttcattctcgtcacccctcatcggtctccttcctctcctatctccatcatcctcatcgccatcatcaccaccaccaccaccacctttttgtaggccttgtccagcatccgtcgtccgatttggacctaccggtatgttatttcctatgtactcctcgtgcttgccctcagtcccaacgggctcaactcgagcacggcctcttccacgttcactctctcctccatcttgagcgaattcaaagctttcccttccggtatcatccccggtgcacgacttgaaagagttgtaggaaccaaagagagtggaatatcttgcttcttcctgtaaaggagcacccagtgtgatcgttgtatgtactgccgcagtggcgggcggtgatgcatatggcggtaagacccggtctttcgagctaggagaacctgaggatggtcggtcttcagaaggatcgatgacaggtgagggagcaggtcgaagcgtccttgaagaaggcaaagaagataatgtctgttgggtttcgatctgtgtattgtaccatgaactaaaaaattggggttctccctctttttcgagccacaggccttccatgccttccatcaatgattcctgtgaagcagcggatatatttcctgatgaaggagatgccggacgtccatagacctgtttctccccttctttctggatcgattcgttacctggagcagaagaggaagaggaacaagtagatgatgctgatgatgaagggatcacttttggaaattcgtcaattaaccaaggtgctcttggcttccggaaacctccttcgtctttctgtttgtccagattcttctttgcttcttcttcgttatttttatcacgccccataggcgaactcgttcttcttgaagcgccactatggcttctacttcgaggtgggtgatggggaaacactgcgcccttcttgttctgatttgttccctcggctggagcatgaccggcaggtatgattggcctgggaggagatggtatgaaaggcgcatccgcagcgaatgggtcaagaggtggtgggagaggagatgaacatgtaggtggggttgatcgatccttgcttaatttcggaagcttagatgacgaggaagtcgaaatatgaattgtggatgtagtgaaagatgacggggacggagagatggaaggtcgatgcgaaggattgttttgaaaaggaacagagggaagatttggtccatccgttgagaatgagaaccctcttttcagctttccaatccgcttccctgttgttgatgttgttgtcgttggaggagaaagagcatgtgacgtagctcgtacgctgggaacttttggcataggttccccgtcccaggccgatttactccgcaaatctggcgttgactttcttccccgaagtttaccagaaatcttcctcgcccaaggcgtagacgtcaacgaggtcaattgggaagtcgcgcttgggctattggtgatatttgagagaggagagggggaagtagagcgcttgatagggcctacgacgtttgaagaaatactcctggatcggggtcggtttctctctcctggagagaccgaaagcattgatcggggatcttcctccttaacgaacgacacatgcaacaggccgagtccaagaccggaggtcgaagaaggtgtgagttgctcatatgattggtttggaacgttcggagggataggagacaaacgacccggtttatttcgacggttactctgagtttcgctacccaaaaaggaggaggatgaatccccggacgaagattcgtgagacggagaatattcggattcaggctgagagagagaaggttgggaggatgacgggtgaagggtcaagctcgtgagagaatatgaattgagatcaggtgtgggaggtgaagaatgaatgtcaggagaaggtgaagaggagtttgtctacgattcgagcggagagtgcgaaggattcaaagacgaaaagagatacgtgaagagagaagtctgattcttatgagcgtacgttatcgtcaaagacaaccatagagacaaatgattactgacagataacgagaggtccaatggagggggaggatcttttctgattctgatcttcatcgggctatgttctttctgagctgctctaaaatcaccttccaatatccttggcgagagctgtcatgtgttgattaccagcttatcgtcagttcgtctctgtgcttcctcactttcaagttgcaatgtccaatcttcgaaacatcctcaagatagagggtatatttgagccaggtaggcagaaatctgttgatactgacctggtattcatgcatggaaacggtctctttgagcagccggggcttcgtcggagtagtctcagtgtcgcctcctgatatagaagaggctcggatggggcttagcattccgccatccatagggagggagaccatgaaggctcaaattgtcaccaaggtggactagatatatggcggtagctgtatgcacaatgagctatctattacggtttcttgatcaattctcagaaagagacagcgatgaaggcaagagtcaaggacaagcaggagtgcgggagagtatgaaggtgagtgagagaagatgaatgagtgtttatttacgcggtggtcacaacaacgtaattgtgataatatgattatgtaagccatatagtcctctttggtctagtaaacgtatgcttgcaagcatgtttgaggaacaagcgtgtgatgcggtgtccttgacaaacacctggggaatgcactagagaagaacaacatctctaataaggacgacgcagagaaagatatcgatacacagagatcaaccacagcacaccaaacgtcgcccatctttgtttgaattataccgccgagcgcacgcccactattcgatccactatctgctctttccatttcatccacagtgcatcatcacgatcgatattgtccaaccacggcaggaaatatgacgttagtgaggtattacagattatagatttttcgggatcaccatactcgagaccacaaatttgaaacaaagaactactcacccctcggatgtatggtaatgagaggaatgttccgatcactggtagttggcgaaggaagttgagaattacagggaagaagtctctgatcgagtacaaagtcgacacggtcagcgaaaagaaccatcaggccaaagtcagctggacccggcaagagattgttaatttcgaagaaagcccaactcacccaaacaagttaagaaatccgaatccttccacacaaaccccgatgaaaggccactagagtaaacgttgttccagtacagagaggaaaggagtttttgaagaaatgacgtcaacgcaatgtactccttgtacaagacgagacgaggaagaaagaggatgcgaaccttgagaaagactaaaataaacccgagaaagaacgcgatggttcctcttattttctgtttccttgcgaagaactggaacgtcttggttggaccaatgattaacgttagtccagagaggaagaggatctaattcaatgtcgaacgagcgaatcaagcgatcaaatgtgattgacgaatctcatcagatcaataaatcaaatcagacagtgggatgaggaataagaatgtatacgaacattgccaagcgcaagtagagcgccatcaaagaacatgatgattcccaaaagcatgaacaacatgccaaacgaggtaagaccgaccccgatttctataaaatcagcaaccatgtttcagaatgagtatgagagacattctagtcaaccaacttcttttcgacaacttagccatataaaaaaaaagaatcaacaggatgaacgaatgccatactttgcatatccgtgagccacatgatgaaagacctgatgttgtgtagatgatgggtagtgctcaagacagagtgagggagaaactcggcttgtatagtttgagttcgcgccggaaagggtgatggggaacgacgtggacatgcacgtgtatgtagcgctggcagatgctgtgccgcgcgtaaacttgttacgcgtgtcactccaggttgtaagtggttatcctttctgctgttgaaggaaagacatcaaacagatcccatctacaacccatcctatcccatcgactttaacatggtgagctggtctgtatgtttgaaccatttgatgagcactcatgttgaaggaaactctcctttgctcttttgctacttttctttacacaccctaggttatcgcaactaccaaagacaagggcgtctctcgatccaacacggtcgagacccagcacgaagagatgatccacgatgctcagatcgactattatggcaaacgacttgcgacgtgttcatccgacaagaccattagagtcttcgatctcgttgatggagaggcaaagggagagccggacattctcagagggttcgttaacctggcatcttctctctttctttctttttttccatccgctcttcttctttattcctccttccgctatcggcttctattctctgttcttcctgtggtcatcaacatcacgagagtctggtcgtaaccttattcttaggataagagggctcgagtaaggaacgtgattggctcaagaacataagggtcaagatgaagacaagctcaagagggagtcggccgagaggattattcttgcctgattccttatagttaagggcatcattttgagtgattagcttttagatcctagctcaactgctttctttcaactacatatcaattcacatcctagaagttctagtgacgtgatgtcgagaatcactggataaagtttgatccttcgacgtttcaccctatcgcatccacttgtccctcattcctctccagatatcaacatgttatcttgttctacctttcgacttttatcgcttctttcctaaatttcatccatgaacactgtcctaatcttacgtttgtcttcatcttatttatcaattcgttcaggcacaccgccccaatttggcagctctcctgggcccatccttcgtttggtcctatcctcgcctcggcctcgtacgatggcaaagtctttatttggaaagagaagggtcgagccgctctcggcgcaccgtctacgtctgcttcaaaggcctctggaaaagctgctgtcgctgctgccggaggtaagggagatcgatgggaagtcatcaaagagcacgggttgcacggcgcaagcggttcgtttactatcacttcttgttatttcttgccttcctattgctgatcaaaaataccaatcatccgacgtcagtcaactcggtggcttgggctcccttcgagcttggtcccatgttggcatgcgctagttcggatagcaaagtctctgttatcactttcaacagtaggcttctttctattctcctcttgactaaacctgcgtttacttgtcatcacttctaactcttcttgttcaacaatcagacgatgggtcatcggatgctttcatctgctctgctcaccctatgggtgcgacctctgtctcttgggcaccttctatcgttcctggaagtctaaacaagccgaatgcgacctcggttcaagctcagcaatttggacaggatcgacaaaggcgattcgtgacggggggatgtgattcgaaggtcaaaatttggggatggaggtttgttcctatcccatcttatccttgaagcgaccaatatgctccagggataaagacgcgcattgatttatgctgactgtctttcgcaaatctcaaatgtcaatacagggatgaatcaaaagaatggaccgtagaggatgtaatcgacaagcacaccgattgggttcgtgatgttgcttgggcacccaacattggactcccgactgcgtacatagcttcctgctctcaggtgattgtttgactttttaatttctttcatctggatacatcaatttgctatagattctatattagcccgaactaacgcttttttcttcgccctcgttcctggacgtgatccatccatcttttataggatcgaactgttcttattcactctcggtcgtcccccacttcgccttggcaaacgacttcgcttctgccgccgggcgaaactttccccgatgcgctctggcgggtcagctggtctctcgccggaaacgttttggctgtcagcggtggagatggaaaggtttcgctatggaaagaaaagggaggaggagaggcttgggagtgtgtgagcgagatgagcgcttgaacgcgacaggactggaatatttctgtttctataatgtgtttttttttggttctttctcttcctctttcatcttttctgacgatcttttttgaattatctcgaggctatcctccgacattctgtcgctcttcttcctcaacgctttcattgcgaaccctgtagtcatctttttgaactaatgagacagacactgcttccttccgtacagacgcaaaaacatagatttcatgtacctgtagtccatatcagatctacaaggagagaaaaccatgaataacaacctcaattcggatcgtggctgaatgaaagacattgtaccacggctgaacacgggggaagagaatcacgtgacaggtagtgttctcgcaactcactatctcggtcgaccaatcgactttcttgacctctcacaccctcctttcgtctctatatatatcatcagagagctccagatccctgattcatcaagcttatttagaaaaacctaagatgcgtccgacaattccttgtaggctcaacatcctcgttcctgtgaagcgagcgattgattacactgtgtacgcctttttctctctttgattcatttctctacttgatctcggacaatgattttttttgtctcaaatgttcatcatcatctgtcttgaatctcctttctttatttttgctttcttttattgcggtgtttagtaaagtacgaattgcggctggaggacagggggttgatcagtcggctaagcactccatggttcgtttttcaaagacctacttccctccctgtcaacatatataccacgggcgagatttctcctttctactggagagcacgttctctgagatgatgcgagacgaaaatcttatgtgatagggatcgatccaacgaggagctctcttggtactaacctattctgctctgttctttgttctctgctgaatcgtcatagaaccctttcgacgagatcggtgagattttttcttgctcgagcacaatacattgttgtactgttggtgccaatacccaatattcagtatgttgatacatgttttgcgttttctcagccgtcgaggagtcgttgcgccttcgagcaaagcatgcaaagtctactacgggttccaaggttgacaagatcactgtggtgaccatcggaccgacgaaaagtgtggaaacccttcgaacggctttggctatgggtgctgtaagttgacatcccttccatcagggtcttcatcatttctgttgtctgcttcctcagtaagcccagcctaagtcacaatactcatcgaggctcaaacatgggatcgaacaggatgatgctatccacatcaagactgagcagaccgactcaccagagccattggctgttgtaagctccatttctttattttgcaaggcttacttcttcccctccgcattcatagatggctcaatcttgtgcatttctttacccttgacctcaggccaagctactagcgagcctagtaaagtcacctcctgcggctgtagcttcccctgcgtcttacgaccttcttctcctcggaaagcaggcaatcgattccgatgcgtctcagactggatccattctcgctggtctcctcggatggggtcaggcgactttcgctagtactgtagaggtcggagaggacggaaagactgcaactgtcaccagggagattgatggtggtttggagaccgtccaaggagatttgcctatggtcgtcaccactgatttgcggtaagttggcatgttgggcccgggtgctaccaaattgaaacaacggccttcgactgatcattttgaacggcccctcatggtgattctacctattgctgctctcgtgaacgcacagattgaatggttggtgtgcatcttcttggctgtctaactagtatatatccgtcgagcgcctacttaattcaattttcttgtttctccgcattcggattttgtcagagcctcgatatgctaccctgcccaacagtacatatcatccttctttttattttcccttcaatcttatttttggcttaaatcgctaatcgcttgcttctcttgtcttgacttccatccaatttgaacagttatgaaagctaaaaagaagcctctcgttacgctctccccttctgatttcccagatgtcgatatcaagcctcgagttcaggtcgtcaacttgtcggagccggcagagaggaagggcggaggaaaggtagagagcgtggaggagcttgttaaaaagctgcaagaggctggtctggtttaaaaccaccttctccctctatcgttcccttatcagggttcttcttcttcttgctagtcgctttcctgtgtccttgattgaatgaatctatttttgaacaaaatgtcacctgcacaatgggtttaacatcaacagagagggaacaacatgatcaagcatattttatgttacttcttcaggatatgtctgacagcaactgtttctctttgctaccaagaacaaaacgacaactttgagtgtctaactctttcagaaaacgaatcgattttaatcgaccttctcaatgtccttctcgtcgtcaacgagcgtggggatgttaccctctccctcctcctcctcagcttcgtcatcagagtcaccaccggctccgaagtcgggcataccgcctggtccgccggctcctcctcccatttgagccatcaacttggcaaagtcctgcgatcggagaaacgtcagacaagggaagatatacgtcagctcgttcaagtgatttgatataaatggaggcgacaagagtcaagatcaaagagatagagaaaacgaaccattcctcctccgggtccaccagccccaccagcccctccacccatctgagccatcagagcctccatgtccaatccaccggcacctcccataccaggcattcctccgggcattccgccggggggaccttgctgtccacccataccggagaactctgactcatcaggcggggggacctcgttctgttcgtcctcgtcaacccacttggagaagtcagtcttgagccactgaaccttaagtcggtctttcgtcagtcgaggccagaactcggccttagattcagctttgcggagaataagttggaggtatcgagacgagagagacttcttagtaagtgccgggtcgatgggagcgaacaagggaagggaaaacgcgtaggtgttttcagggattcccttgtcggcgctgttgagacaagaagtgggtgagcatggaacgtgatgaaaatgagatgataaaaagatgacatacgctccagctcgagccttgaaagagatgttgtcggcagtgatgtcaagctcaggctcgccgatgatgttaggaaggttaacagtcaagctgggatcggagaagatgtttctgatatcagctatctgcttctcttttatccttactaccttgagtgtccgtcacgttgcctatgcattgacagaaaaaaaaggcggggaacatacaaaatgatgttctgttcgacacgaagataaaagatgaataatagatgagtacgtggaccagttcctcatgacgctgatggaagacacagaacgatgaacttcggactggagaaagacggcgatctcaaacgaaccttgtcctcctcagtctcactggagcgttgggcccagagaatttcagcgttatgagtggccatgatgtagatgtttgggatgataaatatgtcgaggcaaaaggaaggtgaacgtcgaaaggcaaaagaaaagaattggaagagaacgaaaaagaagagcgagatgatctctcttctagaaccatctgttacgctcgttacacccatggttacgcaactacaagtcgatttcaggcccgaaaagctctctataagattcgagaaaagaggtgtagaacaaagaagatcccagtggatcagagaaggcgatcacagatatgtgtgtgtgtgtgattggtataaatttgagccgagatccgccaactgcctcgttaaacacgcaacagcgactgaaaagggaaaaagattcaaataaaatgggaaaggagaagaagtatgtacatggtgcctcatatcagaaccacagatgataactcttgtgcaatagtaccatccatagtttggtcttttgagttgctcagatctagggaagagcgcgaaacgggaaagatgaagctcttgtaccgtctcttgtgagaagtagcttgtctaagattacccgatgatttcatgggcgaaccaagggtgactaaccaacaacatctcattgtgatccgcctggacttgtgtctttctcaaccggtcgcccgtccctatgtactcaccatcttcacagcctcagcctcagccccaattgcagatggatccttgtcgatactctcctcctcattcgctcacaaagtatcaagtggaagcatccaacttacaacatcttccgtctcaaggcgcaagcagcagtctgagctccgagaatgggcctcgcatatcgttcactcatcatcaagctttaagtaggcaagcagaagagcatgatttgattaaagacgctgagagcagacatgacctagagtatgatgaagacactccacttgttgactgggacaaggtactctcgtggaagtcgtggatgaagatgaagtatattcgtgagtctttgaagcacagtccacatcaagagtctgtgcctagggtgaacagtttggttgagaaagagaatttaactgtgccctcgaccgacaacacggctctaacaacatgtcttttttatcgatcgtaaattccttacctcatcttctttcctcttcgggtaacagcgtggtatatcgctttcatcataatatcggtagcaggtaagcctccctctcggcagatcgtgagcctttgtttctgtttgtatgctgacccagaggtttatactgtccccttagtcgtcttgatgacgctgtaccatgaagaaattctggaatggttgaaacctgcggccacatggatgaaagagtatgtatctttcttacgaaatatcatgtgcatctcgtaggtgcgcaaacctattctgatgaacgacctgtttggtcgagcctctttcatcagtttacctggtggttggacaattccgatgttagcacacttgcgtcaattctttctttgcttctaaaaattgaacaccttattgacttattcccgtttgatgacacagaggaattttgttcgtaatctcgtttccacccctagggggacacgagatcatcattcttctctgtggtttcgtttggggcctctgggtaggttttggaattgtctctgcggggacattcttgggggaagtaggaaacttttacgctttcaggtctgtcttattcatcaagctttgcttactttattggaagaaacattgacctcataggtttcctatgcattgacagatactgctttcaatcacgcgctcgaaagattgagaagaaggacttgacgtacgcctgcctatctcatgtcattcgagagggtggttttttggtgagtctatacagatgttatagaatgagacttgaatagaactgattgcgcttcagaatttttcttcattagatcgcgctcgttgttcgattctcggcgatcccaggccattttaccactattgtcttttccacttgtggaatgaacatctggatttttgtgagaccctttcaattgtttccttttcatcaatgatccgatttggacaagattgagtattcactctcctggtttctttcctttgaattagtcattggcggccgctttgtcactaccgaaacagctcattatcgtatacctaggagtgatcctggcacaatccggcgaaaagacatcaaagagcaaatggatatctcgaatcgtcctagtgatctcgttgtaagttctgtcgagtgtgttctcaattaagaagtctgcaccaatgtaatttctcattcttttctgttctcttgaatttgaatgggggtacaatcagtttggtgacaatactagctgcttggtggatctggcgaaagatgaaacttgcccgaccggccgtgattcgtgaatggaaagagtcagtctcttctaccatgtgccctcttttgtcttcttattcggcacgactattgatcacctttctactttcttgttcaccttccacttatattgaacttttgtttccatgccgttctgcagaaaagaaagaatgaaccttgtttccatacaaccggaggcccaccctgctttcgggtcaagcgtagactctgtagacgtcatgttgagtgttgccgaggagcaggagcaggaccgatatgctagatacgcgcaagccaacagagctcaagaagcagaatctcgtatccagccgggttacaatatagttcgtgtttcggaaggagaagggcaaacagagaggcttggtaaatctgatcttggttttaattttgattacttcacattgtatttgatcaggaatatatatacccaggcgaactgggcaaggctactcaaaagccagtgccaaacaagaacctatactcaaccggtccacatgacctacctgtgaatgcttctcgcgtggaatcaaacgttccatatagcgttggatattccgatccgtttcaaacaggtgtggggcgagataataggatataagggtttaatctggctaagccagagatgcttcttccaagagtataacgagcgcatactccctcctttcgattcttgatatcatcctcttctttctatctatcttggggtcgtctgttgtataatcatattctgtttctatcaaaaccatggacatccgtttcattttttcttctcctcttctctttatttatttttatttttgttctgtgttcgacttgagcaagggaaaagagatgactcgtcgacattgtatagagaggaagcctacctccttcatgttcctactctcgcactcttccttttttactctatcttccacatcctagttcacgcgtgaagcaggctttggcaaatctggcagatccgatccgggaatgaactttggatcaagcatgtgtaaccgttgctcaagtgcttccaatctttgaactttgatttggtggaattcttcaagtttgctcacgtggtccgctcgaagtttctggaaagcctgttttggacacattttgtcacatgtagttttaggttcgttcataagatttgtcagttgtgagcaggaaagagaaagttcatagaaagaagacttgcctcatcaagttcttcatgctggattcatttccgacatagattcagatgaaggatcgaggaggaagtgaaagaatggatggatcaagaaaagccgcagattatataaggtcccgaagaaggataagaaaagataagttacgataaacgctcaaagtaggaagagagcagagaggctaaatataagaaaacgaacccagggataaagcacagtggtctgaaagacgagggcagaggtggcgatcgtgaagtttaggtacggcaaggcctagattcaatgtgtacagatgggatacaaatcagcagattcatcagttggtaccagtttgagtttgatatgagttaatgtacaacttggaggacgagttgcacttaccgttcggataaatggattgaccatcggactctacagggtattacaggagctatgtatttatatgtatgtaagcgtatgtgtttatgtatagaactcaagatgagaggtgtagcagagtggaaaagagggataaacaaaagcgtggataagaataaaacataggctgtgaattaacaaccggataaaggaaggagaagaagaacgaagatcatccgagctggtcgatcccgacaagtatcggaactttcttgtgaactcggttagcctccaatgatacctcttctctcatcctcatcattgtaactggaaacagtccggaccacagtgagcagtttcgagagtatgagtgtgcattgacgtgtatctgagcatgtacggatataaggacatggtcacccggtcgtgcaacgtggctcaaagatctacgtgggagactgcgtctgcagatcagcttcagatgcccgtctatgacgatgtgcacttcgaaaagacattcctctctttttcgttacacctccggtcgcctgcatggatacgccaaccccgttcatctgactaaccgccctttcgaaagagtgttatgtatgcatgtatgcatgtatgcatgtttctgtgaaccctcactctttgagctatctgtttgatgacaagactgtatacttacgtctagccatgcatagagaagtagaaagcaattatagagggcgactaaccattgtatgtcctgacgcaatccttgctcgtctgataacgccttctttcagctcgcttcacccttctccttctatggcgttgagtgacggttccgaagcatcggtcgcccgtctgggtgagcttctttcaggatgttacccgcttttcgattctctacgaaaatgcatacatctgcccgttcgcctgtctttctcgcccggaacctctcaatactgccgagcacttttccgttgatctatctcttgatacttactgatgacagaccaaatctgatcttctttgcacggaagggaagaaaaagacctgaaaaggatgatgctaagctaatcgtttgccctactaatccattccttttacccctcttcacccttatccctattgcgatccttcttcacactgatttcaaactcttccaaaacgcatctcactctggttcttacccatctacacagacgtcttcaggcagcgactatctacactcacaatcctgcaacgatcccctctttttacacctcgatatctctggaagatctttctgcagaataccatgctactttccaatataaaacctaggaatgattacgggacttggacgccaaaaacgacatccagagcaaagatagctggcatgtacaaacgaattatcagcacattctacccaagtgagttcgccgttctatttctaagcttgatcataagattacttaggttgatcgcgttattttctctcacatcttctcttctagctgtcatcattttcctcgtctactactttatttcaaccttatttccgactgtcgttccccagttgcgattcgatccatccaatgagatcagtcccaaggagttccagagggacaccgttgctcctgatcatactcattcttcgcccaccataccgttgcctatatcgagaaagaccagcgccattgcggccaagcctctcaaaaaagacgttcgtttatatgttgacattcgcctttctagttctttgtctgctcttgcttcttggctaaaatagaatcgaatgtctctccctcgcgcgtgctcggttacagcaccaaaacggcctgtggcaagatatggaatatgcagatgacaccagctccccgggcggcgtcgtaggctacacggtcttcaacaacctctgtcggtccttcctgtccctcgttccacttctacctctcaaatagcttcttttctattgattctcagttagtttactgatcgtgaacccctcttggtgacagatactgcgaatggtaccctctgtgagttttgcattcttttcttctgtgcaaggtgatggttgttgataataggttactgacacccccactcgtctcttgtctgcagtcgccgtcacgtctgacgccagctctcttccgcccgtctctacattccttagtcaagatctcaacggaccggctgacgaaaaactgtctgtcttttttcttttctgaaaaaaatgcatacgtgccttctatagtgagctgacgtcgacgttactgtcccagttttcgaatcataactcctggaatggctcgcgaacttttcgggaagcgagtcatcagactagacggagacagtgttggtgctatttttcaagctattccaaaatgcgtcgttcagccacctgacttgcctaatttcttgaaggtattctttgcggatgccgctcctgatagtttcttgggtcagtaaatgattacgcggactatatttttgagatcaaatgagttctactgatcttagttgttctccatgatacgcatatccccactattcacaatctactcaacagcacactactagtcagtgtgatttctttttaatacctacacgacgtctctcatttgcttcttctgtcccttccaaagctcatatactttaatcgtttcattttcttgcagccactttgtcgttgaatgtttttctggggcatggaaagcgctcatctctgtatccgacaagccgttggaagaaatgaacactccccgtcggatgataatagcacgagatcccaaatggagagacggcccgaacttgaatgcttggttcatgaacgttatcctgcctgatgccagtatgtattgtctttgacatcgaggatcgttccagctcgttttcctcatgatattcaaatttcatgtgggtgtttctcttctttcgatagttatcgaggatgaaccaatgtggttagatagggccaagagcggtcaagcctatgtgtttgaacgaggtcggtttaaagtctaatgttttctgccctctgatatcgcgttccacgatcactcaatttatctttcctttatgtctgcctcttgtacgttctgcgttatgacagtggtcattgtggacgtgagtatcttctcgccattttggtctaaatcgagcatcgtatttatccttccttcttctcgggtcgaatcagagatgggcggcgcataggcattcgtccgctgttaacaaatggaacaaaatgaatgccgagtaggttgttcctctcttcttctcttcggtttactctggattctgaaaggtttttatcaaatctgtttcaacttttgcttgataaatggttcgtccagagtttacgacttaaaagggcctttggttagtgatacttcaagtcgtcttcagtccttgtcaattggtctgtttctcctccatgctcactcgatcaaccttctatatagaattggttcgagcccctaaggcaatctttgaaacactctctgcagatctcagaagatcaggtttctgagaaacgtgaatcctctttccctctttgtttaatcttgacaggcctggtctgactgtttatgtgcaactgtaatcttttgttctgctagccgtcattacttatattaatcgacagaaaagcaaacgtcgagcgctcaagccggcatcacacgatgaattgttgatctcactaatggagatccagtctgaaggtctggctgatgtgtatgacgcccaaatggagaccatgagcaaacaagaacagtttgctcttgcaactcgaacaaacgtgagctccttttctatggttgcgatacacagtaaacccagtattttgatctcgtttcgaggatgtctcttctggtcgggtagatcatgattggaggtgagcaaatattcacgatttatagacagagcaagtacaagctgatgattaatatcatcgcccaatcaatcgatttcttcacgaagtacatggaaacggtctgaggttcgtcccttcattctttcatctcagataggaatcgagtcctaattgagcactcttcttttcctttgtgggcatctctttcctggctacaacagtcaccttatgtggatgcctcgaggctcggatgtcatcgagatattcactccacagtgagctttatctctatatgtttcctttgactcggaagaatgggcgtactgatctcgtcgcatttgtcattggtctactcagagggttcactcgagactagtgagtgtcaaccattacccgtccgtatatctaaccaactctcatgcacatactgatgctctatcttttccttcatggcgcccttcttccttttgcatgcttagtgaaattatcacccgtaagttcgctcgttgccctctttcttcccaccatgcgtctttcgtctcatcatactatgatctctcaacacaaaaacagccgctcttggacacaatcaccatgtcatcgtacgtcatcttacaaattacatacgtctgtatcgcctgagtgtactgactcgagtatttgatcttctgcagtggaacgacaccattgaggccgaagaatcctggcgggctaaaggacacactagctttcccgacgactttcagggaaccatgataccgttcgtatccctcggctctctatcaattttgatggttgttcctgcttcatcaggctcagtctttgttcaatcttccttttctccacagagtgagcggaccattgatcaagaatctcatcaaacgcatcatcgcggataagtactcccggaaatcgtcactagccgagcatgacaaactttcgatggagatccattgatgtctgcgctatatacctctctcgctccattcttttttaatcccttttcaatggttttcgacagtctgggttgtttggaaagggttcatgtgatatcttttcgtccttttcttcttgtatttctatttctttccttcatcctttccttactttggactacttctctcactgcatataaaccggtttctaaccagtaatcgataacatgatgggcacatccaatcctgatttgccctcttcataccaatcttcatttctcttaggtcatatatatccatagat

SEQ ID NO: 147 - DNA, 23748 bp, Xanthophyllomyces dendrorhous
ccatagatatattcaaatatgtttagttgatatccccttttcagtatattttctgacggactgactaacgggccatcatgccaagactattgctgtaatgactgacatctatgtatctctaggatagaaacataatatgcaagctctccggtgattgtttcagatttccatcttctagttcatcctcaaagtatcttttgcccaggaagatgcttttcttctcttctcaattaatcctattaaacgctccaacaggccagtaggaaatcaaaggaactggcgaatatatatgtggatgagtagaagctaaatagtaaatttcacgtaatttattcagttagggttgttgagaatctgttcagattagatcgcgaaaggagagcaacattagatgagacaaacatccaataaactcggcattccatcaaatccgtcatattcatctcttccaaatttgctgctcaataagaaaaatggtttcggagaagttcacaactgatgacaagctcgacttgttgtttgacccagagttgatctcgtcagatgtcaaggaagcgttagctgatggatttcatgtttgtccgtttcttctgcttgtcgcttcctcttctcaagaatgagagttacttaatgtcttgatattctgcttcttgtatcaatatggaacgggaattcaaacgacagatccgaccgttgtcgacaactgactataaacgatcacatctggaactgctttccgttctgactgtcgctcctgtgatctcagaggaggtctatgcagatgtcgtaggagatatgaaactcagaggtcggagagggggatatttccctgttggttcgttctggtctttcttcgtatcttttgcttttcttgatcttgatgatgtacacatagaggctaaggaatctgacaagtcggcatcctttgctccgtgcagtgatcgtccagcacgagactgatcagcttgtcgcaacaggaacgcttctgatcgagaggaagtttcttagaagtcagttgtcaaactgtcctcacttttctcgattcggttcggtttctttgtccttgccggtgcttatagcttgtactttgcttgctcacagatgctggactagtgggtcatattgaggatatagccgtttcgaaagacctccagggaaagaaactcggactaaggatcattcaggcactcacaggtctggcagagagtcagggttgttataagacaatcttggattgcaataaggacaacattcgtacgtgtatccatactccggttcatttgatcgattgatatctaagggttgtgtcatctacgtacaaaagccttctatgagaaatgcggatttgagcataaagagtatgagatggtcagtctgatctttctttcgtctccatccgtcctgaactgtcaatgtacgtcaagaatttaccaagaagaatatgttatattcctgtttaccgtctctgttttcaaggtcaagtatgctcttaagccggccgctctatgatttccatgtcacttgatacccacacactgtcgatagagcctcgcgcagtttcatttcttcccttgatttgtaactaacaggctatcgtcgccgagacagtacatcgataggaatgtttgactgtgaacagatttcgtgaaagaattgaaagggtcggaaagactgataacgcttgttcattacctgtcaaccaatcaatcatctcatctaaatcctgtcacttcttaggtcatcgtgtctatttgcgcttctccactttttcctttctgcatcgatcatctcgacatctttcgtgtctatagctagggatgcaacgctctacctcattttctgtaacggtaagaagtataccttctctcctcttaagaaagcgtgtgacgactcttgtatgctcacatgcattcaaacaatgtcgcctaatcgtgttgtagaggcctattcgtcgacgacgatcctctattaaacggtcaaagtcactgcagaaatcctgtcactctgttttggaagaagatttcctcctccaacctcaagaacccttccccatggaggttcctatgcacccgggatcgtctttcttgagcggatcgaagttgactgaggctgactgtgaggttgatcttgcaacaaaagaatctgttgtgccaacagacatgtccactatggtcgccacttcaagtcaaacgcatctgaataggcctgcaactacggcatccttggatatgaaggaggagcatctgccgatcgaatgcaacagcggttcaatcgagttgacggttggcagtatcaccgaggctctgagggagaagcctcctgtcgaagtctccgtatcgacatcggcgaccggaactttgtcacctcggaaagtgcagcctgacgagcaaacgctacagccgatcattcaatcacctacttcatcttctcccaatgcaatcgattttgaagaattgacagccttggataaaggggttgcaaagacagactcggcgcatatatctgtccttccaaatgattcggagcttttcgaacacgatagaccaattcgattggccgacgatgtcctgtcaactactttcagcgatcagacttacgaattcaaacatatttcggactcaaaggtaccagctttgacagaaaacccagttgttggtagcaacaacgaggtgtctgtcaagaactctcagcatcataccgttcatgcgacaccacttgacaatcatcatgagttctcatttgttgataaaccaaaagaagatccgtctgttgagactggccaagttagtccgtcggttatcaactctcagttgtctgagcgaccagtctccatgtctggctttccttctcccatcgaaacagcccagaatgattctgatattagagaggggaaaatagacctgtcggctactcatctcgagatagatgagcaacatgaacttgtcgatcaaccgggaaacatccccggagaaacccatgttacaagtgaggaggtctttgaagaatttcttgaaggaacagaattgacaccggaggttctcatccgtgaaggacaggacttgatatgtttctctccaggggtgagtctggaggctttgtcgttcatcatgattctagtttaattgcattagttgattttatcttcaaaaatcactacaaggccaccgttctcaattcgcctcaatgcaacacgctggtcgacataggcttcgaaggtgctcaaagagatgatatcattaccctgaaggatctagatgtgagtttggtgttgaaaacacatgcatctgaagacagtttgatacacaattgtttgacgttacttctcaatctttttaatgactgacctggacttgcgatcttcaatcaatcgtctatatcaaattgttttgacccgaaggcagatcaacgtgtgataggcgagttatgctccgacgaagaagtacgtctagtctgtatttacatcgacttaatgatgacagctgtctgactagataagttcagtccgattcagatcactcggttcaagacgagatcccgactcgatcaattggaagattttccgctttgatccccacaaacatacctcttctgactgagaccgatggaagcatctctctgacttggccaaataatcaagacaaggataggccgtctgttcatgtgagtggatcgcactccgtgattacaagactgcatgactcgtcgtaagctcaccaagatattcgtttttgaccgaccgcagagtcaagaggttgagccgcatgatcagcttataacgagttcgccagtattaaagaagcgaaagatttctactcctctggttggtgaatgtcaaattgtctgcctcttatggtcagatcaaatcgctcaccgtgtgcgattatatacaaacaggatagaaatccgatggccatcaagaaactaaaacaacctttcaaatgtccattaattactgagaagacatcagataaacttacagcacccattagctcccagcctacagcgagtagcccaatctcttcttcgcctactcctctacctgagctacggccgatgctggctcagcgttcaagacccttaagcttcaaaccactcactattcggcctactgtccagtataaggcgcttcgggacaaattgggattatgttcaacatcgaacaaccaggatgtcagatcgattccggaccactcaccagcgtccaaggactctgatccggaattagaggtcagatcaagatcgatgtccaaacgaaatcctttcgtgactctgaaggcatcggcgcctttcgtgtcccctgtgacgacttcttcgtcaatacttgcggaggggacatcctcgtccattggatgcgcagggaaagtcactcaaagggaggtggctaaattggagagtaaagtccaaataatcaaacaggctatcaggttagtacaaggagagggaagaagacaggaggaaaagcaggaggagttgattttaaagtggaaggatgctggaagggaaatgtaagtactttgcctctccttgtgaacttatagaaggaccacctgttcaggcgaacggttatttactagcgttcgcaaatacatagctctcaacttttatgggacgagggaggttctgacaacccagccgataatttccaatccttggaaccgaaccccttctcatcttcgcctcctgcttcctctctcttcccttcagatgccttctcacctttccctcgccagtcattcttctccaattcgatcttctcggaccgccctctcctttctactgtcgatgactcggccaatgaccatggcgagtttttagaacgagagagatctttgagcttagactcttcgatcggatcaccttcagcctatcgaccttctcgctctggtggaagcgggcttggaatgagcgcccgacggcaggtacggggctatctagagtcattcgatagagccgtgtccgagaaagaagaattgttcgaccaatctttcatcggaagaaccgaaatgacagacggaagagacgagcagaaagaagaaaaagaaggggaggaggaagaggaagaggagaaagggtgggatattggaaagatgcttcggacagtcttccgtacggatccgacgctttgtgagttacatctatttattcatcttctgttctcttttctcttcttccaggcatagaaatagcactaattgagaggttgaaaacgtaacatacttgatggaaaatcgtgatacgattatttcagttgggtgagtttcttccagctgtttctcagaactggaccaatttgttgggtacttggctgacaaggcttatcttatcacaatgcgttgatgttgggactaatcttcctcatcccatgcatttcttagttgggatgattccattttcgattgggaagaatagatatttcttcttctctacattgtttcttttatatcatcatactcgagcacttggtttattcatgcatgtttcatcgtctctccactttgataagttcacaaaatagagaacttggaagaaagcacgatcagagaggaaaagtggtacaacgggggcatatataaagcgtctgtttacaacacaacatcgttgtcaccgccgctgacgacgacgacagccaaaaactaggatttgctattaatacctttctttagaacgtcttagcctgctcctccgaagtgaatcgaaggtaaggcttgacagtcttgaagccagggaagagctctgcggagcgcggcagagcgaggtgaaagagaatccaacagtgagcaagcttacgaagcacggtacgaatctttgagagaaggacgacggaagaactcactctgagcctcgtcattgctgacggaagggtggatgatggccgggtcacctctcttccagttaacaggggctatattcattttgagaagaaaaacatgcgcatcgttgaataatctcgtttcgctagaattaactgggaagagaccgactgactggtgattcggtgcttatcacccaattgaagagaatcgattgttcgaagaatctctccgaagtgtctaccggtagaggcagggtaagagatcaacagtctgatgattcccttgggatcgataacgaagactgttcggacggtgaacggaagtcctttggcgtcaacgttggtagcatcgagggcatcgagcatatcatactcggtggcgatctttcggtccttgtcaccgatgatagggaaggtgacgctggtgttgccaacctcgttgatatccttgatccaggcatcgtgggaggcgatgtcattggcagagagaccgatgactgcgtgagatttttgcgcgagaatcaagtcagttggggcgaggctatcttgagttttcatggaaagataacgaacccttcacgcctcgcttttcaaattcggggtaaagcttagctacctctcctagctcggtggtacacaccggggtgaagtcatccgggtgagagaaaagaactgaaaagaagaaggaagtgacagtgtatgttagggttttttttgctcgagacagaaggaaaacgcagaaaagtcaaagctgaagggtaatgttgtccgactgaccgacccaggagcccttggaccactcggagaatttgatgtttccttgagtactgtgtgcgcgcggattgttatctcaggtcagaaggcagataatctgtgcaagtggggtgaatgtaaatttctgcttacgtctcggcctcgactgtaaacgaaacgagagaaagaaattcagacaatcgagccaaccaggacgtgtaagtcgttaagttcagaggtgagaataacagccaactcttcggcgatcaagagaggagagactcacagtcgggagcggaagatccaagtcgaagggtaggcatgatatcagtagatagacgggtgattgagtgagggaaagatgggaatgacaggaaagatgaaagaaatgggaagatgatggtcgaaaagagaaagaaataggagaaatataaacgtgagaaacgacctcgaagagtttgagaaatgatcgcaagatggtgcgatcgggttcggatacaggatgggaaccacgtgagatggcgtcttacatcacgtgactttagccactgccttgctcttcaccctcacctccacctctacagtgtctgccgctcaggactggccgacacaggtcttcatgacgttggcgcggcagactctaaatgaagtccggccatctttatcgtggcccacattgatacctaccaaccaccttgaatcaacacgtcttcttctcttcaaagcaattttagattgctccttttctccctctactttctatcaacggacaggtccagctcggaaaacatgtcggaccgtccaaccaacaggttgagaaatccattcagatcctctgacggacaggcaattcttgtctctgggtttctattgagtggtaagcatcccacttttctcctctttcatagatatcaaatttcttgctaagactgacttggatctcttatgtctgtctctctcttgttttccctctgtttcttctcttcttcagctcgaacaactccacattctacacgggcgtttgacccatcgtcacttccggtgacgaatagtccgcccccgacctcgtcccccggatcccctcaacacagctcagcaaatcgagtacgaccaagatctggatcagaggatactccttcgaatctgttcacgttgaaggaagaggatgagcctacgaagacccactgtcgaaaggctcttcggtagaatggcgtcgtcgccttcaccgactcggacttgtccggcctcctaagcaatcgatcggttctgattggcagtgttcatactcttctcgatctgaagtacccgcttcaccttactatatttagctatgatagcattcacgaattcatacttaacgaacaaccctactgtctctctcattaacgaatttttttttccacttcttggacgtcgggtctgatttataattatctttgactagactcaatttagaaaataaattcatctgcacccttaaattttatgtggatcgctcagtagattacgtactttcctccttcacgtttagtcattatccttattgtgtttttcctattatcttcttccggcccagtttttatgaatacatgatatttgcgaggaactaatcttttcaagcccaggtctaatgtaggatggtgagacgcacgaaaccaaaagaaagcagaagaagaaaaaaaaataaaggaaaaaaaatatagtgccgagataggtgcaggagcaaaaggcatgaagtcaaaatggccgatagagaaaaagaaaagcaaagaagaacatgctcgacaggaggaaaaaaacacatccacgcataccaacgcccattagctgactttgggccactgcaacaactgacctctatcttctcgcaaactgaacaaccaaactcccatcggtcgacttgccatggtggtcgaaccgtcgactccacctatcattccgtccagccaagcatccctcaactcaattttgattgtattcgcatatcccggaattggaatagactccttaatctccttccagagatcactggacgcgatcgaagaatcttctccagccagaagccaagttggatccaataccatctgcgtgatcgtcaaaaaggtaacatccaacgcgtaaagaggaagactagactttgtgtaatccaaaaagttgcgagctatggtgcaaagccgatataagaggccgagtcagttatatattcatgaacagacaatctagagcccagtgaccgtacctttctcgtaatacacagtctgtataacaagaacatgcgcaaacatcagtttccattggatctcagatagtttaacaaagaatagaacactgactttggatccgtaacgatggagtttcttaccacccatctttccttccttgcccttctccccaggtagtattagtcttatgagctcgacgtaaccggaactaccatttgccttgttcgcaagttgctcggaacccatgtgagacatgctatttgatgcgacgatcataggcacggaaagcatatcgactcgacgctggtcggcaatttgctgtcggagatacggcaaaaggtcttcgcgatatactttgatagcaacagatattccaacatcaacgtcagtatagaattcaaagtgtttcataaaccggttcgaactcatatggaaaacacctaccatcttcttcatatcgccgcaggatactccgtactttcagcagtggccggcctttgcagatgaccaagaatctgttcaaagatatgaatgataaagaatggtgctcgaggagtctgttactctgcaagggagaaaagaagaaagaaagagaacttacaagaccccctgtgctaaacattcagcagagacttcttccaagcccgatcctaccgcatcctcatacataagatctgctgaaagggcagccgcccacaactccccagcgatttctactcgatctcctatcaaaccttgactgaacgagccgatgtacacgtcgcaacgcctgggcgtccaaccaaatgaccttgcctcctcattatctaggtttacgagtcgtttcaactggtcagactcgtactttcctaccaaaaagatgattcgctcgaacgcaatctgcattcccactatgttcgatgtaggggaggtagaattattcgactgaggaaggcggaagtgatcaaccaggttgtcatatcttaaaccagtataaacaatcaagacattatcagcgaacattcgctctgcaacctgagatgattatgaaccgaaacatacctccctccaacggccaaaacctctcgtttctgactcttcctaacacattcgaagaagactccagatttgaatacagttggccgacttgaagttgtaggcttgaaaataatttttcgtcgaaccccaaacttctccgcgaaagagatcacttgcttgatttcagagattgcattgtgcaatgcagataacgcttggggaaatcgttgttgtagcttttctgttccggcctccaaaaaaggttctaagcaaacgatcaaaggagaaaagataaatgattaatatgaaagtgagctcaaatctaaaaactagtgacctcaccatcaatgtaccacttttccagctcgtctactattggtcgagaaagatttagtcgagaacgcagttgcgcgaagctgactttcggtcctatgtctttgagcatatcgcagacctcaagtcgacgtttcgaaggtacatgcgacaaaaccgaactcaaaacttgagatgcagcatcatgagtatggtatgtttatacagatcagcattaacaacagtatcgaaacaagactagactatgcaacatacccgagctgtgattgatttgaaactcccactcatatcgagtagacagagcaggaaacatatccaatattctatcgagaactgctataagttcggcttcggaagccatcgaccgaactggagacaagatatcgtaagccacctctccgaacgacgtgggctgcccaccagtcaccgattctcgatatgattgtccaatatggtatctcttcaaacgagcaagcttagttctggccacatcgcgagcgaaggctgggatagaaaaacgaaggtcgaatcagctcataatggcagacatcagttttggtctatcaagactcacaaacgagacctgaattacagacatttggaagttagctcaatgttgacgctaaataaacacagagatgaaaggaacatgagagaaaatctagaaataagcgacataccatcataaggtagctcgacttgttggccttgtctatttaaaaaccgcgctccaggttccttccggaaacccaaaagctcagtgacaggcaggaggggcggtggttcccagctaaagaattatatagagatgctgtcaaaagctgaccatgagtttgatcatctttaatttacagaaacatacttactcaatagcaccatgacgtcggaacagatctatcaaccgttcttttaccatgctctcgtatactctgtggtctcgagggccaccatcagggtcatcaaatgtaaaatccgccacggcgtcaggtatttctgaatttatgcaagtttttcattgtgagtgagaaaagcgcaaagaaagattgacgttttgttcgaaagactaacgcgagaagatgtggttgaacagtaccggataacgtgtggatgttggattgcctgaatgagaacgaccagtcaacatcacatcaaaaaagcaattcttgaattgataaacttaccaaacgttcgtactgatcaaaaatgtacgagattgcaaagaatatcgtcaatgatagtaatcgagaagacttgatggagttcaataggtgtaaatactgaaacccacaggcttccaagaagtactcatcctctttgatagagggaagcatgccgttggtaagaagtgtgatagcccgaggtcgtctagtcggatcgtgttgaagcaataatgagatgacctttgtttgttgagacttttgtacgctcggccaagaagaaggaaagacgatagaaggtgttcggagacttcgaatgacgagagctctttccatgcctgtcgacagagggaagttcatctcgaagaatatgatctacaacagcaaccacaaaaaactatttgtcagtgtatgatcatagagccgacggatgtgaaaagaaaaacgcacacccaaggagtacagatcagctttgtcatcatagcggcttccatccttacgcgccgtaccactctcaacctcaggagcaatgtataacgacgttccaatgcctgtgtagtaatggaaaatgagtgtcagaaaaaacaacacgtctgaatggaaaattgtttcggctttcttaccagaggttaagtcaacggagtctgcgagagatctgttaggagtattgttcatcgaggcatcggttgatgcaagatcagtagcagcaagcccaaagtctccgatcttgatacagttctcgtgatctgtaaactcgaaggtaaggttagcattgctcgctaatctgaacttacagagtagtgtagacaatatgtacacaccgatcaacaagttcgacggttttaaatctcggtggacgatacccagattggccatgtgcgtcaaagcttccaaaatctgtcggaataatctccatgcttgttcttctgtaagacctcgagcaatagactagaaaggattgatgttggtcaggtttaattttttgatgttagacactcaaagttgcgagttctacaaacctccttaagcgtttggttctcaacatattcctgaagaaatgacgaaggagcatgacattcagatcaagaatacaaaggaggtcatgatcataaaagaaaacaaaccatttggatataaagcactcttgtattggcatgatcggaagacaccatcgagccatctgtgaatgaaggctgaccaggaacagcatgtcccgtaggcgtagacaccaacagtctagatttcgagacctcttcctctgttgatgaatcttcggaggtatcgtcgctctcatcttcttcgtcgtcgtctcttcggtcgtcgtcgtcatcatcctgctcgtcatcaccaaaatgtatgcttgggaaactatggctccgactctgagtgcctctaacagagagaaaatcgttgtcggttggtttgaaatcgaagccaccgaaggagatcgacggagtcgtggctccggatgtgtcgccaagagaagctaaggaggaggtcatggtggcgggctcgctaactgttggcactgacactggaacgatagcagcagtctcttctagccaacatgtatagtctgatgacattcatgcgagaaattaataactccacatggttttcgtataaaatccagactactcacatcgcacgataaattgatgattcagtcgactgagagcattgacctctctaaaaactttttgctcattgtcttcaggccgaagtttgactttcttaattgcatctgatctcggtcgacagtgggttagtatatgtatacaaccagagatacaacaacgagacttacagaaacgcccgtctagtttattcttcgccttgacgaccttgccaaaccctccttctccctgcgcaacgacaaatccatacttgttaaataaggtagtaaaaatagtgttgatgccaggataagactctcaccaaaaattcgacctcctcaaaatcagctcggtatcgagaagtcagtgccaactgatgctctgctcctgctccatcgaagaatggattatgtggcccactgatccctggatattttttattgtatttagataaaccaaacgtgctgctcaaacattctgatatcgccgaatttgtgaccaaaaagaggtattgcggttatcatcaaggaaacaagggtttaaataagaaccagaacgacagatcttacttctaagatcttgtttggaaacatcctttccagaaacggctactgtgagattcaaattggaaagttttgtgactgcttggtcggctgtccatctttcgcgtgctattgggttcaagagattttggaggataaccacgagagcttcagggaaatagaagtcatctaaagatcacgaatgtcatgaagttgcgtcataagaacagatacattcagaaaatgaacgcatgcctcagagattagacatatcagttctttgaaggacaaaacagacgtactagaggctatcaaagcttgtaggttcggatactgagatgtgaatcaaggcaagcatgagtcgagtatctagatgataaaaacgaatacgtatccgggaatcaccttgtagactacatcagcaccacacatcatcctcagaaatgtcactgttgcatgccacacatcccgcttatgattgaacgcgtgcccagcttcgatctcatcaggagacaacctatgtaggttattggcgaaggagttttgtcagcatcttcgcagatcgacaaagtaagacaaaaagaaggaaggaccgaccagttccagggaagatctcttccgcttccttgatctccaatctcgtaaatttcttcgtcaatcaatgatggtgcatcagagaaagggtttgaccggtccatgtcgatgatccttcgtcgatagcaaggttctgagagacgagcatctccagacctgcaagaaagtataactgtttcgagacagatgtctacccgtgaataagaagcaagagatcaaattagtaactcaggcgaatgatgagaatcgatatgctgatgtaagattgaccatcatgagtcactccttgcttcctcatagcctctaaaccagcaagaagttgaatgaaatggtcctgcaggatacaatatgattagaatacataagttttatcatcctcgaaaaaagatgagaaggatactcactttcgccagctcgatatctaatctcccacaaactcttagtatacccttcagcctctcacctcttccaatcctacctgtcaacagacataatctcttccactttttcactcccgtctgaatttcggtcaacctcacagccagtactggaacgacttgatcactcttcagcgctaacactttagtcttcatcgtttcaaacagattgttgagcttatgacttccttgagcggaagagtaataagctgttggaaagtcgaccatagtgatggaagtatcatgtagttgaccaggtgcgtcgaatatcgatggtttctctgtattaggcagagatacgatggtttggtgctttgggatggcgatataggtcgtccatagtttgtctttcacgccacccacaattgtaaacgacccttcgatcccacatgacattgagttttcatcatttgcgccaaacgtaacttctgtccattctccagggtgggagagattattagatacattgacgactgctagttctgcctgacgggtaagttgaagtcgtttgtgctcgttgacctgttgtgtaagtaagtgagcgcgctcctgagctttcctggcaagctccgtctggtggatttgatttgattcataaagtgcctatttgaaacgataatgattcatttcatcaacacagtgttatttgttcttggccaatatagaggtcttaaattaatgacgagaaggaaacataccactttctgttcctcctctcgtttgctcatcagcacagctaaactatcagctgctgggtcgaagtccttggttggagggggtgccggtggcttcacgttgtctgtcaaccaatcttcgatgaacgatgcaagctacgacgtgttttatgtatcgacatgatatgttcgaactcttgtcaatgacagctgcagtatatggccaagtggttagatattaactaacgttgaatacgacgacgtctcctatctgctctcgagcggcgtggttgacgagtttggtgagaaccgacaattgagacgcgctgacattttttgaatgagcaaaagatagattgggagatagcttcggatacatcttggtatactgtatatccaaacatccgcaatatagatttatgcgaatggttccaaagttcaatccccaactcatgacccggatagtgggtaacgaggaaaggctctcgataggcgagaccaacatggaaacaaacgaaccttcacaaccaaaacgacgctgacgactcgagcactgacatcaccattgtctccgagatcatgttttccacttagtcggattccaaactctccaccttcaacacctccgactttgccccaagctttcggttgatttggcaaagggttcgcgagaaagtcatcgccatagatacttttctaaccgatgttcaataatttgggaaggagtcgtacgaagaacagacataagtcgcaatatgatcaaagcagaaagacggtcagacctgatacatgtcccatgagaatgctgttgtgataaactatgctttcatgaagtgtgaaagagaagacgaacaaggacttcaatctctgtctgctggagttctctgattagttcgggtgtggacatcgttcgaccggagtcgagtttgctgattgaggcgataggttggatgaaagagagcgccaattgaattcgaaaaggacaagaaaaagggttgttttgaatcagaaatcggacaactaagaggctgcgagagccctgaatcagagactcatcagggatagggtgacggtcaaaaaggaatgagaaagttgaatgagatggttggaagattgaacagaaagcgctaaagaagtgtcatcatttgatgtactggttacgcgttacaaacaaatttcagaaatctattttgtgataaccgatacttcagtttggaaaagaaagagaggacagaataggtatagacaattgaaacgaagaaagcatttgaaagagatagaggaaagatacagaaagcaaagggtttcgaatgacgggagctcagatggtcaaactccagctccttcttccttaaacttgagcttagagccctataactttcataatcacgtatcctaccgtgacgacaacctaagagaacagtcatggaagctacgagtcagccagtatcttcacaaaccctcagtcaaagacgaagagaggaagaaaaaacttaccccagtggcgagcacagtagcaggaattccgtttttcaagaaatctccggcattcagatatcttctgcctaaagaatcctcctgagagatagccgataaattggggaatcctatcatagaagtaatccatacatagtctcattcgtcaataatcacaacccgagggatttgaagagtacaagagaaaagtcgaaactggacaaacctgagacaggaagacccattccggctgaacagatcaaggcagtggccatgatgagcagtctcgggtgaggagtttcaagtgattcacccactcgggaagcaatagggacgagcaagatggaagcaatcgtgtgggagatgcttcaatgatcaaaaccaattcagtcaacgaactcactcgtggtgaacgctaatttagggaacacttacaaggtagaaactaccatcgccacggtcgcaaacacacagaggatttgccaaagacccatgccctcgaccaatcgctccaacaccgaatccaaaacgtcaagtactgaatacattgatcaagtcagtttgcttgctgatttttttcgtcttctagataccgagaatgatcagtatgagccaaatacttacaaccagagctcaatacagcttttcctagagcaatacctcccatagccaggaacactacaagaaacgactttgagttcacatcctgacgttaatcaacaggaagaagcgtatgagtctcactaaccgatcgaccagtgaaagctgtcaagatcagaggaacaagaagattagccttgccctttcttaatttaaaaataaatcatagttcgaagaagagacgcactgatggaaatcctcctgcgaattgataagaaaaacatcacatcagcaaggccacagtcttaccccgaagaaaacgaatgatgagcaaacctttgacaagatacctgttccgaagaacgccaagagaggcaggatactgatgcaacccatatctccaaacacattttccagactcttttctacacaccaaagtccaatagtgataagagtgacaaagaggacgaagtagtgagttcggttgaaagtatcgccgtgcggccggacaggttgaatcaagagatcagactcccagcgatagccgagatggaggaatgcccagatctgaatattgtccaatggtttggtagagattagctatgagagcttaagatcgccttgggcgcaaacaagacacttactatgatcaacgaaacagacgcgacaggcagagactgttttgaagttcaaatttgttcgtcagcctgatataagaataacaagtgaagaaaaggcacaagatcaacgaacaatcgcaaaccactggagccaatctaatgccggctccatagcctgaagagcgatcagattttgaggactcgagataggagacgcttgtcctccaatgttgcttgccagcgcgattgcaagctttatcgccagcatatctatcagtatacaatgaaaatactgctcagtggatcatgaccagagtttcgtgaagtgcttacgatcagacatcgagtgaaaggcgaattaggaggaagtttctcggtgatcggctgaatgagataagatgcttcagatcgtgaccaatagagacgtccgactcaaacacatagagaggacccaccttgatcaaagcaaagcataaagtaggcgccgcgacattactgatgagagaatcggtatactggagtcagccatattgaactcttcaattgaggcgcgtcattagcataatttaaaacgcacctgatccacatggacgcaaacgtagcaagaaacatttgactgagaagaaccatactaggtttctgaccagctagagtcatcaccttcttcgccatgatcacatccatgtgagttttcgacagggcagcagcgatagtgaatcctccgataagaagcatgatggctagatgtcaaaccaatgttaagagaaatacttcagatacttcgaactgtgaaaacaagattaggggagaggaagataagtaaggcgtactaggagaaaacatttgggaaaatatatatttcgtagcatcaggagcagacattcgagtatcctgcccatcagtagatcggagcactcgaagaactgggattcagggaagaatggattgtgaggttaagattcgattactgtagcccttcattaagaaagaaacaattatggcattttcaacataccgacaacaaagaaggggaccgagatcgaggtaacaaagagaggaatagcctgcatggtgtgttgcaaccacaagaaaagttggtcagaaagtggcagatgcaacgcaaggggtgcaacgctgatgaacatacttcggaggcccaaaggatagtgcaaaacaccaagattgccagacagttctgttcctcgactctctcaaacgtagaaattgttcctgttgctagaaggatgagaatcaagaaagcaccggcgaatatgacgcctccctgagacaaccaagtcacgccaccgagccccttctcagctagatgtccggaagcagcgcgtggatcggggacagctcgaatgtaacctcccgccagatcaccgcttctttgagaagacaccatctgtctccagactgatccatcgaagtattagatgatgtaagttgtgagattgactggatttcatccagatgaaagaaagatcttaccggtgtctctctcgataataactttctctcgaagctgagaaccaagttgacgaccagccaaggctttatctccgcctacgacgacacgtgcgctgtcaatattcaatccaaaatctgtgtcagaggttatttgctagatattgagctagaactttggttattggacaacacatactatgtagagataagcaggtggtcaaagtactctaatttggcctgaacatctccgtgccatggatagtgagtttgaagtatgctcgttagatagaaatccttggtctgttgtcaaagttgtgagaaaagacaagatctatttgagtactggcagaaaatgttatttaagcagatcatacagaacagagaacgcaccgaagacgaagtgattttgtcgaatctaacgcaagttttagaggaacgaccaggcgtgaacttctcaaaatgattacaagtcgcacacccctgaacacaaggtagaagctgttgtgactcacttcttcaatgccttcttagctccctcttggttcaattctctgaagtttcttagcgcaacccaatctagccagagcgtggtaattttcctcttgaatagaatctttaacattgacgcttgctgagagtttgatgtccatacgttcaccgttccctccatgtgagcacctgcagaggccctggagtctaagtttggcacaaatgcttcggatgtaaccgaattcaacatgagcccgtgattggatgacgaaccggaagcaaacgtgttagcgtctacagggactagaccgagttgacctggtctcgtatgtgagactgctcctcctgaggaagacacagtcgagttcttcctgcctcttcgtttgatattggcagtgggtgacagattgttggacggatgtttagccaatgttgcgttaggaagcgaagaggccgggatgaccggtgaattctcaggtgaagagtcgtcttcttggtcagtggaggtatgaccatgagcattgtacctgagacggttcgcgaatgaagaatgttgggcttcaaagaggtcagaagtatcatgagaaggggacctagagagctcggacgccccttgcgtataggtagcatataggtgagaacgacgactaacagagcgaattttatgaaccgagaaagtgccaagacatacctctgcttcttgatctggatctagctggctttcctgtgtgcactcctccatgtaggaacttgttcaaactaccgacagtctccccagcctcatcatcatacccgtcgttcccttcttcctcgctcaaatgatctctcctctcccaatcgtctcgaccatcgagatctcttttctcctcgtcgagaatactctctttgagttcttcgacctcttctgctagtcgcttctcagtctcttgatagaacttagcaaccttggtgagttccttgttgagaagtttgaagaacggcttgtgcaagggttcaatttgatcgtctcttgaggaaacaatggtctccgagtcaagcaacggagccgactcaagatcgtcgttgttggtgaatggggccggttgagtgactataggaggttcgggtatagcctttttgagtgcttcatagctgttgttcaagaagagacggaaagacgtaacgagatgtcagcccaccacggatcaggtatgttcggtttcggactcgtcccgagttctaacatcaagaatgaaattcaagaagaacgaagactacagggcaacatgtaaaaagacctactcgatgtagttcggcagccagtctgaccgactattaaaaaggagtgcagttctattcgagacgaaattaaacaagaatcctcagatgatgagcaacatgtatacgatgtatcggtttgaggtccatacctatagggcaaggccgaaaacccaatgcgacttacccaaacttcatagcccactgatattcggttcgtgctcctctatttgaaagtgtagtaaaggatgtatgtacaaaagtttctagagggatatcctcggtctgtggatgagctggtgtgggaagtatcgtggtaggcaatttagactttcgccctctttcttgaaacggaaggtcaacgcgtgtgacgggatgggaaggaaaaattggggcggaggtgatagaagcaggaggccgacacgttggtcatctccgagattgcgaatttgattttatcacagtcttcgattaggaatctttcacaaactttgtattgataacttctttctcctcatgtagataggagttcgattcttttgacttctctcttcttgtctttccgctcatttcctgaggaactcttttatcgagacaaatgttataatcatcatacgatacagcagatatttgcaagaaaagaactagctgcatctacttcagaaactgggaagccaagcctagcaaagatagaaaaggatatacaaataggtcagatcctgacccttggaagccggtcactgaaggtctaaaacttactgaagagagagctggcggacgatcctccgccactagcggcagtggcagagcttcccatgagaccagacatcttgctttggaggacgagctatacagaaaaaaggtaatagggatattagtttacacacaatgagataggttatgcattaaatggccggcaaatccccaaaaccaaccttcatcaccatcccagccgcgacattcatgacatctggatcgagggcagaaggaagaaggaagaatgcttggaatcagtaatcatagaagagataacatataggaagggcagcgacctaccctgcttggatcctccatcagcagcaccacccgtctctaaaaatggcaagcaaatgaagatgaaccggatgagattaagtcgcggatgacaagaataatagacaacaggactaaaatacgaactggaaaacaacttgctagcctcgctgatagccattccaatctatccgaatgtttaaaatgccattcagtctgggaactccattaaggttgcatcccacccgatgacgcaaacactcaccatctgagaagacccttgagcattctgggaagaagaaccggactggctacctccggtgaacgctttcatggcctgcatagctgcagccataccaagggagttggtgtccatgttggcgccctggccctgtcggtaagcctgtgcgtgggcttcttgagctctggtctaagatgattgttttatttcgtcgtttcattcagttccgaaacaataaatcagtctaaagagcattagacctaaacaacaaaattgagatgttagaacgaacctcgtcgattggctcgctagccttttcagcggttccgaaccgacttttggcaaaagcgagagcgtttccaaaccttcagaagagaaaaaatatcttttcagtcttctatgttctgatgcatgtcttcaacgtgtcaaaacactcacattgaatcctcgccgtcatcgtcgtcatctcgatcggattgctttcgagcagacttgatcacctgatcctcatcaactgaacatctcaaaccaaattgtttaaaccttgtacttttatagaagagaacgtttgatgttcagactaaatcaacttggggcataccatcagcttcgacccccccatgagacgatccatagttctcggatccataggactggttagaagaagtctgtcggtagtcatcctgttggctctgggcatgggatcgctcttgagaagcagaattctggtactggttactacctgaattgttgttgttgttggcgtcttcatacgcctggtagcccttcttggcgagctgcagtaaagtatatgcgcatgtgtgaatacatgatactcagaccaatgcagaggcaggtaagtatgatatggaccggactaacattgatgaagttgtcctgagtgagagaggagtgcggagaacgagatactaggtaagctcaattttgaaaactttgatcggacgacgataaggttttatgacaaaccatgtttctgatagatgtagaaagattgaatggaaaagtcgaaaaggaagagatgaagatggagatcgaatggaagaagagatataaatgggaccatcttccttttccttttttgtgtaaagagggtggctgtgattacctcatgatcgaccggatcaactgcttatgtgacttaggtgttggaaattcaagatttcacatataattcgaaagttcttctgggctgatgaggattttagatgatagtctcctatcaataggtcagaaaataaaagactggatgaaatctagagaaacaagaggatggaagatgtagtactttatatataattgaaaaatgataagaagaaacaaactgtatcgtaatgcaatgtgcagtcattaagggagaagaggaaagatggtaaaccctgaagggg

SEQ ID NO: 148 - DNA, 2102 bp, Xanthophyllomyces dendrorhous
gtagtagatgtagagaacataggcggtgacaatcatggcagtcatggcaacaagacctatgacggtgaagatcttgattggcttcttgagtccggcctgagcctcctgctcagtctgagtagcctccatctcggctcgctgtttctcgttcatccagagaacgcttgcaaagaacttccgatccaaaatgtggtagaacgctccgaagagaacgtcgaccgacttgagggcaattaagagccagatgacggtgttgtacgtattctctccagtaggggttaagtcctgaatggctccggtgctgacatccatgatggttgatccggcagagttgaaacacttccagattccaaaggcaactccaatggaagcctgcgagggcactaacagagggatactagcaatgaaaggaatagagttgaaagccaaggcaacggatcccaagattgtgggtgccatggggtgaacgctggtgaaaccaaggagaccaaagactaacacccaaagagcggcagtaaaactgatataggccgttcgtcgaccgtatagatcaaacaagaaaccgatgacgggggtcaagagaatggggatgatctgcccgatggccgaggtgtaaccagcggtcagggtggaagagaatcgggttactttgatgatgtcagccaagttggaagtgtaagcgttgacggttccagcttggaggagttgggtaagaggaagaatccagaaagcagcaggaatgagccggatggagagggtaataacgtcccaggctttgttgagagctcctttgaacccaggaccgtggggagacttgactccagctttctcgctctcagcagatagcattcggccggtgacgatctggtgtcgagcgggcaatcttcgctcaaagacgacgtaggcggcgttaatgaagacggtgaccccgcagaggatggcaggaacccagaaggaccaggtccagcttccagtggatatttgaataggaacggctgtagctttaccaacgacattgtacactcgaccaattccgatatccaatccgtaaaccaacgcaaggacacctacggatcccttagcagttcctcggaaccagtgagtgtacaacttggattgggccgtctcgatggtggttgaaccgaaacccatgataatctatggtgtgaaagaaatgctatcagtgagatgttcaaccaggctctgttgtacggggacgaggaacgtacctgaccaccgacgataagaccgtaagatttcgtggaagctcccacaccaccaagaatagctccaatgaagatgaaaatactggacaccatggatccccaagaagaaccgtaataatcgatagcctatgaaagagaggatgtcaatgcctatgagattgagagcagttggcctacataatttacttacaataccagagaaaataggcagaacagcgttgataagggaagaggcagaggagatctgagaagaaacatcaacagacaatggaataagacgatgatcagacttcatctgataagatgatacccggcatatatacatttctgggcaagaaaagacaatcttcctaagacgtaccacaccgtactgtgcgttgttaattttgagctctttgatgagcgtcgactttagaggactaagtgcggagccagcgaagttggaaccaactgtgtaagaagaaatgggttagggactattatcaaactagcatcaatgagagagatcggaacaacttgagaaactgtacatacgggtaagaagaaggatacaagccaaagcgggtcctaaagacggaagaggttttgtaagatagaggtgaatcagatggtgtaaaaagaaataaccgagctgagaacagagaaatgattgcctgcttacccttgtatctccaaggatgacagatgtccttgccgatggtttcctcgatagggaatccatcatcgtcataagcaactgcctgcataggaaagacctttctttcgagagactcgttcttctcttgaatcttctcgtcattgacgaaaggatcagaattggatgagcgagttgaagactgcatggtcagggttggcgaaggaaaggaaaggaaagga

SEQ ID NO: 149 - DNA, 2271 bp, Xanthophyllomyces dendrorhous
aaggaaaggaaaggaaaggaaaggaaaggaaaggaaaggaggacgacggatgcaattccaagaagaggaagagttggtgagctaaggtagactgaagaaaaaggaagggaagaataggggctaataaacagggtaagctttatagaactcgagaaatcggacggccagaagaaatgaaggaaagaaaagaaaattctcttctgtccttcagtctataggtttcaggtagggaccggcacccagatcagctccgtctaggtaaaagaagggtaggacagcatgggaacgataaccggagaaagagttcgttagtcttattggactggagggagaaactgagcggaaggatgtcttgattctgaccggtctcctccttcggcccagtcgatttcgtagacctgggcgtttgcggactcgaaacccgcgtgccactacgtgcacaatagcattttcgattggctgaatctgcaattactggcacatcaaatcagattacctttcatcattcgtcttggcatatctgacaagcaaccaatcagattgctacttcgggcttttatcggctctctttgacaagcgaaaaggaaacacgtattggatgaacacaacacctttgccgggcaaacagcacttgaaattcctcactcctaatcaattctacgagtgtgtctctgtagagagaacagttagcaaccaagtgttgggcaagcccggttcggctctctttcttgttttctccccttgttctcttcctttactatttatctctctttctccttgttgcttcaaggtcaccctagtgttgcaacatccagtgtgtttgttgctctcatataccactgcaattcgagtgccttcgcacagtacatatggtttgtcgttgtttctctctcaattttgaaaaaatcaatgaaaaggggcttcagcaaaacttttgttcttttttgttttttgtaaaaccagtgaagaatgatcatccggtggttgaatagacacgctttgctcatccatcctgactgcggcacgcacatctatcttccgggtcaccatcatcgctctcacgtttaacgagacggaagcataaacttccgtctcaaagacgggcccgcacctcttcagactacgagtgatttcccgtttgactctatttcaggattaaagaatcgtatgaacttgacggacagtccagatggagcattttgtatgtgtcttgaccatcggaaaagctatctccggccgtccgaaatatccgttccgacaagagcgccgttgtttatcaaccaaagaggagctcaaagaaaacagatatagcgacagcttggcattgcactcattctctctgtcccgtggtgtcatcgcagaaacgtcacgcaagtagcaatgtagccgggttatttcagaacacactctactcaagagtaaacatgaaaactttcattcaattcttcttttagcatgaaaaagcccttttcatctatgtccagtccaacttctgctctctcgagattcatcgtaactcgatggacgtctcggatgatcagaccgatatgagctttcttgttccagatcagtggatgatattccgacaggtgtaggatactgatggctctgtagacctggttgatgaaaaggagaacgcgaaagaggggctggtatcggggataccgagtgagttagattgatgggtgcaggatatcgatcggagtaagacacttggctggaagaacgtccaagagaatacagcgaatgcccagaatcagacggaagcagatactcagatgatgaccgttccggcccccatctgtttcttttccttctgtcactctcgccctctctttttctttctctttccctctccctttctctttccgaagttgtctcagaattcgtcctttgagttcgtttctcagagatggacacgccgatcgaagacagacgcgtctgagtttctacaggcttctgatccaattttttggatccaatgaacatgggtggtggtttgtttgagccgaatgccttaggcgggaatgtttctagagaagaaacagatgtatcctgattagatatgtacaaatcagatgagatgggatcttcgtgacgcgttttaaatgtgtgcttgagttctgacgaggatgagatattgggcatatacggatacgtgttgactgatgatctgaagcttgacgattcaaagaactgagcagatggtggtggtggcggcggtggcaatgacggtggcggcaatggtggcggtgatgaggccggttgctg

SEQ ID NO: 150 - DNA, 24998 bp, Xanthophyllomyces dendrorhous
aggaatgcgacagtgaaggaggtggaggtggaggtgaaggtggaggaggaggaaagtctgaggggggaggaggaggagctagtgcactcgaggaagacgcagaggatggtctgacatgataggctgacggaggaggtaatgacggtgggccaggttgtgaagttgactttttgccttttatacctccagctttgaatgcaccccaccctcctatcgaaccgccagcaccgttcccaccttctaccacaacctttggcttttttgccttaggcactttgacacccattgctctcatcaattctttctcctccctttttcgttctttctcccgtctttcatcagctgttccagaggtcgatgctcggtgagctgcctgaagacctttcagtctctattatggtggataggattgaaagcggattgataagataagtatgtttacaaggacagagagaaagagaagggcatgacacgaactacagtgtgatgatggtcgtaactgttgagatgttcactcaactgagggaatgttatgtactgttttgcacaatcctcgcagctataaatacagccaaggcggttagcggccattaacattaacacctcgaactgaagagacgtagtgatattatatgcgtactagaaagccctcagggtatcagcaatttctctcttaacctctgtctttttcgcctcgacctcctgatgtatagaacatagacatccgtaaagtcagaacagctcatatgtggtgaggcaagaacaaaacgagagaaacttacagcgccccgagctctctcctctacactcatcccggcccatcgttcgctttccatatccctccgacctttgagcatgacctcatccatcactctagtgtcttgtttgagttttccaataccgagaccaggagcagcagtcttgattggaatcggctccgtcctgcctgttttggtgccagcgggattaagaacaagtcccttttcggatcgttgagcttctgatgctataccagatatcagtagcaaagggacgaacctttcccatctatccccaagccgactccagaccctttccagcccatcttgatcaagagcccatagcctaaattatccattcctagctctgtattcaacgtgacgatctttcttggttcgtaccccaacctccgttcttcgtcatcttgaatcgaagtttcatttcgagacgatgatccgttcgcctcgttttcggactctaactcagactcggatgttaaaggtgtttcatcctctgattcatccgctggtcggctttcaacagatggatagaggaaacccattagtgatcttatcaaagggtttttgtcttcgttcaaaggattggtctctacgtgtggagacagaatcaggacagatcgctcgagatcgcttacgtcgtatcgtgcatttaagctaaggctatatatgaatttatttgattgattttacctcgctttcatttcttcgaccgccctcactttgaaacgctgtacttctcctagggactcagagtacatttgtaataagaaaaaatcggcgtacgggtcataaaatatcgggactggcgagttcaagtgataaaggagaaaataaatatgaaagaaagttgaattccatggtaagaaaaccgcaagtggtcaggataaaatgcgacagaatacagtctgataggataaagtatgaggatgattatatagaagacaagggggtttgactatacacagaatatctaagagactaataaagaagaaacatatgaggtgaaaagtgttgagcttctctgagatccgctccctacgatttctgcatctgtcctgcagattcgggatccagtgcgataatctcacccatggcggatgtatcccagccattagcctcgaggtatgccttaaactcgatattatccctctccatataatcagcatcgatgtttggaatgaaaaagtatgtgataccagccgaaaaaatcgctagagcagaagcaatgtagaacggccctgttgcaccggcgtaagttccacttcctccgagatcggcgatgatgggtttaaagcaataacttccagcaaaagctccaacctttccaaccgcagcggccacgccatacagggtaccacggactgcagttgggccaatagccttggaggcaagaagaccaaggttgtttccgggcccaagttctccaaatgagaggaaaagtccgtaaagaaccgcaaaggcggcaatgttctcgtgtttagttagggcgttgtacgctccggagagaacaaatccaaagatagcctgtgcgaggaggccaaagatcatagtgtttcgcgggcctagtcgatcagaaacaaagattgctccaaggaacgttccaggtagataaaacgcgttcacaagacacccccaacccaaagaggtatacagagtgctctccgaatctgcgacctgacaggtttgttgaaagtagtcttcaatcaataaaaggaacatctatgggaaaggcagaaaaagaaagagtagaggagcctacagagataatgacggatgaatagaggccaaatggatagacgactggaacgtaaatataaaaagtagtctttagaacaagtaggctcactcggacacatgaggtcaaaatgagtaaagaggaagcagatgagatagctcactccaatcatagatgaaccagttcaaagagaccgctgcgatcttaacccagtatctcctgatgataagcatccaaggaaccttgcactttcgcatgctacagtcatcatccgttcatcgttaggatgttgtgaatgtggatcagatttagcgtaagaagaaacgaacttgtgcatcctgtattgctccggttcacgcatcttgactcggaagtacctgtgaacgaacgttggatttataaataacagacctatttccggttgtcaaaggggttatttctttttacccacaacaaaagcagaggggggacaacacccaagccgacagaaatcctccaaacagcacgtagatggttcattccgcactaagatcaatgaaccgacaaagtcatctgaagtattttgagctaggaaactctagatgttgaagtagtgcgatataagatagagaagcaaacggacaatccagagaagcacaaggggcacaaatgcagcgatgacgaatccaagatcaatcatcgaggatgtagcgagctggaacatcatctgtcgtctcatcttgggcacgccttttgcttcagaattctcggatgctgccacagactgttgaggaatttaagtatattgactattgttaggcacaaacattttaactggggcttactccagagggatattctgctccaattcctataccggtcaggaatcggtatgcaatcaacgccttgagcatgcctggaacggaccctcctgctcctttagcgccggcagtaagtgcagtgaaaacaaagatgatgaccgtagcgacaagcatgcccgcttttcgtccgattcgatcgctaatgactccaaagacaagcatgcctagatagatatatagatgagcaagaggttcagaaagcgcaattataaatgaggaagaagcaacgaaccgatgacagtgccagcgaaagccattgatgatagtaactgagaatctgataaattcgatcagaaattcgttagtgagcaaggtaattcagcatacattcgcacggacggttttctaaaacaagacttacaattggtgttagccatttcctcggcatacaggaccccgaggatggtgttcacaggcccgataacctgtagagaaatgatgggacgttagcacctgagtactgagatgcgttctcagtagtttgtttctggtgggtatacttacagcattgacgtatccgtccgactgtggagcagatatcatgtatccacttctcgtgtatcagcttatctgacgacaaggctgaaaacggcaggatgatcatacttacgaacaaagcagacccacaggctaatgcaagaacgatgatgtggatcaaggccataggaacaagatttagtgatgacaaaaaacgacagagaacgagaagaaacccaagagaaagaaaagaccaaagcgagcactcaccgaagattaaaccatacttgcccaagcctagagttgtcgattcttgatcatccaatatagagccttctgagttgaccttccccgccggaggtgcctctacatgtttttttgagagtggccacatagagcgtgatttatcgggatgtaacttttatggccaaacactgtttcctcgttggacgggatggaagttggatagtaaagagaagggaagaaagttctcttggtatttcttttgacagtgaggctaaaacaagagattgaagaatgatctcaaaagcaacggagcagctccgaaaggctatatttagaacagatacacgacgtcgcgcgcttcgatgactattcacctcccgtcctctccagctccatctggatctgtttgcctctataaaagtaaacgtgtttgatcctagcaccataggccttcaaacagcaatatggaaagacgagtattcctacttgtcgacggcatgttgggtctgagacaagaagtaaatgatgaaagaaatttaagtaggacaaagaaaactaaggagggcgaaaaacagtgcggggagaagtcaaattgagcaaattgttggattcgggtccgtacagtttgaaaaacacaatgacagccagaccaattcaatcatgttctctgcttcgaaccatggacgacgctctgaaggatactgtcgcttcggccgacaatgagtcctgattgaacttttcaaaggataaaaaaattcactctcagaaatgctaggatgtgtacttgtcgcgtcgtatcctaatgatttcctaacatcatgtcacctatgagatgctacatgttcagcatcaaaagggtcgtgtacatcacacatattccagatcagatacaaaacagtcctgtagtgtaaacaatcttcctttcgactgggtaaacacgtcgtttgaagatttccatcctttttactccttctacttgatcacccgatacaggtattgtagggaagcggccaaaatgaagaccatcagatgaagactattgtctggctatccagtctgataagagataggctaatgttgagtgttatctaccttcaggttatgcgcgatgcttgacttgatggcaggtattgtgatttagtaaacgtggtgtaataaaatgatatcaaataagttatggccctgctgtggctctcagctcaggccgttaaccctaactacgtgttgaataaacatcatctctcgggccgtcagagctaacctttcaccatctttagaaacgatagcctcctctcagtaattgggaagactcgttttgtagaccatgataccgcttcaaaccctcccttgcttcattctcctcgtggcctcatctatttctcagactgctctttctgcaattgttcctgcgttgtcctcatcatctttccttgaagctggtgcctaccctcccatccgactcgtccaggcttggaaccctgaagtaggcgagaatggaagttggctcatcagggctttagaaatagataggtgtgtgctaacagactggaggtttatcgttcaggaatattacatagctgatgtttattccacctcaatcgaactacttgaaaatgggtgcttttgactctaatagcccggcttctgatacatgcaaacctgtcagctcaatctcatccgaaaagattatttcgctcatatcctccaactccgcattccagtcgggtgaacttgagaaagccgagggagaatgggttgaacgagaggctggcgaaggtatcgaagaaacttgggctcgagctgtacgtgtctcccaagatagctttcgagcttctcgcacagcttgaagtgcacaggcctgatatcttgtatcgaacatcacctgcttctgtccgtacatcctatagtgggcaaaaatgggcagctgcctgttaggatcggaatcgactaacccggatgatgtatgttcttcgtcttctttctgcgattattgtatgctaagagattgattcctataaattgttccggatataggttcccgttttctttgatctcgcccatcgaattcaccaaaagctccctacattctccattttagacgattccgatgtaagcagtcagttcgataggtgtatcacatcaaaagatttgacctatactgatttcataatcacttgggaaattgtatctctagatatcgcctgccgaggacacgtcctatgaactttccgagattttatcggtcatcaagacctccacaggttacaatgcgctcgtctgtctttctcttcataccattggatgttgttcatgttgcgtcaatctagcgtgctcatatgctgatagtttgactcgctcaactgaattcttacagcttacctgtgccgatgatctctcaatccaatcaatttcatatcccatatcgctttctggctctcgtgaatcaccagatttttcgcctcgagaaccggcctttcacgatgcatcttctggttgcccttcttctggtatcatgtgtgtcatatctcctcatatcagtcgcatcaaaaagaaaacttgttcaggtagacttatttcgaccttaaactttcaaaagataccacccgtcgttactttcgctcttgcccaagaaaaaccctcagccgacgcacacgtgggatccaatcttccgaccatctcctcgaccgatcaaaaatattccaacgcctcagatagaaccgactaagaagttggacttcgtgtttggtaagatggagcgcagggagaaggacaaggagacacaaaaggcagactcacctgtctggggcaagcgagaccgtgatgaattgtagtttcgaagcgaaccccattttaatgttgaagagccatcaattcttttgggttcttgcccgtttgttgatgtcactatacattttctatacgcaatgaagatgctgtgttcagtctgtcttgccatctctatatccgactacaagatgcatgattgactcgccaaggattcacttggctgggcaaagtcttatgtgctcagttgttgatccatttccttgccgcgtcagacttgtcctataaaacttgcggtgccttctctcctctcttgtacgtttcacctctcaccgccctgaacgttgtttctagccttttccttgaggttcctcaggggagcgcaaccaagagagattgattaccaagcccttatttcctctatattctcaagccctttcttcatctctgacttcttggtcatctcctgttttgtttttgtttttctcacccttctcaatcgaaagctgatcactgatgtttacttactccggctttgctcggatgtctatgactgaccaaaaccgaaaacaggaacttcattccgttcttggaccttgaccacgtctctatcctgtccttcttcctactcttttcccttcttctaatcctttcttcttattttcatctcttgtctggctcactttatccgtttaatcttcgggtaggtcggtaagaaggaataacagaagaacagaagggtctactcagtttcgaaatctgaaaggagacatcaagatctctcgtattcgcatctaccacgttcaaagaaaagccactctcatactttctttagacacatacccactcaaccgtcactttctcttagaaattcttcccttcttctccaaaatcttctgtccttcctttgtgtattcgtagatggtatcaaacaacaacccatgttggctagagtgagtcatatagttgttttcctgatcgctttgatcacagagtagcataagtctgactgatggttcggcgtgcttttttcgaacatccaaatgacagcggagatagtccatgtttgttcgcaattctcttctcgtcattcatttttgacagatatcttgcccttcaatcggaggaggttctgctaacagttatgtttaatgtctggcgtgaattttgtgtagggtcgcggagtattgcatatcatggcgaactgtgcatcaattatggaacgacagacttgattgtaggtcgaccgctgcttattctgtcagttacctgtcttcaatttgacagattgtttcttcttcgaacggtatgacgtagactgcatgtgtcatgtttggattctgtgagtgttatatcacgaggtacataactgtctgaagctgagcttgaactgacctgggaaagccttcctggattatagtaggacttcttctaatcgtggtcgggctgatctggttaatccgacactctcggcaagtgtgggtgtcaattatccttgaccgtcttctccccatgtccatttagctggagtgcatatgttgacgctcagcattttttccccatatccttctctaaggaaccggtttcaagcgttctggaatcagagcgcaagtcttcccctgggtccagcagatgaaccgggcgcatacgagatgaaggttaatctatcggacgtgtcgctctacgatcagccatcggcttcttcctacacttctccaaccggagggaacagaactagccgaataggagttcgtcctaagtacagcgtgcctcaatctacatctaggccagcctcactttatacgccgtcccgaagaacctctatacatatctcgccgaacccgtcaatgaccgctctgcccctgaacacactaggaggagaaggagaaggcggaggagcaccaaatgcgggaagatcaacattcgctccagtctctccgagatacaaagtgccgaagagtcctttgagcctaccgagtgcgggatcaaggccaggtgagccctacaatgatcctgttccaccgatgcctctgatgtcgagggataataggatgatgctaccaccaccgttggccatgcctgctgctcacgagggttatagttctgggggactgggtagtccgacgggagatggaccacactttgtaaagtaccacggtcctcataatcaccaaggttggttccaatcatgctttcctttgtctgtaatgtgaaagatgaagaactgacgtattgaaggcgtataaattggctgaaggtccatataccgcaccctggatgccccagacgtttcctcggatgccaatcgtccaacctcgggttctatctgggcctaacggtaacgggcaagcgtacggtcctggaaacggaccagaccttggccaatctcgttcaccgctagatcaaattcagtatggggtagcgaacataggctcacctcgttctttaacgacccaagatagatcgtgagaaccatgaatagatcgcccgctagtttcgtctcatcgtatcaacgtggcatcatatggttcatcattctttcacacgcattaggtttcgtatctctctttctttcgtatcagatgcctctcttctatatccggacactttccttttttaattttgattgcttgtgtcctttctttttgtcgtttcgttgtcagttgtaacactctctggtcttatcatatataatgttgcgaaagaatgatttccagcattctatcgtcccagatcgctgtgatcataaacttggcggaaagtagaaacgtgggcggagacgagaaataagatcttgggaaaacttggaaaatacttcccataatggatctggttggttgacgtgtgtgtgtgtgtgtaagcaagcctcaagaaagcggaactggttccctttgctctggcccagggccgaattgactttgcatcgtcttgcagcgggttcagtcttatttttacacgtgccatggttactgggtgctgcgagaaagcaagaaaaggtttattataacttatctctcggcgagattctcgcttggccttggcggcgtattccgctcgctgtatttttcctatgctgacctcttttttctctctcttggaacgggtctgactcaagagtgagggcatctgaggttatagggtgattgactggaacgtttctcaactagaactggggcttgaactaggcgaacgacatcgagtggcccttctgctggatcctgagtagccctgatgataagcaaaaaatcccaattcagaaagagaataagagcgtcgtgctaggcaggcatcaaggccgcgtctatacagatcgggcttgacacagcctgaactgaatagatatatacagggccatccaaaattaatattttcttggcaaaatctcaccttctatttcctttttttctctctaaagcttggctatttgccttgccgtcgttcaaagctgggcagtcgaataggttataagatccatgggggaggaatgatcttcttgttcaatttaccccttttgcccttcttgctcatactcaaagaaacagagagatatcgacacatatacgttgacgcacatacaagataagcccgatcatgttctgcccacccccccaacgacatcactttcccgaaccggcatccggtcccgcgtctgcttccgaacaccctctcgctcacactccaacgcagcatcagcaacaacatcatgctaatgttgctctccctcctacccttcgagagatcctcgatgccttctctaaagatggaaatggagatcgagagctcttgctagctatcctaggcgcaaaaaaagctgaggaagacgtgagtttttccctgtctccacaaactttctctcattgtgcttcccaagttattcttagccattttcaacactcgagcgctgaccctggttctttgttttccccttggcatcattgttggcctttaatccttcctgcgacctcctttgtcttgtctgctttgtttcgacagcgactggcatctcaactagcctgccagtctcaactatttattctctcccaacaatacgcgcaagctcaagcccaggctcaagcgcaagctttatattaccaccagtatcaacaactttgtgtggccgagtcttcggcacagcagatgcattcatatgcccgaccgaatggcgaagctcgacaagttacttcccccactgattcttctgcactttcattcccatctccatcatcgtcatctccatcatcgtcatcgattgagctggcagactcgacgagattcaatccataccgaaggccttcttcactttcggactcaggttgctcttctcaacccgctcctttcgccttcgcttcagcctcggccggaccgatctcattccgaacaaacaaattagccagaatacattctaccctccgaagtcgtcgccggtcctcgtcgtctgtttctgctatgtcattatcgactgagatccctgctgtctcgaccacggtcaccgctccttctccctctccatcgactcgtgtgaccccaccgcctacgaatccaaggacgccaccagcgatgtcttcatctgttagcaaacgagtctcgcttaccgatctcttatcgtcttcttcagagtcgaaaaagccggcgacgagggagagtttcgtcaggggcacacccaccgacggagagccgatggaggatgatgacgacgatgacgacgacgagtgatctttctcgtttttttttctccggagcttcttctatatttgtttgggttgcatttcttttgagttgttgctttttttttgccctgtgttgtacaagaaccttctttcgccaaatgtgttcttggttgtatgcctattcagcttatctagcctttctatcgaatctattactgctatgtttgtatcaatgctatacccctgctccaccgaatcttgtgtctcttttttctttttttttgtggaaaaaaagaaagatgagagatgcacacaaggatatcgaaagaacacactgagaacgatgatttccgatcgtgagggggactcgagggggtggtcccagagatatcagttcgattggcagactgtgcgtccattcgtagatatgaacgttcttgtctatacgaagtcttcaggtcaacctcacagccattcattcattcatatatcataccataatatttgtacacgtttctccccaaatttccaagtgagtccgggatggagatgtgatcgaagtctagtctaggtcgaatcgagatctatcctcgtctgtttggtatcgtcagccggggatagacaaaatgaatcgagggtcaagtatcaaaattaaaccaggtcagcgtccatcacaacaagatatcacatataggtgatgtaaataggtggattgtgagaagtgtcaacgaacctcgaaaaagagactgtccatctcaccctcgtccttatcagctaatgctacgctccctttgagttgaaagccgctcgtatctagtgcgagtcatggtggaaaagacatcgttgagagagggcttgatcagatctagacaacaggtgtatttggaacacactctaacgcaggaaagatagtgggagggaacgtacagacggcacgtaagagatgaagatggagtagcctactagagatctgatgagacccagagcccgaaaccccttgataagaatgacatgttcaacgcttaatagtcagttcgttcaccgttatatctatacagtaaagaacacgagcaagatagaacgaggcaataaaacaccaacagggtgatcctttaagcttgagctcatgacaacctggttctttcgccaatgtgtgtgaatgcttgattccttgcggccaagcatactgtcagtctcgccacgagtggcagagaaaaaaagttagaagatcggtccctattgagataaacaggaagtgaatgtgacacacgttcacgtgctcctcaacagaatttatgactgcctgaggagcgtcaatcagccagatctttgagtcttcctgaaaggccatcgaaaagaaccgtgtgggaatctggaaagagagaacgatagaaagaacacaggagtatgagtaatcattcgctcccagaaaaagtttgaccgagaagaccgaggaagacagagatgacaaacttcagatgctggacttttgctgtatttaagatacaaggtatccttgctatacgaatcgatcccggcgtcgatcgcggcacaaagtatatatccctctttggatagagcagaaagcagctctgacattagtcgtctcactctgaaagtatcgattatatgatcagaggaagagagcagaagtacacggaaggggtttgcttaatcagccctcgaggataaccgattacgcaacggtcaacgctcacttacgccacactgtcccgtactcctctagatccccaaaccatacccttcatttcgacctcccagacgtcggtctttgtttcacctccgtcagtcttgatggttcccgattcatgattcttggggtaaccgtaccgactgatgccatgaggccaactgtcctgaacagcgtgcagaactggcttgtgagtcgagtgtttgatgttgatgaactggaggacgttggtcttggttagcgcactggaagagaaggacacaagtgtataccaagttagatgagtgattgataatatgcgggcgattagtgtacatccctaggttggtttcgaaagaactagatacataacacagaacttgacccacaggatagcgtagcagcaggacccctgtaggtcccttcactccatcttcttgagttgatcggatgagctgttgctcagagagaacgacgatcgttgttcgctctgagaggcaccttgagagcttgtgatcagagcagagaacccattattgaggtctgcaagcgagctcgaggaagagaacgtcccgttggatggtcgaaggatggatttcggttcgccggacacagatgagccaggtgaagtgactggcagatttggaggcgggctcagcgacaaggtttccgaaggaggagactctcttccagatccagtcttccgagtgtgtctatgaagaaacgaaggcatcagataaacgatatctaccaggttattgctcttgggtgggatggacgaacgaataaccagaagatgagcgcgatgtcccaaagatgaggtcagcaatagacacgcgcagcagcttacataatcacaaagtccagaacccccgtcagtacacctaaccaccagcataaatccccaaccttttacatccaacagatctatcgatttttgttctcttgcctgcctctgtcttttcttgagcttctcttcttcaagcttcttcggctcaatggcttcttcaacatattctgcaaagttcttttggtgcgtcgttatttttttttcgtcatccgtgtgtgttgtggctctctggcttcagaggcctggcttctctatccccattctatctcttgtctctcgaccgcacttagttattcgccgcttttgccgcccctttcacatcatcgatctgtagcttacaaggtgtcgttttctttgcatcgttgaccatcgatcaggccggatgttcatcctcattctgtcattgtgacaggcagcttcgacaacgtaagtcttgacaagcgtacctgtcctcttcgcttatcacgatcaagagatggatgcgacggagcggactcagtaccgggtgctaaggtttcaaattcgcggctctctttcttttgtcggttcgaaattcgccctctttctttctttttctttcgggtcccttcctgcgacgcggccttgaaacaccgggtcacagtggtcaggtaacacacatcatctccagaaacacgaaaccgggttcgaggccgtcgtggaactcgaatacaacaaggcctacgagttcaaatatggtgagcgttccttttgatctcgcaggaatttgcccaatcgttgacagtttgcgccattctttctcgggctggggatgtcggccacagtcgtggatggaagtaagtgatcatcttggtatgaccacctatctattgatttgttctaatctgatcttatctactccaaccccgttttccatcgctagattggcaggctcgggaggatcaagataaggagtggggtacgtttctctcatctcaactccaagaaggaaaaacagaaacagataaacaaacataaacaacatagatggcttgactaataccacatttcggaactgtccctgccatgtctgctggttgctcttcctcctcttgtagattcacagggtaatatgaacaacgtataccgaacgccggaagcgcctgcgacgacagaagagccagtgcattcacctatcgttgcgtcgaacgctgttgacagctctgctattgatcagtccagtatgtacatattcatagctcaatcaatggttctcttctcccaatacatgtgcttagatcttctgaaacatgtttgttgcatatgttgattccattgctgcctccctcagatcgagagctcggcaccaaccaccaaaccattcccagccaaaagcctgcttccatcacctcggccaagtcagtcaaggatgcagagttgacaaactcggctcccctacatgcgaatgagcaagtaattccggagactaccgtgacgtcgttgtctaccgagacagaggtcacgcctgctcaagatatcaagaagtccacattgtctgatgaaatctcggacattacaaaatcaacttcgactgtcggcacgacttcttccccggttgctcctcccgctccattcgatcgatctgacaaggatactgtcatcgttcctaccccggctcaggcgttcgcccattccgcttccaacacaccgtacgatccgaatgccgtcaccgggatcggagcgcactctgcaaccggatcttctgccgtgcaagagacgactcccaagcttgagcaaagagagttgtcgccttctgagcatacatcctatcctccaggcctcggagcaatcatgggtggagccaagggcactaactcgattgctgataagaatttcgagtcagagactgtcagtgactttttttaatgtgtcattgttgattatcgttttttgacaagaaactcacgacaacggaaacgctatacacccttgaatttcattcgcacagaggacggtggagtatattgacgatcataagcttgcgggagttagtggctttagcgaagccgatacggactattcgagtaagggtgaagactttgcttattctgtcgcgtttactttctttatattagcgttctttccttaaaatttgcttgtccaaccgtcatcggatacaatgagggctgacgcctttttattctcgccttccttttcctccccgaatgtttcagtgcttgatgataatctctcatctaccgcgagtgagcaaaattttgagcatatcgcgtctcctaggatcgaggaagagcctttggttgtcgtccctcatcctgtgaagaccgcaagttctgccaatattgttccttcgtccactggcgatcagactacaactcgagcctcttttgaagatcctgcgcatcagtcctcagcctctgcggctgaactcgacatcccccctcaagatgaagatgatcttccttctcatgctaaagctgctgccgaggcaatcaactctgccaatgctgctcacccttctgctgaagatcctaccaatgttcctaccaatatctccgagagaaacactgatgagattctcatccctgccggttcaggtgatcccaaggctatggagcccagcaccactgtgttggagaagcaaggaaaagatgcggaggatcaggatgacaagaggaagcagggtatcggggctaacagctctaatgctgattggagcaaggccccgactacttcaagtgctaccactactatcgataccaattcgtcctctcaccagcatgatcagaagaggtctaccaacgagttggattcgaacaaggcctcagcttccaccaagatccctgctaccgctgtcgctgctcccagtgctgtcccgatccctgttgtcgttgcctctggcccttctcctacattgaagtcaactggcctgcccacttctgcatccggcacactctccatccctgagactcagaacattcatgcaatctcacagcctgcagggacaactagtgagttgtccacctcgagttctcatctgaaatctcctaagccgatgaatagatcggtctcagctgcctcgtccatccgagatgtccctgggcaataccctaatgtaggaagtgggtttaccactcagtcttcagagagcactcccgccagctcgccggccaagccgcaaaggactgcgtcagagcgagatgaggctgtcaaaaagcgcaagagcggcttatttggaaggattggaaagttattcggatcaaagtaaaaccgtgtctccacagaatggaaagaggaagcttgaacagatctttctgatatgataatttgggatcatctctttcatctttgggtcctttgctttgccaagtttggtttctctttcatctatcgtagccgttatttacactttcttttctttttctgcgttctttgttatcgtacaatctttcatctcatcctaatccctatctatggtatgtcttgctctatcgttctttattagtactattctctctaaattcttaacgttctcctttctcttccttctatctacttttccctcttttgttccttctgatttctcctcgtcgggtccttgaccggaagcgtcacttgcagcctccttttaaaagggttcaagacgatgtctgtctttgtcaatgtattttgatctatcctagcctaattctgtgtgtataaacctctccctatgatgcatgatccttgccgaatactgcgtgctcgtgtgcggagagcaggattaatgtgtcttggcctggccgcgcgtgtaattcctcggttgacctagagatctactacttcgcgtccttgctcggcttcgcttgaacatctacttttcaaaagataaaaatgatgattcgtattgaccaccgtacttctctcatatctctctttatctttgacatcgtgacacctcttgcctctcatcgaaaatatcttttcgtatatcagccatcgcccttcccaatctctctgcgctcaacaatatccattcatcttcgatatccgatcggaagcaatcgcctttcgatcttctcggctcgcttcccgctttgatcacaattacatcctatccctctcctatcaactctcacaaatttccagccgcttttttcttataaacgtaaacgcattgaagctcgaaacgaatggttgaaggtcgtatagttccggaacgaacacgccggccatggacagcgactgaacggtcgattctacactccttagcttctacttttcctagaggtaagcctgattatgccacacatttatctctatttagatagacaacgttgacattgcttccctctttctttcatatgcggtgtctcttatgtttctgtgaccacctataactcaaggctcaagacgatggtatgacgaaaagttcgtcgatgtattcatgatgggtcggcttagaggaataggaagaagcgtctcagaagtcatggcttggggtatgaagactgggggagaagacagcgaggatgaaggcgagagtggccatgcagataggtgagttccggtttgaacactgtgtttcttatcctctcccatggctggtataaaaaatccctgccaaagaactttcgaacgatatgtcgggtatgcaaagctaaaatctccatgtccgcactgcgcttgtgacctgtttgaaatctcagatttcatccatccaattttcccctagtcccatcaagtatcgagccaggcgcttcccgcgtcattgcccgtcgggctccatcgatctcttcccagacgtctcgaacattcgagctagctatcaacgctattccctcctcttctgctcttgattctcatcctatctcttccggtccttctggctcttccaatcgtcgccgaagagttgatgcggctgaatcaaatgctgggtcacgtcggacaacatcgctcgctcctttaggaccttcggcgtctacgttgtatccagaaccaaggcgaccagctcgtcaaccttccggtcgattcgtcgcgccagatgtccgttttccaccttcggtttcgtcctcgtctcttgctgtttcacccacccaaataggatctccagctagccgcaatccatcttgggcttcatctagctctcgaccttccccacctcagacaccccgtcccgtgtcgccgagcaggccatcatctccaacacagtcagcactctcttatctgaatgcgccgtcgttggtgtcatttccgtcaagaccggagagcgttcatggggagccagtagaaagttttggagcgctgccaggagggaatcatcgagccattttgctgcaacgcttgggagacgcagaggaggcagcagaggaggatcctaggttagcacaagctttaggagtcttgctggaaatgggttatgtaggcagtataggaagtgcagggtgagtagctctgatcgcttctatgctttgtaaaaaagcgcgcgagatcttttcagttgattggtgtgatgctggcgttgttgtcatttcatttttttttaaatctagaaacacgagaccaaatggagaatccgatcgatttgttttcgttcagagtgccccagttcatcatcttccaagtctttcttcgcctgcccgatcggctaccccagacgatcggccaacctcaaatcgacggacttcttccaacctgacatccacgactgcatccggatctggatctagtcctgcttctcgtggacgtcctcgaagacgtgctgcaggcgcaacaagacgatccactcggtccaacagggaacctgttgctctcgcccaggctaatccctctcctgcgtcaagtactcgatctagaaatagcgcggttcgctcatcaatatcagagctagtcacaggacatggccgggatcattcttcaccaacaaccgaagaacgtcaaacagaaaataggcaggagaaagaaggcgaagaagcagttgaagagccaattgatgagtctgacggtagaaatcgagtcgtctcgaaccctcgtcctagaagacgtcgaagacccgatggtcctagtcccctcgaatcggctgagagcgtgagcgtttcttcgttagccgaaacgacatcgtcctactcaaccgcgcgatcaaatacctctcttccgacaccatcacctgaaatagactcaagagtatcatcgcgaagctctctcctagccttggatacggtacaaccttctcaacattcacttattcagactgttcaggacgatgaagatattccaatcgctctcagaaggactcctaggagttctacggcaccattcgcgcccacatcggcgcgcatcggaagaacacgaaactcatcgaacgcttccagttcaactagtctctcgcagcctccaaacaacaggctttcgtctggattacccacgcctatcacaactgcatcagaacgactctctcccatgcctctcacaacttcttttccacccgtagaaatcccgaatgttgatcccgaagctcatcccgtttctgactgcttgagaacgtctcaagtttcacaacttattcctccagatgtttttcaatcctcctcggtgatcacagacccaatctctagcctatcgacatcaggaatgagcggtactcatgagagcagggccggagaagatcctctcagaaatgttccagggttatttgagcttgggagaggattgtttgaagggttcatagcagccccttcgtctgcttccactttgcctgttgtcaatggagagtttgttggtgaaggaaggggaatgaccttgactcgaagtcggtccaatcggtctaggagaaggctgagtacttctggaggtacgacggatcaaacgaacaacccggtgatgagagggactcgatgttcaaccgttcctcctctttcaactccatcagaatctgaaaccttgcctacgacgacgacggctactaccatgtctgaatacgtcgcgcatggaattcaaccccgcctgagaacatttttgcgttcagatcgtcctttgtcgactctatccacttcggctcgtgctatcgattcaacccccttccttcgcaatatccgacctcctactactcgatctagatcttccctccctagtataagaacgtctcatcctccaggacccacgacagtttcgaattttacttggactccgacgcagcgttcaacagtttcctcttcagtgacaacgacaatgacggcatctgcctctcaaatacctgcatctccaacacacactctgctctcgttgacatcaactatgtcgtccgaaaacgatctacctttggatcgaaatcctccaccagcttacgagcgttcgctaggcgagcgtgcagagtacgtcgcgcctcctccaagaccgaggcgaggagtgagacaaagagaggaggcgacggaaggaaatagtatgagtggtctagctgggagactacttggtggaggcacacttcgagatcctgacatgagacctaggaacagcatctcaagaggagagggtgaaggggaaaacagattgatggccagaggaaggagtctgagaggccttcgttgagagacgccctatactataccataccataccaaatatcttgttttctccttgcttcgttcttcattcttttcttgaggaccttcctccctctcttctcaattgcatctggactttactgcttctggcttcttttccttgtttactgttgctttctttataattcacctctctcttggtagtccatagcctcttctttctgtttgttttcatatgtccttcccatcctgttccaactctgctgcatcattatctcaactcgactctttttcacatgttgcttgttacactcattccatcattcacactcctttcatttccccttcagtccaagtcggatcgtctgcatacacaagatttacatctaacttgtatctttgttctgtcttatccatcattgtcttgcctgttattttctctatatatgaatgtcctcactttgcgttattctatttttcgtacggcccacaaggggtcgtttgatgttcaaaacatcatactttgactatatctctttaatacggtctcttatttttcttaatactttttccacacaatttccgcctaaacgcttcctccaatcttttaccctttccaccactccccccatcgcatcgaaagcaacgctctctggatccatctactttcgaaccatccagacaagtagatagtcatctcaaacaatcgcctccgaactcaaacgtccgcttgaaccatcactaaaactgaacaaacaacccagttgaggtcttcaactttcatagacccatcatctgtttaaagaaaaaaaatccccatctcgtcgccttcgttcttcagccaaatcagcttcttgactaaatctgcaacgctcatcttctgaataaactctcacaaacaatcagccgttgatcaatctctaccgagacttgactatcttttctacacaaacttctgtttctatctacaactatcgacaatggcatcatcatcgtcaacaaggttcgtctcgtttccttctagattcgtctctttttcttatccttctctctcctctagccacttattcatccggagactcgaatgtttttaaatggctgatttgtttttcatctatctgttgtgtaccatcaacaagccaatcctccgagtggaagtcgaagcttaacttgcctcagcgagacgctcgtcctcagactgaggtaattttcctctttttttcaacgcccctttccatcattctctcatatgtcttccttttctaaatcttcgttatcctcatcttacatgcgctcttctgacacactaccgctcttgatttgatcgtacaggatgttcttaacactaaaggtggtgattttgaagactacaatctcaaacgcgagcttctcatgggtattttcgaagccggatttgagaagcctagtcctatccaggaagaggccatccctgttgctctcactggacgagacattcttgcaagggtaagttttgcattctagttcacattttgtgatgatagaggaaaccttctaaccccgaatcctcattctaggccaaaaacggaacaggaaaaactgctgcttttaccattccttcccttcaaagggtgaatccgaaacgacccaagattcaggccctgctgcttgtgcccacccgagagcttgccctgcagacgtctcaagtgtgcaaaactctaggcaagcaccttggaatcaacgtaatggtgactactggaggtacaaccctcaaggatgatatcatgcgactcgccgagcccgttcacgtcctcgttggtacgccaggcaggatattggatctagctggtaagggtatcgccgacctgagcgaatgcccaacgtttgttatggacgaggccgacaaattgctcagtccagagtttcagcccgtcatggagcagctactaagcttctgtcctccagagagacaggtcatgcttttctctgctaccttccctctcatcgtcaaggactttaaggttagtctttgacctcgtttgctgcgctaatgtgcgatagttacacgtcgaaatctgtctcgatggcggtttgctcaaaccccttcttttcgtgtcatatcaccaactatacataggacaagcatatggtgcagcctcatgagatcaatttgatggaagagcttactcttcgtggagtgacccaatactacgcctttgtcgaggaacgacaaaaggttcactgtcttaacacgctcttctcaaaggtttgttcttgatctcatcactatgtctatgtcctggataggtctaattaccgtggtttggtcactcttattgtatcccacacagcttcaaatcaaccagtctatcatcttctgtaattctacgaaccgagtggagctgcttgccaaaaagatcactgagcttggctattcgtgcttctactcacatgccaagatgcttcaggctcaccgaaacagagtgttccatgacttcagacagggtgtctgtcgaaatttggtctgctctgatcttttgaccagaggtatcgatatccaagctgtcaacgtggtgatcaactttgacttccccaaaacggctgagacatacctccatcgaattggtcgatctggccggtttggtcatctcggtctagctatcaacttgctcacatatgaggatagattcaatctatatcgaattgagcaggaacttggtacagagatccagcctgtgccaagcgtgatcgatgccaggctctatgttgcgccttcagccattcaaatggatgtgcctccccaacagcagcagcagcagcagccgccgccgcagcagcagcgccagatcaaagagcagagccaggagcaggatagacatcggcaacaaggtcaacaaaatcagcagcggggaaacagcaatggaccgaggggtccatcgaacggatcgcggcaacttcctcctcctccaagtcagtagaaaaccggtagagaagttcacttttaactattctgctacctttgcgtctactgcaatctttccatagtagacctatcatctattctctcttatccttttgaaattctcatatttccctcaacatctttggattatcctttctcagcttcaccgcttcgaccccttaactcctttccaccatgcgtgttcctattttttgtcttccttctttctactcttctgtctgctttgggtctcgtattctacctcaagtgtatctgtctcttgctccctccatcaacttcccttcacttccccggccatccttccacctcttttgccttatccaaactatgatcgacagacaattttgtcgttgcgttcgtcatctacaatctctccacggtcgcctgccatcaagcctagattttccttaatttcttttggctctactctatcc

SEQ ID NO: 151 - DNA, 16813 bp, Xanthophyllomyces dendrorhous
cccttcccctcctcccttttcctctcctgcttttccatcttagctaagcttccgattcccgagattagcctgcttggaaatagctatctgagatcgcgcatcctgtatctgatgtttatgatcttaatctctccgcttcatccggcacgtgatatgtctagatctttgttgactgattgacaattagaagtgattaggctcagaaagggaaaatcgtaaccagcaaatgctgtcctcaacgccacatcgtaaccaaaccccggcccctgccaccacaccggtcttcttcttccctcttccgtttctctgcgttcacttcctaactttgcgcctctctccctctttctccaccttcacgccttccctctatcacatacagataacgacatacacactctcgctttcagacagacttatcatttgaccgcttgcctcaaagtccttcaaagaagaaatcctcgttgaactctataggcccctactgtcagtgttctttattgtcttcctttcaatctttgtttccccaacccttctgcctttcatttcccttccacttccgaaggattatttcatcatacatcatcagccagagaggagagaaaggaaggcttttgatcgatgagaagatccgacggacaatggatgagaagagatggccaaggagagtaggacaggtgcactttccgggtcgtgtgttcagatgggggattccgtccggcctaggctgttgtcagcttggatcgcctgaacacgtaccagaggagggagaaagaagggatgagatatgccgttctcacagcttgaagtagcggaaacgtcctcctcaacaactgttcttcttccttctcggaaaggattatgtgcttcatagaaaaggataccaggagtctgtagatgttgtttggggaagaccaggggctgtgaggacggtgcacaagattggtatatgggtagagaaagaaagagaagcaaaacgctaacattcctgacctcgggggtttcgttctcgatcaacaggtccctctttttcgttcccctctcttctctagccagccaatcattcttgaacatcgaatttcttctccttcacatcaaaaatggcagagaaccagactcctgaaatcgatcttgattcagtcatcgaccgactaatcgaaggtccgtcgtctcatctcgtgcttgccttttttgtcatactctgttctcgactccttccttccaaactcctatccgatggcttgtgatgctgagattttcgttgttacactgttcctcctctccttatgtctcggctttgaattcgcaatccgggtgacgaacttcccattctcaactgattcgaaaataaacatagtccgaggacatcgaccaggaaaacccgttcagctacaggaatacgagatccgatatctctgcactcgggccagagagatttttttgagccaacctatcttgctggagttgttcgttcctcccgttcctttctctccatatgactttaagccactcgaacgaggaagatctgttgatcactagatgcacttgaggggtcttcgacttatatataaacctttgttctctttcgtgtggattggatatattccctatttctgcgtacagagaggcaccgataaagatctgcggagatatccacggacagtactacgatcttcttcggctgtttgagtatggtggcttcgtacgtctccggtcatctattttccttgtctttttggcgacgagcaagcggatgaggaagcttactggtgatgccgtttttttctcccaaattcacacctgggcgttctttctctctgggtttgcttcgtatctgcaccttcctctcatcaaacactctgcccatatgttgtttcacgtggtcaaacaccctcctgtctgtctgcctgtctgcttttgctcgtgcagcccccggagtcaaactacctcttcctgggcgactacgtcgaccgagggaagcagtcgctcgagacgatctgtctgctgttggcgtacaagatcaagtaccctgagaacttctttatcctgcggggcaaccatgagtgtgcgagcatcaaccggatctatggcttctatgacgagtgtacgtgctctcactcttctttttgttgtttttgcgagactggagcggaagatggcccgaagatgatgtttgaaacgatctaggaaagtgagatgtctgaggtgtcggtgaggggtgaattgtggcaatatacttcagaagaggaagggaactgcaatccttgctcatcaacatctagccaagctaaagaaacttatatactcacgttgcaaactcccatcatggcttttctctggactaataggcaaacgacgatacaacatcaagctttggaagacgttcaccgattgcttcaactgtgtacgtgcttgatttttcttgtttttgattatgcaccctacctctaaataagcaaacctaccattcgactactgtttctttgtcaacctgaatttttggctcactcgttcccgctacccattgtttcatccaatttttggtcgcttcaaattgcgttctctcaacataagctccctgttgcagctatcatcgatgagcacatcttctgtatgcatggtggactctcgccagatttgcagagcatggatcagatcagacgagttatgaggccgacggatgtgcctgagactggttcgtcacctctataactttttcaaatgaagcgtcagctgttgtgacaagtggactaactctttttcacctatgtactgtcaaatgcgcggtggactctctggcatatacaggtctgttgtgtgatttgctttggtctgatccggacaaggacatcactggctggagtgagaacgatcgaggagtgtcgttcacgtttggtccggatgtcgtttctcgattcttgcagagacatgatatggtttgtttccttactttgtagattcttgtgcatctagctcaacgcgttggattagtgtactgatgtgggataacccactttgaaacataggatttgatatgccgggcgcatcaagttgtggaagatggatttgagttctttgccaaacgacagctcgtcacgttgttttcagcccccaattagtctgtccttcttagtccccaaccgttcttgttgaaattaccctcactgacgcgtgtctcacatcccgtttatactatcagctgtggagaattcgataacgccggagcgatgatgtcagttgacgagactttgctttgctcgttccaggtgttaaagccggcggagaagaagaccaagtatgggtattcgtcgagtaagcgcaaggtaatgtaattttttttggtctgtgatatgtggcgtgagtatagagagatttcgtcactgatctgttcctttacatattgcttttcttccagtagtaatgtgattcacagaacagacgttcattcaggaaacttgagccgtcccttccttcttataacccgcctgcacacactgtctcttctcgcgttctttcatcacttttggttttgttttccttcgatctctaccctatttctgattgcctctagagtggttcgacgatatcttcctcttctttcctcctactttcaattgtctttctttgattgtttacatactgttttcttctgcgaagactgagtcatggaggagccctttcttctacatcttgcgttggtatccctctatgaggtttctcctacaacttctttctgcaatcacaaaacctagttccaaatctctcaggtcttgaatttcttctgttcttcatctcttctcccttccaatttttcttttcactctctttacttttgcttctctaccctcattctccgtgatctcgaaagcctggtgtacaagtatggaaagaggaagaaacccctgtttgctcaatttttgatacactgagaacaagattgtgcacgaggaaatctttgtcttcttggctttgtgtccctagccatttgcctttgaagacttgcacgtagacgtgagctatcaacctacactgttacgagtcttgatagaggctgtaccatgtgagacgataataaattacttttcatcagattttcgtcctttatcaacacgagatggatgtgtaagtagcggcacacacaatatccatcggtgtatttgtttcgtaggaaattgagattgttagaagccaacgtttgagcaagcgttgtatatgctcatcgtgatatatagccaatgtaacacaacgatgctcaagcctggcatcctctctgaccagcttttccaactgaacctcggagttgagctggttgggacttcttccgatattatcaacctagcttgatcgtctcgttgttcgactttcgtattgagtaacgatgacatgggggttcggagctgaatgataaaagatcgggagtaaatttcaatgtgattatctgtaatctaatctctccgtcatcgatcgatctatctccctgcatcgcccatcgaagaagcaccttccatcttttccttttcctttcttgatatccatctttctttgtgactaccacacactcatattcagacctatacaccatgaccaaaagcgatgcaagagcatgggtgactttgttgactaaggcatcatacctgcccggagtagttcgttcttcctttcgtgcttgtcttcaatctcgtcgtttccattcaagctcatcagtcttgccacctttcaaaaacagttgattctacacaaatcgctgctcaaatataactcaaagtatcctcttctcgtgattatcacaccaacggtctccagtgaggttcgggaagtcctctccaaagctgaaatcgctgtaaaggagatagagtacctggagccaaaaggcgaggtcaacgttcttaccgaacgattcaaggatacgtggtgcaagctgagggtatttgagttaacagagtatgaggtacgttacttgtcttctcattccagttttgtaagcatgtcttttttattgagcctgttgaaacaacgcaacccagaacagaaggttattctgcttgatagtgacatgatgcttcgaaagccaatggactctctattcgatctgccgttgcctcccacctggattgccgccaaccatgcctgtacatgtaatccaactaagatggatatctatcttcctgattggtgattctctatcatttaaactttcgcatatacattagaccgactcatctaatcctttcctcacaatcatcagtattccggaactctgtccgtacactccgctcactcacccatcctgtctggagaacccgacgccggtgaatgcagattcaccgagaacccacacgttactcaactcgggcttagtcattctatacccttccgacaaactcttcgacgagatcaaggaatttctgtatacaagcccgttaatcaaggtgagagacatctcttcttgtcttcatcgcgtttctgttttctcacatcaattattcgagggctgtttcacgtaggaaatggcctttcccgaccaagatcttctggccgaattctttaaagggaaatggaagccaatcggttggcaatggaatgcgatcaagacgctcggatggtacgcctaaggctcttgtcaaccttctcttggcatccacataaaacgtcatcagctctaaattccatcattctaaatctcatcttcttttcttcatttcaacaggcttcacccagagatttaccgagaggaggaggttgttaacgtaagggtcttggtggtctttgctgtcttccattttggagtgatactgatttgtttcttctctgtactgaatctatgaattctcggggattcagcttcactacatcgtagataaaccatgggaagggagacccggtccagactcgcctgatctcgtcactcatgggtggtggtgggtggagtgggacgatttgatggcagagtggacaaaggatgagaacaaacaaggcgttaagcacgtcgtagaagggttgattggagaatagaggggcgtattcgggcgtaaaagaaaagagaaatacttgtttcgagtgttacttgtacacgtatagaggatgtgttttgaagtttcatgctgaacaagcaactcatctattcttatgtacagagatgtttatcttaattgccaaaatcgcaagacgatcccagcagctttccaacctgctccaagccaactctatcttcatctccgaatgttcccaacctgacggaatccaaatctaacacgccaaccgtccttcctttgctatcgatcaaaggcaagacgatctctgatttcgtttcgccatcacaagcaatatgacctggataggcgtcaacatctttgacaatcataggggatgattgaacgaaagcatcagcgcagacacctttgcctgcttgaggattgatttgctggcaagctggtcggccggcaaaggggccaaggagaagtaaatcgggcgaacccgaaagcagaggaaagaaccgagcgtgaatataaaatcctgtaaagaaatattaggtggaaatttattttcccttgcgttagacagactcatatgaagaagcaagagagaatggagattaatgaataagcagaaaacgaaccacaccagttgacgattgggtcgccttcctccgtccgtccgaatgcacggtcaccaccgaaagccatgaaatggtgatacatcagcgcacttgcgttgcttaggttagagatccagtttgagtgggcctgatcttctaagagtggttgtaatgattcgagcaagttggcgtagaacgtcggcttgctgttttctcaagaccgaggaagtgatcgtgtgagcggagaaagctcgagatgactgccccgagaaaaaacatccaactcaaaataacaaaaaaaaaaaaagggactaactcgaccacttcttccggaatatagatgtcaccgtgaggcatgttggatgaatatatacaatctcaaagatggttggatgatggtgatcaacggtgaggttgatgggataatgggctaacgggctgatgggaaaaatcaaggctcctgaccacgtgattttgaggctgtgctcaacctccggccaagctgtgacgagccgcctcccttgttatctcggccgcctttaaagatctccatcatcatcagcagcagcagcggcatcatcatccaaccacaaacaccatcttggccatctctatatcctgttgagtcgtcttccagagttctcctcctaatctgatgcactacttatagagatactcctcgcgcagacatatattgctgttccgtttgtatctacacaactaggaaaacaccatagattgaacccaagtccagttctcctccttcgctcagactcgaacggcctccaaatcgcccgcctcttcattcatctcgttcgtcgagattttgcgatatatataccaacttgatccatccgcacgtctaatctctagaacaacagctcccgaccagcgatagcttgcactatcttgatctatacttgtctcccttgcgttgattctcgcatctgccccttttagtcctcatctacctctcttcaatcaagacctttctctcgatgtctcatactgaggaaccagatcttgattcaattatcgaccgactcctcgaaggtatgctcttgatcattctttctctatttgtgcggctctcgtatgaataggccatcatacgaagtttgttcccaaacttctcgcgagcactggctcgcgaactaaccaatttagccaaatctgatctatgagtcccacaaaattttccatgcaaccgcgctgtgcccaagtccgaggggccaagccggacaagattgttcaacttcaagaattcgaaaccaagtacttgtgcacaaaatcgagggagattttccttgcgttcgtagagtttcctcgatttacttggctcttattatgtttgcgcactcacccttcgagtggctcttcttcattacaaaccgtgttgacactatttacacgtagtcaaccgatgttgatagaattgtaaatgacccctctctgtcaatctttggttttaattctcttgaaaaagcctcgacgtcaagtccgcacgcttaaacgggcgatatcattttgatctcttaatcttttgttagagaggcacctattaaagtttgcggagatattcatggacagtactacgatctccttcgactattcgagtacggaggatttgtaagtagatcttcttagtatttcactgacttttctgattgcaagtattcgacagaaatgcagactccgccttttgctcatcctgcatccatctgcctgtctgcttttgctcgtgcagcccccggagtcaaactacctcttcctgggcgactacgtcgaccgagggaagcagtcgctcgagacgatctgtctgctgttggcgtacaagatcaagtaccctgagaacttctttatcctgcggggcaaccatgagtgtgcgagcatcaaccggatctatggcttctatgacgagtgtacgtgctagtcttctctacgctttctttcatttggaccttcataaactgtatacgagagtgaatcgcacacgcatcgcatgtagtagtgtgtataacaccaattctctaggtttaacagcggttgactgattgggtattggcttgtcccttcctgtgtctgtcaatctttcgttttagacaagtaggtaaacgaagatacaatatcaagctctggaaaatgttcacagactgcttcaattgtgtacgtacctctgagttctctattatttcgatattcgtcaacgccatgacaccgatcctgaacatctggttgttttctatacatatctattgtttctgggtgcgcgctgagtcgttcagcttccagtggcagccctgatcgacgaaaagatattttgcatgcatggtggtctctctcctggcctgcaaaacatggaacagatcaggcggatgatgagaccaacagatgtaccggatacgggtttgttctgtccttgtatcatcaggcatccttacccgttctttctttccttataaaatctatgatgctctcttttatttctttcgatatgtcatatgtaaattcaggactattgtgtgatttactatggtccgaccccgataaggagatcaccgggtggggggaaaatgaccgaggagtgtcgttcacatttggcccagacgttgtggctcggtttttgcatagacatgatttggtaagcttatccctcttcccatacttctttcaggatctggtgacttaaacagcgattttgatgacggttgacgtgattttactttctttcttgcgggcggtgatgatgacttcttaggacctgatttgtagagctcatcaggtggtggaggcgagtcaacctgattatcgttatatatatattttcaatctggtcagcaacatactaattcaagctatttcttgtcatgacctataggatggatacgaattttttgcgaagcggtttcttgttactctgttctctgcgcccaactagtttgtcctctgcctcctgattttcatgattagttcacttacaaaagtttgctgatggtatcacacatttttcttcggaacaatattgccttcccaatcggtgtatcatctctgtatagctgtggcgagtttgataatgcaggcgcaatgatgtccgtggacgagactttactttgttcctttcaaatcctgaaaccagctgagaaaaaaacaaaaggtccgtatccttctgatcgatccttttcattttgaatgttactctctggagccttacgttctctcaatttcatggatgtatgatcaggtattgcgtccaaaccggtgacgcctccacgatcgaagaagaatctgtccgtcagataattcctcttgcatgaggcttgaactttgcttgctcaatttccaactcgtcggtcgactgcctccagtgtcgtgttctctcctcccctcctctcctccctcaccctcatactctcgagacggagtgttacatataatcaattctagtctctcattatcagccgaaatcgactataccagtttatcacctttattcaaacatggactcttctcgctatctactcctaaaattgctccataaaacatttcttcaaccgcatgtcttgtctgaccttgtggctttctcagatcgttcggttaagttctgctactgatgggtgattggattacgtttcttttcttttcatttctttccttttcttttcatttctttgctttctcctttcttttctcgtttatttcttccttcggtgattgctcgatgatcgcaatgaacgctttcagatcttgtctggtcgtccaagattcctctgtcaactaatttatgacgaaaaagtcaaagagcacggacactgaacaactaaaacatatatgtgtatatagggacccaattaaaattccttctggttaaccaatatatctctcacgtatcatttaaaagggatttcttcgtcctttttgagtctctacgtctatccttgataccaagagaatagagggactgaaatatgaattgtaaaggaaaagaaagagaatgtgatggatcaagtcgttgtgagagagggtgttggaatagaggaatccgtggagattggatgagacccgagtcgagattttcggtatgcccaatatctaaccgcatcacaaaacccgcctcaagaagaaatatgagatactgaacaaattatccagataaggagatagaaggaacagatcatagatactaaccgactccgaacaggatcttcgagactcaatctatccagtaattggcctgcctcttcccattcctcgttctccactgctacatcgaccaaccattcagtcgcgagtggacaggggtatcctttaagggcgcatgcttcgatcacggactgtgctaagccagactcagatgtgaatgaaagtccgaacttggagtgtactcttcaattgtgatttattatatatatttaaagggaactgcaagtcagtctttttcttcttacgcttatatgagatctggcggaaagaaaaagaacgaagaggatttaccctcggagataggcccaggaggaagtgttgttgggaaccttgcggatctgatccgtagtataactgaataagtacgttattgcccgaaggaaaggaatggtgaaggcaaggatgagtataagatgcaacatcttgtctcttaggttagaaggacataatgagagaattgaagattgacgaactcgatctctcgcgccaaaccatcctttcctttggctccctctcgtccgaagaccagaaaccatctatgagtccatgcgctattatttctcacatcaccagcacctctcttattttcctcgatccattcatcgtcttcctcttcgtccgaaccatgattctccattatgacctcgctctcctcactctctcttcctgactgaacaaccaataagctctcacaccacgcgagttcatttgtccagtcttcttcggtcaaaatcggtccgaaatgggtaaggacgtattgtctgtaggcccatgtgtggtaattctttgcatcgggttctagggatgtagcgataaagtcgagctctcgatggatcgtcgaaggggagatcggagaaggtagatgggtcaaaagaaggagccgatgatgcctgtaagttgaagagatgtcaaggtatctcgggtgagctgtcaccgagaacgatcttcagcaatgtaaaattggagagaaacgaaccagacttggtaagacttcatgttatcctcggccagctcggtcatcagtcgtaactcgtcttctagcgagcgctgaagcttcatcaaggttgagaatcggtactgcctacgggcatcaagatacatcaaagttatgtttgaacagaataggaaaaggtgtttctgttttgtaagctggcatctgatacgaacgaatgaaagatgaaacaagaaaatgatccaatacggaaacccgtaccagacagtatagtgagcagggttcatcctgatgactctcaatgtcacctccaacgctctgtccgagtattcttctaaagcagacagcgctctaaagtatcccattgcatcttgatctatgtgtgtataacggatgagttccaaatgttctcaacatcaaaatgacaaaaggatgaggcatcggacaagggcgaagagaagagacgtacattcaagagagtacatgatcggcactaaagaattctctggctcgatctgaggaatcgggttcaaatccgcccatctgggatcttgggagaacatactggatgccatcgatgtgtgtttgcacgactgtgatacgagatatctggaatgacaaagagcgaatgcgagagcaagagcagcagaagatccaaaaagaaagcagatctcgaagtttgtcttttgccttggtggttatctggttacggtgacgattgtaggttattagcgtgactaaccaatagtgaatgtaactatccctccattcgcatagaacgctcactcaacatctcgtacttacattctagaaggatgattgatcttgtttgacggtactcactcatccagatcgacactcccagcttggttgaactcaatattgtagaagcaagaagagataacaactctccctttggtcggttgcttcttttctctttcttcagtcctggcgcgctcctttccgcctcttcagcagctatgttggcccttccctcccttcctctatttcttcttctcttgtcttctgtgctcggtatagcgcacgctaccgtgtctcctagatggggccactcagttgctcttctgtcctcctcatcgacgcttatcatctcttcgggtaggacaacatctgttgatggtcaaacatatacttcatccccgctggttaccacctacctgtccatcccactttcctcttcatttgacttgacatcctcggcagaactctcagcttctaccacgcctgctttgacagagaaccaagcgccaggagaagcttggggaagcgctgaagccctcgataacggaaatgttctaatcttcggaggacagctatcgagtgacgctagtgtcgtagcaggtcaagattctgcttggatcatgaccacctcgaacggagggccgtttgtccaacagacaagtggctggggaggggaacccactcgaaggatgggaggcgcgtcatgtagtgagcaaacttttcggtttctgtgcatggatgattcatatgatatgctgatatatcatcaacgtgattagcgctcggaaccgacacttacttcactgcaggtgtccaaccggacggctcgaacaacccaacattgactacctacgtcttttcttcagaatcatcaacttttaccattctctccggagcatctattccaactgcgctcatctcgccttcgctacattgcctctcaaacggaactcttcttctatttggaggttactccccttcgctctcttcgctacctccattgtccacagcatacaccttggatacctcagatacgaacccagcctggaaaacgattaccctaggtaaagctcagaatactgttccgacaggtaggagaggtcatttgggcgtcacattcggcagcagaaacgcgatatttgtccatggaggtggaaccggatcgaatgggttggaacaagtggtcgatgatgcttggattttggacgtcaacgaaggaacgtggaccgaaatccagccgacgggaacagcaccagggaaaaggatggaccacgaaggcgtgccgatcggaaattctcagatcttgttctttggaggtaggtcgatctgattttttctctctctctctcgcgcgcgctctcgaacgtctactgcttttctagaactcccatcatcaactcaggcatgctgacatttcttgatgaattaccacatattctcaggctacttgacaacttctgcagcggatgcaaggctttacgtttacgatctagtcacaaacagctacctctcaactttcacccctccttctacatgggcctctacctctgtcacttcttcttctaccgacctggtcgctgcgacctcttcaggcagctcgacaccttcatctatctctgctgcagtgatcttatcgaatgctgtcgcgaccgctaccctcacttcagtttacaccttacctaccacctttgttgtcaacacccttgtcactagaacctcaactctcacctcggcagggacaacctacatagaatttgagaccacatcatccatagcaactgccacgtctgttcaaacagaaacacaaaccctatatgccctttcattgaccaacggccaagcatctactttaacagtcgacaaagccatttccacagttcagactgcagctacccaaaccgactcgataaatcctgctacctacactggtgctgtagctggtatcgggacgatgtctgacgtctctacaacaggccaagcaacctctaccgattctgcctcatccgcgacaaataccactacaaacgggccgaatcgctcaggctctcttagttctaaagcaaagacagctatcggcgtaggtgtcgcgttgacattgttatcgattgctgccggatcaggcgcctacttcatcttggttcgtcgtcgaaaacgatccaacatcgatgacgatgatgatgacgacgaccttggaaacggaccggacaagcgacgcggaagataccataaccttgaaagccacgagaagccgggatggctcagaggagcgctcacattcggcggtttttcgggaaaaaaggaatctgagctcgacggtgcggttcgagagaaaggttttgggttttggacatcgcatcagaatgggcatggaggaaaaggacatgttggatcgttgatagctggttccgagaaaggaagagccttgccagtaatatggaatcggcatccaaatgaccgacgggagagtatgctttatgacgaagactctagtcgatttggatcatggccaccgtacttccaacgaacggaagaagtagcagacgatgtattgaccgtcggtagccgcgctgctcaacggggggatggagaaaatccgtttgaagttgagcggatcgatgcagaggaggttgaggcgcacggcgactatggatcgattggtcggcatgtttcaaaccaaaacctaggtcccgctttagcaggcctcagtagacagaaggaagaaatggatataggaggggggcgatcaccgtttggagatgataacgagagagagaatagagacatgtccgaggatggagaaggaaaaggactactcctttcgtctgcctctcaaaatcctagagaaatacatccaagcacgcgtactggaggtcgttctatggacaatccttttccgataattgacccggaccctctctctccttcgtctacatcatatatatacggaagctatcaaccgtatatgtatgaggacccattcgatctctctgcttctctcattccaacctcttcctcccctgatgtaatgacggatagagaaattccacgatctcagagaatgaaatttggccatggaaaggaagctctttatggagcggtcgataccgctgaacatttatcggtcgccgatgacctttcctccaatgcgacaacttctcagtcgctccatccgtatacaggttatatccatcacaaccctacagccgcgtatgatcgaatgatcaaaccttcccggtcgacctctacaacgggttggcgaagagctctcggcctacgtcaaaaatcaccctcgtcggttgaagagagtctcaacagactttccccttcgttcacaggtataaacgctggagggcttggtagattccaggagattattagagatccggcaacaccacctgtactgcctgatctcagcgatgaccatcgcaaagaaagatcgttggcggaatcgggtgttgggagagtagggaaacgacagcaggagttaagcttgaagagtatgcaaagtggtcgtaagtctgttctcattcattgcttgtgatttggtacggtaaaaatctgactgtgggtaacgatatatatcgtatggttcgaatcgcccacaggaacggccacttcggagcaaatggagcaatacgcgcatatgaacatcgttcagcgcaatcgagctacatctggttcgacaactatgacctccagtaccacaccgatctcatccccgcaattcgaacctattgagttctcaccgataccgccaaatcgatcgccgtcctctgcatctacgccaacacaaaaaacttccgtagatccattcgcggataaatctgactcgtctgatatcgatactcctcctatacataaaacacaacgaccaagcattgtatcgacaacatcttcttgcgcgcgtcctgcagggggccgacctaaaccatcaggtagtcctttcaagtctttacccgtccggccagccccatctgcatcgaaagaacaaaggcacttcccaggtgcttctgctccgactactgcttccgctcctgttgtccctcaaacgagaagatccgttcgtgagacggtggctgcgtttgaaacacgaaccaacggaccagtaggagggagatcgagacacaaggtcaactatgtgtctgtgcctagaccgaaattgacgatcgccaatccggacggaagtctcaaaagatagtggattgatatgctttatctctgatgttcgatttttagcttctccgcctctcccaaatggattcctctgtttaattttatctggttatctttatagaacttacttatta

SEQ ID NO: 152 - DNA, 78743 bp, Xanthophyllomyces dendrorhous
  misc_feature (55409)..(55418): n is a, c, g, or t
  misc_feature (76672)..(76681): n is a, c, g, or t
attattttctttatcatatcatatcatatcatatcatatcgtatcacgaaaagaaacggacattttcctatctgactttaacgtttcacgccattctcaatatttctaaactttctgggcatgtttatcccatgctcatcatctttcaatctttcgattttctaagaacttctttcgtctttgttccttcatcttttatcttattctcctgaatcactctgcagttcttgtcttatctttgttgtacgttcatcgagaaaccctctccaaaagctgatccgcaaatctacacatgttcaacgatcttgatgagcatcacaccatagccattctgttgtttagcactgtgttccctccaaacttagttttgcgtgctgaaaggatttgtggaggcagagcagtattatatcaattaatgagtgaacagtgaacgagaaaagggggtcacagaagaacgaaactgtgagatgcatgagtttcgagggagagaaggatgtgatttctacaggaatgcggttgatgataaagaaacagaaagagaagtttagatgaaacaagaaaaaaggagaaagaaataagacactgaacaagagaaaagaaacagaagacatgagaggtaaagaaaagtcgttataggtgtgaaaaagagaaggttttgtgataacgagagagaaaagggaagctcagaaagacgactcttgatcaagagaacaaacacaagaatctagatcgaactcgggtagataagaaacatcgtttgaaacagaaggaaagaaagatcccgaaattaagcggtcccttccttgcgacgactcgaggtctgcactgagtggagaagatcttggacggatcgataggcttttcgctgggccgttgatgtagaagaggtggagggaagaggtctatcggcaaatgtcaagagcgagtacagtgaagcgatttgatcgccctttcgtttcggaaagcaaaccaggaagaaaaggggaaaggaccatataagtaagggttcacggaaggagaggagaggatgtctgaaggaattcgaaagggagtggctaaccttttgttccaagttgtcgataacttctttcaggtgttcagccaagatgtttctcttggcaacattagaagccggatccatctgtttgtattggtcggcaagttcagtgtagatcctgaaattgaagcaaagaaaacgaaatgatataaacaaattaagtacaaagagcataggttgacgacgggaaaaggaaggaaaagaaaagaagaatgaacgtacaccttgtagtgctcgtattctacctcaagctctctcaaaacacgacagagcactgtctgaggaggcaatctaacctcttgtccgtcagctctcttttgttgcgatgaagagctggtggttggttccctggatcgaatcttaggagacaaagctcccttctcgaccgggacttcttcctggtcttcatcgatgacgagttcttcttgttcaaacgagcttgcccatgcggtttccagaacgatcggttcaagtacctttttctgcgccttctctctctcttctgccatcgctcgacgtctcgattgtcttcgaggggacgaagcgatcgaggatgaatctagatctggagaacgagggagggggatagccgcaggatacacggcatcgagctgttgggaggcgaatctggggctggaggagagcagtggaggtgatcgggtaggagaagagacggctgcgactcggaggccttcggatagacgggagcccggtctttcagaataagtggcggtggagagaggagcgggcgaggctcgcttattggtttgatgggaggagatggtagttcggagccgggcgagttcgtcggcctgatagaggatggaaagaaaaggaagaaagaatgtatttgatgagtttccctctgttaatgagagaaaagaaggaagaagcacttactccgactttgtttcttccaactcgaggagaaataggccttattgtcctgtcctgatcctgatcaatcacagtttccctctgctgttcctgctgctgctggaactgtcgttggagttgatcttggtaccgttccctctcctgagcctgggtctgttccctctcctgctcccaagcccttcgatcgccgacggtgtcctcgactactctccttagggaaccaacttctgtggcgagtgttctgacctcctctctgagtgagtcgatctcgtttcctctcctctgcagttcggcttggtcaagcgcgcgctgttctcggagttgctcgatcaacgccgtctgttcctgcaacgactttgttaacctggaaacttctgatcgaagttcggcgaccaagctttcgagagctttcttttcctgaacgacctcccagtatctggtctcccaagcgctggtggtttcttcgacctctcggcgacctcgttcgagtccggtttgttctctgctggagagttctcgtcggagatattctcgctcgagagcccattcttgcttggcagcggtctctctttcgcgagtagtctggagttcgagttcgagttcagatacccgctgaagggtttctttgttttctgatgtcaggctcgagagcttttgggagagtgttgcgagggattctataggataagctgatggaaaaggataagagagacacaacaggtaaataacagaagaagaagacaagcatccagaaaagacgtctccaaaagaacgcctcgggggaaacaaagagatgaacagcgtaaagagaccaaagactcaccatgtgaatcttcacgatgatcaccttccttgacggtcttctttcctcgcctagctggcgactcgaccagtccgtccgtcaatccggtgacatccggtaagaacaacacactcttgccgtccccaagcccagcggcaaagcttgattggcctcggctggtggacttcttttttgtcaacccaggcttattagcgttccgtctggcgacagattgtccattggagtttccacgcttgagcgaggaaatcgagttgaattctctcgactcattgaatgagagctccgacatgggttgtctatcgatcggaccagattgacgacgaggaaggttggactcgatccctcgagcgagcatttcgaatttgctctcctgcaaaggaggctgaatcttggttggaaacagagatcctgtacgtgcggcagcggcggtgttagcagagtaccggttgccgttggatcgagaagatggtcttcgaggcgagaaatcttgggcaatcgcgtcgacaagtttgggccgaccgatcgggtttgcgttcgagttagccatggagagtgggagtccgctggttccgattaaaggactctcaccggctgaatcacccaatccgaaggagagccctttgtcgtctttgatgattggagcgagctctcgatcactgtcgaatccagactgctggttatggtgatgatgacctccgcctcttccattatgttgtccaccggtgagaccggttcggagggtgatagcactagcatgatggccggcagtagagaccggactgggaaacccggtcacggttgagaatgactcgggttgggcaaaagaggcgagtccgtggccgtggtgcaggtgatcgatggctgacaagttgccgttctcatgggccgctcgaccgacttcgatagaacttccgtcttcgtcctcgtcttcgtacgcgtcgtcgtcctcatcgcgttcggtagcgaacgacgtgcctgttctggtactagtcgcgacggaagaggaagcacgggaggaagacatcaacgatattccgcctagctgttcttcgagtctgatcctatctaaatcatcatgtgaatgaggtattaacagggatgaagctgaagaagacgcgtgccgatgagcggccgccgacggaggcggaaacgagtttgagagggaaggggactgtcggagggagaacgggccggctgtcaagccgttacgagaagaaggggttggatagttgagtaatgagtaggatctactgtttccagagacagagaacgggtggtcaccttggttgctcttccgacgcatcgacctgggcgaaggtgagggggatggctggtgggtagtcgaggaagacgaagacgacgagaacgaatggtctgatatcatcacagaacggagagagaaagagaaagagaaagagaaagagagagaggggggagaaggagaagaggtatcgcgagggtagcacgcgtgagagtgtatgtatgatacgaacgagtgggtctggatggatgtgggagggtgaatgtgagaggatggtatgcaactgaggatggaaagtaaggatgtatgggtgaatgaatgagtgagaggacgcgaagaagaaaaaggcgggtagaaaaaaagaacaacaaaggaaaagaaaaagaaaagagaagaacagaaaggacgcgactgattttctacatacatctactttgatacgtgtttctgttcgttcctcaaacactctcactcttcgttctttgcttgcgttgttctctcagtgttgaagcacgatatcacacgtatacctagtcatccgttcactagctaagagtcttttataggtaacaccgactgagcgatcgctttcgagcaaccctagtcttctcagtatggatactctctctactcggatatcgtctctccaactggagcagcaccagcaccagcaacaacaagcgtaccatcataaccaacagcaacaggaaaacatccatcctgataaacgaatccatacaaagtactctacgtcctcttctttcaacccatcctccaccagctcgttctatccgtctcaaagtcagcctccgtcccagtcgcaatcgcagtcttacggtcaaccgatatctggccagaatcaaggacaagttcaacaaacggcgagggtaccacttatgaaactggcgatgggagctcctggatcggcataccgaatgaacccatccaatccaggctcacccaaccgggcccaagtcgaatcaggtcagagtagacggcctgaatctgtgtctggttcgaatgccgggggtgccggaagtgggatgaccagctctgggtcaagagtggaccctcagtttggtccaaagggctctgtaaagcccggagctgtcagaggagcgccaacaggaacggcatcggcgtcggtaccggcaacgacgatggggtactcgaacggatcggtagcctctagtgttggcacggtcgctggaaagatcgatatcggtcgatacgacggtgggttcgaggccgacgagcgagaacgaggccagcgagagatagaactcggccatccggttggttctacagagagtccagatggagcatctctggcgcctacgactcgatcgtaccatgcgtggtcgcttcctcaattcgagatcggccgtccattgggaaaaggaaagttcggaagggtctacctggcgaggacaaaagcaccgcctcagtttatcgtcgctcttaagtgtatgtacaaagcagagttggtctctagcaagacggagaaacaggtccgacgggagatcgagatccagagtaacctgaggtatgattgagttttcaggagtatacattcgcgagtctttttgttggcttgctaaaataaatcacattggggcttgttttcttctcttttcttcttgtgtatgtgtaaacgcacccacccgttaacggactctgaaaagacatccaaacatcctaaggctgtacggatactttcacgacgaaaaacgaatcttcctcatgattgagttcgccggtaaaggcgagctctacaagcagctccacaaggccggtcatttctccgagaagcgctctgcccgcgtgagtgaaatttctcgtttcgagagacatagaaaaggacaagagaagaatatgaagaaaggagagcaggacggaaaggaaggaactgaaggaaatttggaagagcgcttccaagaaagaaatacaagcaggaactgaaacggctcttttcatttggcaactctagtacatcgctcagatggcagatgctctaggataccttcataggaagcatgtgatccatcgggatatcaaaccagaaaatctccttctcggtgtcaacggagagctcaagattggagactttggatggagcgttcatgcgcctggaaatcggtgagtttcgaggaaggctgattggatggatgggcaggtggatttgagtaagggagaaccctgtttcgagctgagggctaaaacacgtcatccttgttcacctgctcgcttgatacatctcttagacggacgacgctgtgcggaactctggactacttaccaccagagatggtggagggaaagtctcataatgagaaggtagactactgggcgttgggcgtgttggcgtacgagtttctctgtggagtccctccattcgaggaggttagtggtcacaaggagacttatcgaaggatcgccaatgtcgatttcacgttacccaacggtatgtcagtcgaggccggggatctgatcacttctgtaggttttctttcatgttgttattgtgttcgaacagagcgactgatggacaaggtgactgatccgagatgtttggatgaccgttctagctgttgaaaaaagatccggaacagagactcgcgttagatctggtggcaatccacccgtgggtgttgaagcatcgaaaaaagccggcgacgtcttctcaaggtgttcccaactgagtgtgtgtcagcagccgtatgccttgttctttctctccatgcgctgtgctctgtgttctccgtcttctttattccctgagaaccggccacatctgcggtcaacctggtattctgcaagctctttctatatgtttatttatctgcgtgcttgtctgccagatttcttctgtcctcttcttgtttcattctcctctcttgtcacttaacaacagatcttccctcctcttgacgaatatatatgctcagaccttcatatatgccgaccaggccgaatgtattccgaaaagatgcgagttcggcaaccttaattgggatctcgtctgaatttgtttgtctgtgtgataatctccaaaataaaccagagaggtgtattgctagagaacagatcgagggaaagcgaaagagatttctatctacagcacggacgagcaagtccgtctgggtattatcacatgttactcgtcgggatatatctggccacaatatctggctttcaattggttgtatcggttgtgattcaaccatggccaggacggggatgagaaagggagaataggaaatagaaaaaaaatggggaaataaaaaataaaattgattatgataaaaacaaggagacgcttgcgccgaggacaaggagaaacgtactaaacagatcgtattccagccgttggacatccggggacgacggggaacccaacttcacgcacgttctatttttaaaactcgattctagttccgtaggtgcctgatggtgcctaagtaatgaggctgatctgactgtttgtgcctgcccagacttctgtgcctgtttgcggttacgtgcttgtgaggccaatggcccactcgacttggcaccagcggccctggtcgacgtcatttcaagcaaaggcctacccctccgtcgcaggccgaagctaaagcttaagaccccaggtttttaatcagattgacgtgcctgtcggaattttatctgatctctcgtctgtttactttctctctatccgatcagcttcgtcttgtctgattggatcgtttcttaaaccgactcacaaacagtccacgaaaagagtatggtctctttggcagcctgagtctgtggccttctttcgcaatgttcacacagtgttctcctctctttgctctccttgttctccttcgaagttctctcttgcctctcttgcctctcctgcctctcctgcctttctcgctctctgcgtccttcggcgttccctttcgttctctgtttatcagctccctcttttttcattctcttttttagcctccacactttgcttcctttatcctctgtcatttggagatcgccctagacgtcagatcgccacggttgcactttttttttttacttctctccctctccctcgctcttatcatcgtttcaccccgcctctgctgtgtttgttctcattgaaaggagatgtgaagttctctctcctctgcctgaatccatcgttcccagaaatgttaaatagaaatgaaaatgcagaaatcctcgcttgttctttttactctctctctcctcatttccactcttcctgttcgctacccaatattcgtcctatcgccagtgttctaaagaagaaagtcttgcaggctaccactcagctttttcctctttctttgttttcctcctcccatcatgactttaagtaaagctcagcgaaagtaagtacacccatccttatcagtgtaggtgtgggtgctgaagtgattgtggcagtggcagtggcagtggcagtggcagtggcagtgacagtgatagtggcagtgatagtgagacgctgatcgcattatagttgtcgcactaacccacccttcgttgtctttcttcactctttccctcgccatccgcaggtggggccaaaggaactttccaatcttttgttggtacgccatcaccggtgttgtcggcttgttcttcatcagacatgtcaccctcaccttcgctcggtacatccgacggaaacgatcgatccggctcatgagtcagcagagcgcatcaactgaacatggctcccatcccgggtctccctcgatcgcaggcagggcgtacaataccacactcgccgtaggtaaaaaatctttcggctggcggacattcgctgttggactttggtacgacgtgcctctgctcgaattattctggagtgtcatgtacaccatgaccgtcctcattataggctggatttacagtcagtccctcgagcttgagcttgatcccttctggtgtttaaattagctcttcacttccagacctaatctcgtggtctctttccttcttggctcactatgctctcagtcgatccggcggatcctacggcgacacaggcagtcaatatcgggaacttgtgtggcttgttggcgttcatacaggtgaatggttttgtttgatgctttcagcccgcctacttgtacaagttctcggcttaatgataaaaccttgtctgtcgtatgaccaacgtttctcgacgtcataaccctcctcaaagttcccgctcgtggtcggtctcgcctccaagaacaacgttctgtcttggttcaccggaatatcttatgagcgagtatgtctctgtctctctctttggcgtcatctcttgtctatttttcgtttttaggttttagtcttgtttagaccgttcggttttctcatcactatctctgtcttaattcttcgatcaacgctgccgcaatactcatgcccgttatctaatctctccttcaacctcgccgcagcttaactttcttcacagagcatccggtcgagccctcctcatcttatcgtggactcatgtggtgagcagaggaatgatcattgggttcgtcgttctttagcctttccctttgagcatctccgttgctcgaatgtctctccctctctgtcttgttgaaccttttctaatgatggggcgcaaactctttcctctgcgaacttaactatagcttgtccggaaagacttcgctcaagctggtaaagatgagaatgggtgtcgtcgccttccgttcgtctcttctttttcttaaaatagatgaacgagtaattaaatcaaacctattcatcacccttgtaatgcaaacatgactgatgtttcttccttcttacgggggatcagtcgcatacaatttgcttttcctcctctctttgaagcctttcctccgatcgatggcctatgaggtcttcctcatcagtcatatggttctcgctttgctcctcctcgtaggttgctacatgcattggactgaatttggatcggtacgtttttcttgttcgctttgttacaaacgcgttctaatccacaatctggctggctgacacgtcccgcgcttttatttcttccctcccattctagtacatctggccggcgatactcatctggggtctcgacagatttgtcagggttgccaacatcattttcctcaacaagctctggctgtcgttccgacctagctcggccaacgtagcttctaccgctgtcgtgaagtatgtccccgcttgctctgttctcccatctctctctctctcttcatttcctcctctgcgcgcgtcgtgggactgacatcatgttcacttcccttggcacaggattctccctgatgccgcacttgaggtcacaatggagcgatccatgcgatgggttcctggacagcacgtatacctgacctgtccacaaatttcccgattccgttcgtcctttcgttttcttttaccttttgctctctgttcttacccagatgtaagtctgaaaattgactttgtatcgcatacgtctctcccacagcgttcgaggcacacccattcacggtggcttctatccagtcgaacgactcgtctggcccatcgacagtccggttgatcatcagagtccgagatggcttcactggcagactcgccaacgctacccaaaaagccggcggacagaccgaggtcaaagcttggttggacggccctcacggattagtcaaagggcttactagctaccactcggtcgtcttgatctctggtggttcgggtgtcacttacaccttgcctcaattgcttagcttggtcgaacaggccaagcagggtaagtcggccgttagacatctaacgtttgtctggatcgttcgaaatcttggtgggtcatcttctccttctccttctccttctcctctcgcgcgctctcatcgtggtcagagactgatttgttcttcggcctgtcccgctcaatttgttttttccccttctctttgcttcttattattctccttagaatctgtttcgtggatcggttcgactctggcctcaatccaagcatcatgccccgcgtctttgatactcgaaatcaagatctttatcactcagaccaactctgtccacccgtccggaaccggcagccctgtgtcttcgtcccagacgcttcctgccatccacccccacgcgatccctgtcggtctgtctgagcagagcaatgagaagcccctgaagttggactctgcagagagctccgagtctggtagttcagacggacacgagaatgagaaacgttcgaccgaatactcaatcgaggacagcatcggacggtgcgtctcgatgggtcgaccggacctagacatcatcttgagggatgtggtggatggtgccaggagtggtgccgtcaatgtttctggtttgtccttcgctttcctttctgtcttttgtggcctttgcgctgtgtgctgacctggtaaaccaatcaaactctcaaaccgaattttaaaaacaaaaacaaaaacagtctgcggaccgaccagtttatcgaacgcggtcagggaatctctcgcgtcaggaaacgcctacaggctggccgatgtcgccaagggaaaggtcggcgctgtcgatctccatgtcgagagctttggctggtagatagacagctggcttgcttgctagctatcaagtcatgatagccggttgatatttagtgtctatctacccttcttctctccctttgctcctttcgcatcttctatctttttttttatcaagatttcaagccctctcttccttcgtcttcgtatatgtacaaacgcgtataaagatttctcgattagattagccagattcttctctttccctatttcttctacatatctttgcccacgtccacatagtcattctcctcccttcatgaatcacataactccaatctgtccaactccctcgtccctcgtcttcttacgaattggtttcctcgtctcttttttttcggataaattaatgattgtctctgagtgcttggttaaattcgcagcgatgaatgaacacaatacatcaggacggcccagagccaatagatcatagatcataacgaattatgaggtttctaaaggaaaaaagatgcatacggagaatttttaacaccggcgtataatgccgtgaggcatgaaaatccctcgatgagaagaggtatttgagaaacaaaaggaaacgagaaaagagagagagaatatatatatatatacatcaagaccaaacaagacgatgaaaaagagactatcaattcacttcgttccgtgaggcttgtcctactcatcatgttactcgtcccgcactcgcttgtgcacaggacactcgaatgccaacctacttggtttgaaacggctccgctctctcaaatacccattctgctcgtccaacccaacgatcagagatctctccgaatccactgaaaacaaaattaagccctgaaagagaggagagaaaagattatagaaagaggccgaatctcgtttagctggtactcattggtgattttcgaagacaagctgtttttggaaaatttgtatccttttcgattgaactagtttcggtttcagagataagtattgagttcgttaatgactgatagaacgagacagataaaagaagggtaaactcaccggtcgatcacagggtacgtctcaccaatcttctttccagactcctgtctaggagaaacggcggcttgatctgaatccccctcggtcgctgtcgtcacttccaatcgattggacccgtccgttgacgtcatcagtcctggggactgtccgccattctcccaatcaactagacctcccaatcgatttgctctgataccctccacaccgagctctccgagtccgttctgcatgagctcgagctcggcgtctcgaatcctatcccagacctgatatcaagatcaagggagattgtacatatacacagagcaaaggtcagatcaggttacagtcgacgatcagagataggaacaagttcgtagcgatgatcacccacctcatcacacatgcatccgacacatgtttgaacgtcccatttgattcgcttgttaaccgggaaatcagccgagtatgaaggcaaggccagatagggcagcatgcaacaacacgaggctagcgagatctcctgtttgtagagggtggcgattctaacgaccgggtcagatgaatcgtttaagacgacttcaaatgtgagtgtagatgaaaaccggaggccagtgtctgtcgccggcagcgtggtcgatcgaatgtgatcgtccgtgggctagccagaagtaaaagcataaggaaaagattgagggcaatgtgttttcttttagttcaagtactgataaaaggagagtgcgtgagaaatactcaccagacgtcccatccttttccactcccaaaagctacccttgtctttctcggcatcaatcaagacattgccttcatctctggccttggcaacaaatcctttgagaccatagccggacttcgcgccttcctgaaagatatatcgtttggggccgatgatctcttggacctggcttggattctttctggaggtgaccgtggtggtctgttgaatgtagcaattgatcgcatacacactcacttgattcgaaccgaacgtcagtgagagtgtaagaggaccgcctatgataaattgctgtcaagaaagggaacgagagaagagattcaggtagcaggtcagacaagaaacgttcaagagggaagtgtgcgcgtgaaacatcaatgaggggtgcacatacactggctgtgaggccaatcttgtaagggccaagagtgggggagatatcctcttggtggtgctggaactgatagactgtaacgggaaaaggcgagcgacaagcaaggatttagagtgtgaagggccgaaatgcttgtagagagaaacgcactgtttccgtccgcctgagagggactagagacgatgatgacctctcgactgtcggacagatctttggtgaacatgccgccagagcctacgaccgttccctcgacgctgctcgttcaaaatagtggaccgagacgttaggcacgaaatacaagaggatgatcagagagacaaacgaattgattcgtacaagtactgaattcgaccatgggccgatcgctctgtgactggactagtgctcgggatatgaaagttgtactcgatcctgtgtgcgcgcgcaagaggatgtggacatgtgtgtgagtacaacacaaaagatagagacgagagagcaaaagaaagaatacctcaggtctactcacgtgttgacacccttctcgagccatataccctgtccgtcgccgtctagaaggagaactcggtcaaagattttttcgtcttcccaacctgacttttcgatccggagacgctgcattccaacgagctcaactttgattgccttgacgagctttcgttgaggggcgacgatgttgagaaagccattgaccttaccgtcccttccaggcaccgagtcgtctgaattaacctgggcaagggcgttggcccagcctctgccgggcggtcgaataaagacaagtgtttcggcaaggcagagcgatgcctttggttttgtcaggttcatgctcaaagcggacgagattagatgaggcaagtgtctagagtcttgtccgcatgggttcctgagaggatctccaaggggaaatatcggtgcgatagcgtccggaagagactgattcgaagtggatcctaacgaagtttccaagatagacgacacaggggatgatgagagagaaggtgatgatgggagcacttgagagcttgtgctgggagagtagctgggcggatcatccctgggagtcaaggaggatgaagcggtgagtgtcctggagttgttcatgacgagttttcaggaattgaacaaggaaacaaggacaggaacaggaacggttgctagatcaagccaacgggagaagggcgcagaagaaggagattgactttctgagatcttctgacgggtctttataagggaaaccaatggaagagaaaaggcgaggaagaaagaatcgaacagagaaaagagacgaaaacaagacagacagaggtgacaacgacgaaagattatgcacgatttgattgatggaactcggaagaacaggatggaaagaaagatggccgaggcaagagtgaggggatgagtcagtaatcaggacgggcgcatgtgtgggcgagcatggttcggtcagtgttcaattaacctgcggggaatgctcatgcgtcccgttccttggcaacacggcttgctatggattgagcacatctgttcatatatgtgtacgggtgtgtttgtacgtagggtgtccttctatctatttgtccttctacccttctgtctacccttctatccttctacccttttaaccatctgcccatattcatgaatatgtctgctcgcacccgtttcgcgctcatatgattggcttgcatctccatgatctcaccaatatacgttcataattaatcgtgtgagtgtatgtgtcctctctacgtgcttggctcggaacgggcgatttcggagaagtccgatgatagtgaggagaaatccccggcgagtagaaccgagagccaggtgccagtcggtcggcgatgtgagccgacggtgaatttttaccttcttgactcgacgaactatgtttttctttgttatcttctggtagagccttctagtttctctttgtagtactcttactgttactatgattttcttgttccttggtcgtcaatctattcacaatattcatgatgttcatagtatctagattacacccctttctaattcttccgttcttatttctcctttcttatttcttgtttcttcttctacctcgtagttttcagctcatatcttcgtcgttaacgctattcacttttctttgactatcttacttctcatctgtgcgcttctcggccgagatgacagaaagctgtcctacttggtcggatcgggcacaccgcatgttatacttcatgtaatcgaattagtacgccataggaaactctgggtttaccccggctgtaccccaacaaagccccgaacgtgtttgccccaaatgtaccccctgtcaataccccataaacccccagatggaccttctaaccctaactggaaccactgtgtatgatccctggccagaactgagatctctcaacaagcaacccggtcgtttggtgatctcgtattacaaccactccgagacccacaaccatacatcagttggctccatagtcctatggtcgccccgttcgacctgtcgggctctgataagacgaccgtatcgtcttattcagacaccgaagacaacgacagggaggtcgaagagtcagtcaccacctattcttctttttctcttgtgttttcctttagactgatacatccctcgatgccctatttaccctatctctctatctgtttatctctcttcctctacctatagtttctcgtccgcagaggtcgaggccgcacacttcagatcacgctacctcgagatctaccggacacttcaagatacaaaggccgagctcggtacgtccattctgtgtttctcctcagcgaacctgtcaaacgacgatgcgacaattgaccctctctgtctcctgtcttttgtgtcttgtgttgcgcttttcttctctcattctcatccatcgacattcaatcttcataagacgagttccagacatcatccaaagaactagaagaagaactcgagcgagaacttgcagcgaccgaggctgctcaggaagatctcaaaaaccggatcacccgactggaggccgaaaaggaagaatggaaggcaagtggatcctatgcattccaacccattctctctactacttcaatatcgggcgcggatatcagactcggccggcttactatgctcccatgcccacaactttgggaattttcatcgttgcgctggctcttttttctttctaggcaaaacatttgtctacacagaaggcacataaccttgcgctcggatctctccagcgagagctcgacgcgattgtatgttgattactctatccttctccttgagaccgagcttcccctccagaccagctgatttctctccttccttctcggcacgccttcctcatgaacatcagaaagcagaacgcgatcgttacaaggtctcgttacgggatctagagatgggcgtcgacgacctggagcgaaacgaacgcatggtctcatcttcccttcaggacatggagtcgaggtataaccgagcgatcgaggaaaagacgctgctcgagcaagagttaattgataagcaagagttagaggaagagactcagcgtctaaaggatgagatgagaggtgtgttttatatcctcttctttcacttccttctttatcttttcttttcctcttccttttgtttctctcgtcttttctcattttgtgaatacaatgactgacattgcgaatggtctcatcgaccaaatagatcttttgtctgaactttcggtactcaaacaacagcaacaatgtaccaaagcaccttctcttccacctgcctcgcctacgttatccgaagaaacctcggtcggctctcgacccacgtcgctcgtccgaaaatcttcccaagaactctccatggcagatttgatgatgtctcctccatcctcctcctcagcatcaacatccttcctggaacccgtgcttgcatctccgtcatcaccctcgttgagggctactcggacgagctcgggtctaccgaaaagccatacatcaccctcgatctcacatatcgtccgttccccgtccagactacccattccgggatcctcacccaatcgatcttcccgctcaggtattacctctagcacgacaagtagaaacctttcgttgggaagcaccatcacttccaggacggtggtgtcgtctcctctgaactcgaccctcaagccggtcggcagcaatcaaacgacgactcaaccggccatcgtctcaaaccgaccgacaaaagtcgactcgaaatcaagaggagttcggatggtatctgatcttggggaacgcgtccgaacgttacagagtaggattcagacacataatcttccacggatgaggaaggtgacacctggaaatgtttcctctcgcgccaacccaggaaaccccttgtcgccttcttccagaagacagggttcaattcctcctctgccaacattgccaacgtcgccgccgataaacagcctgcccagttcggcccatccgaggatgaaagcgttggcagataggtcagctccgccgagacttggtaacggccaatacagcactcccggaacaccaggctcaggcgattgggtacttgttagtgagaatgaagaatcacctacggctctcaaacttggagcacgggctccatcagtctctagaccgtctgctcgatcgtccgctcgtccagtttctcgacaagccctaccttcttctcctctgagagccggatcatccttagcgttccctccttcttcacctttatcgtcaacatcgtccccgcctgcattatcggcagcggcgacaaggatgaaccgattgtcgatgtcgagtcaactcggacatagacctgcttccaggttgtcgaccttggcgcctgctgggatctcagtcagagcaaccaccccgacgccctcgacacttgtcgaaccttcagattcagaacctaatcgcccgcactccagaggtccgagctctggttcagacatggagtcgcaaacaggtagagggctccctccgagattgtcagagtcaaattcatcgacaacatctctgaatgatctagcagatgaacccgatcaaccgtatccgttctctactttgaatactcagcctcagcctcgtcctcactcacgtacacaatcacattcaaattccatttcgcattctagatccagatccagatccacatctgcatccacatctacatcgtcccggccaacaatctctcaccctcgacctatccaaccggctggttctaccaacccgaccgaacaaacggtctctcaaccacaatcaaagattcccccaagatcgttccattcgagaggggatggcattctgaaacggtcgaccggtcggacgtccctgattgagcgttcaccaactaccttcaacttgcctagatcgtcaccgccatcgtcgccgccagcatcctccggtcttcggcctcaggcccaagggcaagggcatatttcccgtcttcggcaacctcgaacctcttttggcccctcctcttctaccaccacgaccaccctcaccaccatcggcgctagtggtacagccgggcgaagcaggccgaattcaatctcggctcttccaaagacaaaccttccgcctgtgcctgccattccgtcttatatgactgctagcttgacgcctggtcctaaagtcgggcatggagtgagaggaagacggtcggtcggatcggtctcgatgtcggtaccgggttcaggcagggtcatgtcgcctgttggtggtgttggaactggcgcgtttgctggtgagaccgttgttgggtcgaggtcggatgttaggccaaaatcagctctggcaggacggattaggagtctgacgggtggtgggacatgatgtctctttctcttctcctctagtctagtgtcttgttcctctgcatgttctccttgtacgcttctcttttgggacttctttcgtgtacatatatgtactctcattggttcatatacgcctccgtggtagcggtgtgcttgttataccctgttctcttataaccactacatatgatattccatattcaattccccttcctgcctggattttattaaaacgtagacggcccttgactcagtcaacgaacatgatcgatctaataaaatcagggagcacttcgtggtggttttctagagtagtcacacaaacaccaataagacattcggaaaccaggattatattattgtctgtgtgactactcaagaaaaccaccacgaagtgctccctgattttatcaggttatgagcccggataagcgcaaagacactccagaccacgatcagcctgtgtaaaaatgcccgctgggttacaggtgattaggtaatgtggctggagcccaaaagtagcaacactaagttgatgtgaagctcgagggggcgtgttggatgtgagcatccttcacgttcacatggggttgtatttcagtgggaagagcggctctacgtagttcagggggcgcagttttgaatcctgtcaactccaattcgctattttatcacgatcgacttgaaaactaggaaggtcaaaagtgaccgagccaggaaattttcaaattgaactggagaagttgagtgtcaaacccatttagtactcgcatagtccttgggaggttacttgaatcaatgattcaaaggagcaagcaagtgtggacaggtctacgttccctcctttatcaatggagggactccctcctcctcttgtttgaccaagaaaaagaaggaagcttagaggaggtgtctagtctccaataggacggtaatcttccactggctagttagaaccctgactgtaaggaggaatctctcccgtggagaaagaaaccgagaagtagggttctaggcaataagctggtggttgtaggaggtaagaggaaatagggagaaagagaagatacagaagaaaaaatgagaggattaacgagggtgaccacctggataaactcaagggagttgttcatgatgcccacacctggttcaagaccaatgcgatgagagaggtggaaaaggaagagatgagaggagttgatgatgttgagagaacagttaaaaacccaaaaaaaaagtcttcctaaatacgtcaacttttttgttcagggctcgtctcactgacgcgttcccccccagacgcgctacaggacttctttacacgcttacattcactcctctcatatatacacgctcgcactcacactcacactgtctccttctctttctcgagccagttcaacatgggacgaaggtgagtggcgtatgtgttaatggtctcatggttgttcataatcaccaagtctcacctctagtttgcattcctgaagtacaggactcactccggtaattccagtcttcgaaccaacaccagctcatcctcctcgtcttcctctgatggtccgtcaagaacccttcggtcaatcttgactgccaaattagctagaggagtcatcgagtctcttgtccatgtgatggtgtttgaatcatcatgctcgcctgcggatcagacgaggtcgtttgaggaaacaatgactcggatgattgaccggttcgattctaaggatgtcagagtccaaagatcactctctcgactcctcaaggtccgttctcttcctttgtgatgatctccaaacgatctgtcagaccgatgtcgaagctgatgctcatacgtgctttccttccaacggtagatattctggattgaacagaaacggatagatgctgcgcttcattcattctcgtctacagccgcttctggatcaacctccaccggtagaccacctcatgttccagttgttttccctcgaagtcgatcaaatattcctctacccatgtccaaccaagccagagccgcaggtgctggggatgctaacactacgacgaatcctttgatccctcctcatcggttcatccctcttgtcaaccgggggtcgacctctcgtccgttaggcgcggtctcctttctcgatagagctcgtccacgttcacgaccgactatccctacgaacggaccgacgttctccgatttcttttctgaaaacgacgaacatgacgatgacgacgatgatgagaacggggaggatgatgagtttggacttcgagaagagacggatccgattgatctgatttctgatccgacgggtgatcatcgaacacctgttgatacaggcttagattctcatcattggggatttgctcctgacgatgatggtgatgatgaggaccaagaagaggaagacatcgatcatgggtgggttcatacaggaaatgtcaatgaagacgagagcgaggaggacgaggacgacgatgatggtgattatcgaccgagtgttggagtcggccgttctgaatcaaacggaatagccgatgaggaaactgatgagccgcctccattttctcgagctcgtcggttcacagaccttcttcggccaagcgccggattaaggacaggtttgttgagaaccggtggtcctctcggaatcagagcatcctccagagatttagggttgagaagattgggttcattgaattacattatcggggacgaagacgaaaacgagaatgatgatgacgaggatgatgcggatggtggcatcgatactgctatcatcattggtcaagaaggaggaaacgacctcgaccgaacgctcacctctcgaactcgacagactctaggctctcgtcccaatacgttcgtccgtccgaggagagctccgccaggcccaacggcaccgttggaagaacactaccaatatgcgtcctacatcagagacatggcggtgagcgacgatccgttggtcgccggtagggctcgtagtccgttgccatcgctatcttcttcctggatgtcgatcattcaacatttggcacctacatcaacatcacggccatcaccatcgccaacactaccagcatcttcatcatcaatccaaccatcatcaaatatactacctgcaagcgatgtaaataccgagaccatcaccaccacctcctctgaccctccagctgatcttcctgcacggtctgcacccgcgctgggatcactgaacacatcagagctgagattgaatccagaggaaagaaacgagttcgaggatgcctcagcagagaggagggcacagtctagattcggaagagaagatcgagtccggtcttgagctttttctctctttgtcctcctttcagtagtccattctttccttctcccgctgtcaatccttctccttccgttctttcgttctgtgcataaaggaaggagaagtaataccaaatcggcctcctagaaaaatccagttgtaagagataaacagatgtatgaaattagagaatcttgtatggccttgctggacgctatttcgttttcttagtatctcatggttcatgtgccttctagagaactttcattttatttttattctcatctttaagactggttgatcatgagaagtgacaccaaaagaaagacagagacatagatcgagatcagttatacaaaagagaagaagacaaacaagcagtaaactgggtatggagagaagaagaggtcaaacgcgaggagattgttacaagtagagtagaaggagaaatcactgatatgttgtctaatccaaaaggctgaaggtctttttctttttcttttcctcagagttacatttgaaaagaagagagagagagagagaggataagaagaaaaagaggcagaggcagagacctgaaagacgggaaagaaatatagatactaagaagagctagcccacgtcctagggaactctcccccaaccccctcccatgcaagcgctctcactccaactttccgagatgatctaatctgtccaacacaacggtcttactggtctcttcaatctcaccggccaagaaaatctcatctaggatggcgtaaactttgtaaaagttgaagacgagatcgagctcgcatacgttctgaaagaacgcgtctgatgattgagattaccaacagatgcataggcaaccaagccagagatagggtagatcaggttcggtgttagatatatatcaacaaaacggggagcgatcgatagaaacaaccagaaagaaggaagaaacattagaagcatacctaacacctcgacaaaaagatggatagcctccaaataggccaactcattatcgttcgagtccacacagatacagaagaaaagaccggcataacgacttgagtgtgagcgtgagtgtgtgcatgttaccagttcagcgtgccaacaagaatcagtccaagattaagactaatagatcctgcatgagatgaaactgagggaacgaaccgatagacgattttgaagctgcgaaactgatgtccgaagccaaagtagagagaggccgtcaactttaactcaacaacatcaatgtaacgtgcgtccacacatcgacagaacgctctgatgagcaagaggagagagagatctgacggacctcgacaaaattcgattgatacttttggtctcggggagcgatcaacctatggacctcacctctcagtcggacctacaagtcagttcgcttggtcaatcattagctctcgacatatcaaacagtaaaaagagaagaggagcgaaagaaaacagcaaaagcagagtaaacagaggaacaaaccttttcgtcgtcctcgtacgggacataccacttgctcaaccgagtcttgccttgtctgaatgtgatttaaaatgatgatcagttcccgagaaccaaaacaagagacaggttcgtcgacaccatcatcacgactcatccgcatcagacgacatgcatatacacacatatatataaaacaagagagcagagaagagacatgttcgctcacctattttggatcaagataaacttgatagacatgatggttgcctaaagagatgaggttcgtcttggggttaaatccgagaagacgaatgcgtgtagatggcaagaggcggtagatgttggtatagaaataacgtcctagtctgatattaggaaattattgtattcgtttttatcatgttcgctcaacgccgataccgtgcgtttgacatacttttcctttgtttctcttattatcggattcaaaacatgaataagcttcctaaagaaccagttgtccatcattgaacagtaaaagaggaaaacgtaagatcctaaaaaaagaacaggtgaacgatgaagcagagttgaagaaaattgaggatactctaggcctgttgtcggtaaccacatcaagaaaatagagacaaaaggcgagaaaaggacaagagtgaaggaaaggcgtatggaaagctgtagaacgcagctctagaaagatttgataagcaagaaacatcatcaagacctccaaatgaggactgaaagaacagatcaagggactacaaaggctttcaaagcaagacctcatcgcaagccgacttgttcaagattttctgggggaggacgatacacctgatgtatttccatccgcatcagaagaagatcagtttgtgttatcatagaatgaggagaacagaaaagaaactcacgatcggatgtatacctccttagagacattgacctcatccgccaagatggcaatcgtcttctttggcttcagggccgcggcgtcctcgggagcaccgtccaccctaccccaagcgccactttggaccaaagttcacaaggaaagaagatagttcaacactcggctcacggaacaagaagtggaacaaggaggagaagaattcaaaagagagctgtgcctacatcttggagtctctaccgacgattccccatccgactacggcgtgctcacccagctcgacaccctctaacaaaattgcctcatacactctagccccctcgccgatgatgacgttcggtccgatgctgacatttggtccaatcttggcgctcgggtgaatctgtgccgtcgggtcgatcgacaccgcgccagtgatctctgggctcgaagccgttcgagccgtaggaggggtaagaagtccgggagaagtcttggagaggtgggagaggtagagcgcgttggcaggaagagcggagctatcagcaggaggaaagtaaagagagaaagaaacaatcgtcttagccaggaaaaatcaaacaagcaagagatcttgacgaaaaagggacgaacccagcgctcttgatctgctgccaaaagtcaatggtctcgtaaacgaagagctttcggctactggccaaccgggtaataacatcctgttcgagatgaatgatttcgtccggctcggatgtggggtcctccctgtgaaagcgaataataaatttggtcaagaagatcagtaaatatattttatctagatgagaatgggacggaattcgaacgcacgcggcaattcgagccttttcgtcggtagccgttttgatctctgagaagatactctgatcgaagagataaactgtgaaataacccgtggcagattacagcataagaatgggcgggtgataggtagtggcgctgtcatggtgattctaaaaaaggacttacctccagtgttgatgactgaacgtaaaaaaaataaaaataaaaataaaaaaaagagtaaagggcagtcgtaagcacaagaacaaggcaagaaggggttatgcacaacccaaaacactctatgttgggatgtaccatcactgatgaatccctcgggcttctctacgtaatggagcgccattctgctctcctggtcaacaactatagatccgaaccggagctcctggcccttgggaacctttttacccatgattgtgcccactccacggtgcttggagtggaactcttgaagagacttcaacggaaaggacgagcagatgtcggcgttgaggacaaaaatctgatcaggcgaatttcgaaggatgacatctcggactggaaagtgggatggaacaggagatgtcagaacattgagggagtgaagaagagaaagaatgtgtgttcaagaaacacggacagtgatagagtcctccagcggttcccatcgccttgaactctcgcaagtacctgtcgacaaaagtccagaccggtctcacttagcacgttggtggctatatacatcctattaagcaagaatcgagaagctgaaagatacatacgaaatgcccatgttcttgaattctctcctggtctcttttaggaaaggctcaatcactttatcgtcccagactccaatcaggaaaatctcggtaagacctggcacctgggagagggcccggatctggtgatagatcattggctgtagcgggagaggggataaaacgtgggtttgaaatagatcagacaagcgaagagatgagccaagacgatagacttacctttccggcgatggggaaaagaggcttaggagagctaagggagagaggtctgaaacgggttcccttgctgcgtttgtggaaggcgatagaaaaacgtttgagagagattttagaactaaagcggaacgagagatgattccgaccaagcttagactataggacgagggtgatagagaacgctgacttacgaaggacctccgatgaggatgacacctggaatttataaagttcgtcccgggaaccagatcgccaaccagagtgatcgaggaaagcaagcgttgagggatggttaggaaggacagaaattgacaacaaaggacagcgtatacaaagttgatcgaaaagagatgagccaacgctccggactttgccggcgttgagagagagagatgggatctagctctgatcgctagcgatggacgaacccttgatggcagcgtgagacattgtttggagacgtaagtatgctttatgttctttagaaagagagtgcaagacgactggatggtcgaggtaagatggaagcgagatggttgtatcgtctgtgaaagaatccgccggaaggaaacaaaccgacacggccagtgatgatgaaacagactggcccgaaggttacccgagggactgtaaccatggctaccgctagactacccgatgtgagcttgatgactaagcgttttctggcagcctggatgctattcaagtatatgcataggtttctgttgggctcatactacatatgacggagtagaacatgtgcgcgcgcaagagaaagagggagataggtacatgtgtatgtgtatgtgtatgtatatgtgtatgtgtaattatatgtgcgttctgagaaaagccaactgagagactggaaagcgttggccaatacgatgggccaaagagtcatcactcaatccccaacgacttcatggttgcatcacactggtttccagcttgaagcaaagggaacgaagaaaagacagatcatgacgtattcatgatgggtcacagacaacatgacgtcggcgttagagaatggaagaacaagacgttgtttttgacctatgcctgaggctgtatagctgcttgacgggcgtactcgctaacgcacagccaccggtatatagagagagagtgtcggtgtgtatttgtctgtgttggaaattgtatttgaggttgtactcgaatttgtaatccaaatcatattagaaagtattagaaagcttactaggagttctactagaaattctactatgaattctgaaggaaatcctaataaaaatcacatctcaagcaacactacagatctcaatagcaaacctattgaaaactgtagtatgaactgtattcaaaatcgtattgatcttcccattaggaaattcgtaatcagcgatcgtattacaactataacaaattcgtattgttttccatcttggcctcgttctccattcgtccttttcttccatccgcactctctttctctcatctctctctcctgggtatcttatccttcttactcactcactcactcactcactcaccatcactctttctgtattcgtccctctcttgtgtctctgtccttaccaacaagtttctacacctcctttaccttcctctcagccgagtacatcaagtgggagctgcttctttgtcgcttacatggtgcgtttcatctatcttgcttgcctgcctccttgtttttttctttggtgtttcctttcttcctttcctctatctctcttttcttcactactctttgctctctctcaaagatcatactatcgcagatcatcctgtaagatattggaggcatcttcagtgatgggcttgtcacataagtgaggcaagcaagaggggagaaaaggagaagaagcagaaggaaaaaaacaaccagatggacgtatgacaggagagcgatgaagagttcaatcatcccatgttcaattagcacgtctcttcatcatcgctcggtatcacacatcgtttttcctcttctcctcataaaacatacagaaaattcgctcttctgctctctgtttggttataaaaataaaaaaaagcggtttgcccttatgcagaccacatcgatcatccttgtttctgaatcattctgcgtcgtcaattaaggcgacagtctccaagatagaagactgacttggttctctgtcttttgttcgtccaaccctctcctactctctatgaaccccatgtctcggatatccaatcttttacccgaccttggcgcctcttttcttcatcttccttctctgatctatcataaatctggtctgtcgatcggcctgtcggtctcttaaccgatcaaggctacttccaccgaaaaactagatcgttccattcatgacaccgagcgtttcatcatcatcgagcagcaggttcttcaaggctccgtcgccatggccgctgctcaccgaagggtctcgaggggaaatccggaatcaaacgccctcgtccggcaggcagagcttggaatcgatcagagtaaagcccgcttggaatttcttcgcggtcagctcgagaagaagaagaggaggcgagctggattgcccaaagtggaggaagccagatggaccaaccagcttggtatgcccgatctttattgtctcatctcatccaatgatattctcgaacgagataactatacgaactcagaaagagaaagcgctgaacctatatcgtacctgcttggtcgatgacctctctagatttaatccgagcggaaactccactatctgttcctcgaatctcgcacatgctcagcaaactcgagttcaaactgaaactcgaagaccagttccgacagggccgagaaaagatggcttccgcgctgacaaactcgacagcaaaggacgaccgaaaggaaagagcccgactggcagccgatcaggaggagagcaaggaaagaatcaaactgctcaggatggcggccaaaaagtacaataatctactctgtgatgaagatgaagaggacgaaagtttgttcttatctcctcatatcccttctctctatctccttccttccttcttggcggctaggatcaggacacatgtcacatgatctctgatgctgaccaagcatatacgctcttcgttttcttgaatggacccaccagatctatcaaaccccgccaaggaagctatcaatcgaaaaccaatctctggtaaactctccctggccctagtctccggacgagatctcgaacatgcccctcttcctagctcgtcttcatcctcactccggtcgtctccgaaatactacaatgagacctctgtcgagttcaaggtacactctctcgttaaagcagtctctcatccatctcgaaacgatcgttggcttcaagagttcacgctcgaaatggataaagcggatgaagtcgagatctcattttacgaccagcccgtcggcggaaagagcggaaaggaggaaggcaagcgagtgttgattggagtgatgtggctcaaagtgagcgatctgttggaagctctccgaagacagaaggtcgatctgatgggaacaggcgaaggcggcgagaccaactgggtcaccgccgctaccgtcagagatcgggacggcagatcctctgggccacccaatggagggagaggaccacatggcatcgcaggtggatcacagaacgagttgggcgtcaaagggcaaggcgtcaaaggacagagctcgaacggggagggtctggagggttggttctcggtcgaaccacaaggagctgtcaatctcaaaatggacttcggttcgtccctcttctgtcttttattctttgtatagagattcaaagagaggaagagttgtattactgacttgtgaccgataacgatgacactcttgtcctctcatcccttcttctcttcttctccacagtcaaagagaacgttcgtcgacgacctctggacggaacccctggtgggctcggtcgtcaaggcgccgtcaagaagcgcaagggcgaggttcacgagatgaacgggcatgccttcatcaaacggcaattcttccaagtcattctttgtgcgctctgcaacaagtttttgatgaccggagacggttatcagtgtgaagactgtcggtacatgtgtcacgaggcttgctaccataaggtgctcacaaaatgtatctcgaaaccgaactacgaacaggttagtccaccatctgtttttgtatactctcatctttctgtcatcgctatacaatcattgctgacgaacgagcgtaatgactgaccggtcttcttccgactgatgtgtcatttctcactctcaggagggcgacgaagacaagatcaaccacaacatccctcatcgattcgagccatattccaatatgagtcctaactggtgctgtcactgtggatttctccttccacttggtagaaaaatccctcgaaagtgtaacgaatgctcgattacttgccacgaacattgcgcccacttggttcccaatttctgtggaatgtctatggagaatgctaatatgatccttggtatggtccgagatgttaagagcacgaagccaaagagggaccagcaattggctgcttcccctgctcgacacaaccaacagcagcagcaacaacaaaggctgccactctcaacctccactcaatctattccagctcctccttctcaaactcaactccctccgctatcatatcagcaagaccataggcatcctcctccccagatacagcagtcgcaaccgcagcaacccttggtggatcgaatgcaaaatctttctgttagtagcaagaccccagagcccagacctttgcctccgactcaggctcctgcccagcctggttaccaaaatgtccaccagagccgacctcctcagcagcacgcttatggatcttctggatcacatcctcttccctctcctccgacccaacagcagccttcgaggggagatcgaccactacctcagacaccagggttgagcggatcaccatctgtttcgactattcctgcaattgctccccctccccggtcaacttcatctcaacacatttcgtctcaacctgctccaagcccaccccatccgcaacatcagcggcttcccagtacgccgcctcaaatcacccctcctgcccaacacccacctcagaaacaacaacagcaacaacaccaacaatttccggcggatggcatatctcccgcaggagttgtcggtactcctcacatggtctctagagtcaaaccgaagaagatcggcctggaggatttcaacttcttaacagtactcggaaaaggaaacttcggaaaggttatgttggctgaagaaaagacgtcaaaccagctctatgcgatcaaagtgcttaaaaaagagtttatcatagagaatgatgaagttgacaggttgagttattttcttcttcttttgctctttgactgtgatatttctttcatatgctgatttcaatacaccccatttgatgtggtaccaatagcacgaaatccgagaagagagtattcctcgcagcggccgaccgaagacatccgttcctcctcaatctgcattcttgcttccagaccgagacgaggatctatttcgtgatggagtacgtgtcgggaggagatcttatgcttcacattcagagaaaacaattcactctcaggcaggcaaagatgtatgcgtgcgaggttctgctcgctttggaatacttccattcgaagggaatcatctaccggtgcgtcttcttattttccgttcctcactcgcttgttactctatcatccgtctggctttgtgtattgaactgctgttctctgttttcttctctttgatatgtgcatttggtagagatctgaaattagacaacatcttgttgacggtcgagggacatatcaaggtggctgattatggtctgtgcaaagaagacatgtggttcgggaagacgacctcgacgttctgtggaacgcctgagttcatggctcccgaggttagtatgcttttctaatctttactcaagtttctatggtcgttgtatcttaaagcttgatgggctgatatttgttttattacaacagatcttgatggaacaacgatacggtcgagctgtcgattggtgggctttcggtgtattgacgtacgagatgcttctcggtcagtctccgttcagaggagacgatgaagatgaaatctttgatgctatcttggaggaccctccgttgtatccgatcacgatgcatccgaatgctgtcatgcttttgcaaggagtgggtttgggtcttgtttctcattatccttcagtttggtcggttatctgtcgacaagaagctgacaaccgatcgcggggtgaacgttatttcctagcttttggagagagatccggcaaagagattgggtggcggtgagaccgacgctttggagatcaagaggcatccgttctttgctgatgtcaacttcgatgatgtctacaacaaacgaattccaccatcttatttcccttcactcaaaaaccctctggatacgtccaacttcgacgctgagttcaccaacgagcaacccacgcttacgcccgttcatacccggctcggtcaaagggaacaagaagagttccaaggcttctcatgtaagtgcttttgcccttctgtgatgaagtacgtttgtactgatgtcgatctgctggcttcgaacggcattcttcttctctagggatcgcaaactgggtcggagacgcttaatacgacacacacgtctatactccggctagctggcctattttttcttatccttgtttcctctggatctcttgaacaccttactttctttccatccttcatcttgctcggtatcactgttgtccctcttgccttcctccgtatctgtttttcttccattttatgaccccttcctaggcttctcttaattcctcgaccgcggccttcgggctttatcttctcctttttgtacaaccttcttccttactcgctagtgattgcgaacgccagattctccgtctttccctattgattgttttgatcgataatgtcttctattcttccgaatcttcttcatatatagataaacttttcttcgctcatggttcatctttctttctcctctcttgttggatcaagttttaattgaagaaccatcgatcattctcgacttcaaatgtaggttgctccgagattcactctacccgattgcgtctttctttctcctttttcctccccactcttttgcgttccttaaaattctattcgctatacaaaacctcttcctttttttctccctcgaccttttttttcgttcactttcttgcttgttggttctccctttctatgtgatgacagtgatgtgcctggatccttctttcctttcttttttcttctttctttttacctcgtgttgtgttgtggttaatctccgattttattttgtttcatctcgtttgaatagttcggttcagcaaatcaagaaaaagacgaatcaacatcaggatacaacgagaaaagcgccgagagaaagagatctcgatattacaaccttcgaaagaccagacagaaagagaaagatagaacaaagacctgagagaacaggccaggagagtatcaagtagactgaacatagagtcccctcatcttgttgccgactgctaatcgtctacgagcttctaaccaactcatcgattctgcatatgtctgttttcattccagaacaaccccccaccccccaccccgagaaagacaaacccaagattattagaggattgtcggttgataccgattcaacgcacgagaaacggtcaagaaggtgaaagagggaaggacggacattggggataacttcgacgtctaatcctgccccgttgtcttctttttgccatgtaaagtggaaatccttcgtaaccaaagaacgcaccaagaatcgaacaagccaacaaagaaatcagtataaagatgcgctgaataaggagggaaggataaacgtacgttggtggtgtttcttctaccggtggaaacatcaaccacatcagccgtcacttgagagtggacctggtttgtgctcgagtccgtatgggtcaccacggccgttaaccgaaggacagaaccgatcgggactggaagtctgtcgcgcgaatagcatgagaacatacacatctgaatcagagattcttatagagaagtaataagaagtaaagaccaaaatagatcttacttgaatgagatctcatctagagctctgtcgttccaaacagaaaaccatcagaccaggataggggaaacgtatgtgtagcatagataggactcacaaaaacttcatcgggcttcgagtgaatagtacgacgttactgtacgacagctcgtacgctaacctcatcagatatcctggttgagcaacaagacaggaaagaagaaaaaattgaacccagttcatcctggactcgagagctcaagggaccagaattgagagatgtcctgacctccaaagatcttggaatgcatgtttctctgctgaggactagctcaaccaaaggccgcaacagaattagattagattcgctactcaagaggatcgtacgtgactacatatatactgactgcattaggtggtcggcgcttgtctgcgattcaaagtaaaacagtacatgaaaggagcatataagcgctattctcgatgaaggggtgaaggcatccatcgactcaccagagtgtcttccatcttcacaattctcttcccctcgcttttagctgcatcaatagattgatggtttaggataaactgatgaagaatcgccatctcctcagatgtaggagggactttcgacaaagatgtcttcgagctagcctgttttcgccttttatgctctgatggagcaagaagagtggtgtcagagtgagtgtgtatcattgagacgtagacactcgtagagatatatgtatgaaccttttccgacttggaataactctttctcctctggagtttctatcaaaagtgagttgatccgtctagcggtatgaaacctagtatctctggcaaccatggtgaacctccctggtttgtttgacgatcagagataacaacacaaacataggcaagcgccgtgagtttctacttcagatcacgatgtcacggatgaacatagcacatatacctagcatgagagtctcgctcttttcgtctggcccccgaagtccctccatccgaacaaatacctccatactgctgctccccacgaaacaaacctggccactcaatctcaggtcttgaacctatccgttaaagacatggagcgagcgcaagcttgagccatcaatacgagggaaggcaggaaagacataaactcaaagatacgaaccaagagatccttgaacaaatctaatctgtcggctgaagcggttgccatataaaccgaagatttcgcttctccatctgttcctacagagccatcatcctgtgacttggccgggacatacaggtgcttataggcgatcgcgcctgccaaggagtctatatgctctgtaagcttcccaatccgtaaaccgccagaagtggagatgtagtcatttagcagagttgggtctgacgccaaaggaaggttgatctgtccagtccaagcgcacatcatatgttcgacgatgtgacgagatacgaaagcaagtcaaagttactttagccgctagcttgtataagaagcaaccttagggcagagagactaacctcaacgtaagagtcagacatccgtctaggcggtagctcctcctccttttcatccgacctcacagcaggcttcgcttcttcagtccctcgcgactttacacccttcttatcttgactatccattccaggataataggtgaaactccaaggctcgatgtttcgaacaccctgccatagttgaccagatggtctcatagcaatcccttgtctatcggatgatatagtttgatcacctttttttttcaagaatcaacatacacaaagaaaaatctcttagtatcctagcggacatcaagcccttgagtcaataagcaaaacaaataaaaaacaaaacttacggcccacttgatcaagaagttggtctatccgagtcacatccttcaattcttgacgagccttttgattctgtacaatctccgtctgttggttcagactggatgagttaagctgtctgtgttgagcccatcgtgtagccaccagtcctgcctttgagaggcaatgagaaggatgtctaggacagaagtttcgaatagcaatcagcatggaaatggaaaaggaatccaatgacggttggttggttggttgagagattcccaaaccgagtcagattatccccagaagagataagatctttgcacagttggcttggtcacgtgatctagcccaaccattctgttcaaactaagcacacagagcgaaacaaagtcttgggatacgaaagaaaaacgatagagagagcgcgatcattcaagaggaagtggcaagaggaacagatggaatagaaaacgataacatgaaatctaaacgttcattaaccgaccagactcttccttttcctccctctctttgcaggttcctttccggactctttacctatcacatcatcatcgatctctcctctcttgacgtttgccagctctttcgccgcttgttttgcacctcctacccaaccggtacaataagccgctccacacagacagcgttgtcggccgggtacgatcaaggtggtcgaccctgaggtaggcgttgactcagtaccggtttgagcggcagcggtcgatttgatctttgtagagaaagaatcaaactaatcggtcgaatatagtcagaatcgacatgaaacaacaggccaaaagcgcggttcaatctgaatgtagagaaaggggaaggaattcacattgtagtcgtagaaaagttcttcgccagctttgatatctctcgttgtccagaaccctacctcgtattccttcgaaaggaaaggaagatccgaaaacaataaaagacaagaatattctttgagcctcttcgacttggtttctagtcaaagatgaagcgttgacctacctcaaacccttctccgagcgtcatccatttttcgacccgaagatttggatcacagccatctgtttttggtccgttagacatataatgaagagcgcgcactcagtaaggtcttgatcaaagacaagaagagtagaagagggagcgaaaaaggaacggacggttgataaaccgagcaatattccctttcaacccagaatcaagtacctctccatctccatagtcaaccgcatagaactccttcctgtccccgtagatagaaccgagtcgatcatagtattccgtggtcgatacaaccttttgtgcatttaatttcattcagttcaaagaaaaggaagatattgattttgaaaggaggagtgaaaggttagccgaaataaaacttagaataacataggaggaagaatgaaacaaacctctccccgataatcaatgacaaaagaattcgctggaatgaactccatagctttaacggtgaacccccgatcagatgtctaaccaagctcatttaacgagaagcgctcaactgtttagtctatctattgagattaatacaacagacagtacaaaagaaagaaagactcacggagaagactttgatagacggtcctgttcttttatagagagacttgttcaagcatctacatacgtttaatccatccatccattcaaatctcttagcttctgctctgcttctagtcgatgaggataggaagagaagaagagggaaagaagaaggacgaacacttctccgaaccgacagttcttgggatgacatagatactgcatcgctctaagaagcccattcggatcgatttaaattgattcgggaagatatcaataccgagtaccgacatagacatcaacacccgaatatggttagatgagaggaattcctcaccgatttacacagtgttctccgcaggcatcgatcaaactaccttgatccctgtcttcaggtttccatcccggtggtggtcgacatcttttttttaccgcaagtcagtgcgatccaaccccgatcaaagcaagttgaaaagatggaagcaaagatgataaaaattgggtttgaaaatgaagatatgaacgagaagaagaagaaatgatacggaatagaacagaaatgagcatatgttttcacctctgggttctgaggccattttcctcaagctcaataagacatggttctatgacttactcgcattctgatggctgggccagatccttcgctcgattaggatacgtatctggttaattccatgattacatagaaagatattccccacatcacgtcgcacattccataacagtttgttcatctttcatgttctcagtccaaccataaggaaggaaaccaaaggagggcaaaacagagagaagagaaggaaaaaaacgccatcctatcaatcctcaagaagacgtactcttcgtaatcatcttgaaccctgccttcttcccatcgatctccgccatcgcttttcctccattctttccagtttttccttccttttctgtgctcgctcccaattgagattcggtcttaggttttgcttttcccctaccctttcgtttgttttttgaaccgtcctcgctcatgctcgagtcgcccacatacccagcgggatccaaagtcgtgttgggattgacaccaagtgtggccgtggaggccgtggagatacgggggaggaaactagatgaagggatggatacaaggataggattaaagttggagggtataacagaagcgagcgacgtttggtgctgattatgagcaggaagaggcgccgaagatgaagggggtgacaacgaagaagatgaggacgatgaagaagatggtgccgaggaggatggtgtggatgaagatgaaggtgccgaagcgacagaaaaggtagatggtatagattttgcaacggagccgatgggcacagaggacgcacgctcggtgctgggtcccaaaccaccaagtttcaatctgatcgagggtcccttcttcttgaccgctaccgcctggtctgcaacgaccgactctgtcggattcaaaatgagcgataggttcgaggcaggaacagagccggaggcgagattaagagaggtaggatgagaaggaggaggtgaacggtgaagtggccggaaagagggatctggttggctcgacaaagcatcgttcacagagaatgttggcggcaggagctgtcttggtggtgacggtggtggtaatgatgattgctgctgtgatgatgttggtactggttgagtcaaggacgatgagccctgaaaaggagccaccgttgaatccgtttgagcagagactggattggacaggagcggaggcgacagtttcgatttctttgtcggtctttgtgagtccagggtaggacccattgagtgaatcaccggtttctcatccttttccgccacgtcggcgacaggtgcggtcgcagtcgctggctttaactttgctagttcagccgcctcgttcgctatactcaactcttcctcctttctctttgctttctgtccggccgtcagcttgatctctcccggactgcccaccaagacgacgtttggatctccacctttcccgcccggtccggtggcgacgtgagcgaagcctggtttgatcaaagagactacattccctggccttctcgttccttcttcactcagcattcccttgatggcctgtgcctgtgcgcctggaatcagactggccgggagacccatttgttccattcgtttctgaacggcgatcttgactcttgcttttcgttccttgtcggacctacgggcgaacgaatccttggtcgaccacgtcccagccggaagttcaccttcgaacggagggatacaccctaggtcgaccccacctacgaagagcgaggtcacggtgggtgcgagtatagtggacgtcgaaccgggtgaggagtggacgggtggcagagtcgacgactgagaacctgcctttggaaggggagtctcggatagacgggcaaatggtgctttgaacgctctcgaacgggctgctggcttctttgtcgtcgccgctttcggttcgcgcggtacgtacgatggtgcagactttgtcggcgcaaaggatgaagtggaagaagaagaagacgaggcggaggaagaaccggtggcagctgtgttgttgttggcggccgctgccgctgctgccactgctgcttcactggccaggacggcaaacgttctgggtccaacgaatctcttcagctttttccctcctctctccgctctaccgccggtggtacctgctccgccgttatcggtgccaccgacaccaccggtggccgatcctgactcgccattttcgcccgaatcctccatgtagaatccagcggcgggcacaccgacgccacctgagggtttggcgcgaccggaccgtcgacgggttccatcacccacagcaacggttgcgctagtcttcttggcatagacttctgggtcatgacctggtgtggatgtatcattgatgaaaaagatggccgggtgggtgagtgggacggagggataacctccattggagaacgaagtatggtagtagctgttggtgttattgttgttactgttattgccacccgtcgcggtcgtcgtcggaagagcatcgccattggaagaaggagtgtttgaattcgaggttgaatctatatgggagactggacgctctggtagtcggaagaaccgacgaggtcggatcgaagccatcgctgtgtaagaggaacggaagcagatggggagaagagaacggaacgcgcgcgcgcccgagacgaagcatgaagaggaaaggatgggtgtcagtactagataactcttagaacgaacggacaaacagaagcaacgaagagagcgctcatgaaagatatcgatgtggatgttgtgaaagtgaatgtgattgcgtatgtttgtgtgtgtgtgaggcttgtgcgcgcgcaaaaaggagagatgcgttctggacagatatgagaggaacctgaacgaaccccacaaccttctcgccagaacgtagtctctcacttgttcactctctcgcatacactggcacactttagcagcgcagaacagaaggagacgatccaagggatcaaacggaacaagaagaaggagagagaaacgaatgaatggatgagcgcaggggtatcagaagctcagacaagcgacctttgcttttttctctccttctatttttcctctccctcgccctgctaatgtaggcgcatacatacacccagaaggagcgcgctcaacgcataaagagagacacaagactcctccgagagaagagtgaacacagcaaagaaaacagaccgaccaagaaaccgctgaagggaagagtgttgaggaggagagagaaagagagagaagagagaaaaagagacggggagggagatcgcgcgcgcgcgcagtagtaagagcatccgcagtcaggtacatacaccttcgtccttggttacaacctgacgcaccggccgcctctctctccctctgggctgccttagctacggtcggagttggaaatgtcacgggtaactcgcctgatgttcctcagccctataaaatcacagaggatcctttctcttttcgctcgttcgttcatcattgacttctcgctctctttgctgtccttgtgagtactctctttctctgaatcgatcatacccatgtccgcatacgcacacactctctcttcaaaggatgaagcatctttaaacacatatcaactagaagctgtttcatagctttcgggcaatgattgtttttttcagaatcgccctgaaccctccttttaatatctccctccttctcttcttgatacaacattccgttgtgagagaccgagtactgattcgtgttccttttgcctttggtctgtttgttgtcttgcgtctggcaggatctttatagttatactccttgtttttgaatatcatgttatcatttacacaactcttgtcgtgcatcgttcaaacctaaacctctttgaaacataatcatcagaactgagagaaaggaaataagaattgttttaatggaaacaaaggataccaggttctgacgcatatcgctgatctcttctatattctccgcgctcatatcggtttaagagaagaatgaaatcatattgatacactacacgtcaaactgggtcctattcattctgttctttttttaagtatctcgttcaacgtctcctctgatccctatcgctctcttcatccgaccgagcaggactctttgtcctttgtttcctcggaggagaaggtgatcgactgtcgtatgacctggctcgaccatctcgacgagaatgggatgtcgttctcctctttcgtggtctggaggaagaggaggaagaatctgaacgcgagtcagagtctgatccagaatccgagtcggaaccagaatcagagtcagagtcagaatcagagtcagagtcagaatcagatccggatgaagaagacgagaccgaggatctattggttttaacccgccaaaacacacccaatcggaacgacagaacgcacacaactcagtacagacacacatgagcagcagagcgagatacctgaagagaagtaacgtacgctcgtctcgatttcttattctttgagcttcctccatcagcggcagcggcagccttgagcgcctctcgttcctttctcttctgttccaatatctttgtggctgttccctttctgatgagccccaagatcaattaaattcagaccaaaaggatgataagctcggtcagactaatcgtcgtgcagccctatgtagtggagggaaaaaagagaaagagtagacgaacccagagttgagaaactcctctggaacctctacactaggtgcttctctctttgcaggtttcgtcagctgttgagtcctcgtcggcctaggcttgtacggccgttcgttcttgcattgataagagtaatgtcctttatgcaggcatttctggtttaggaaagaaaggattaaagatctcgtcatatcagacgcgttcaaacagatcgtacaatcacatagcaaaggcgaagaatagagttgggatgggatggcaagcaacgaacctggcaggtcgtggtgggtggagccgaacggaaagtaccagagtcagccgtctttggtttccacatctcttttcgttatcttcttcgtgtcttttttgtgagagtgatagagagaagaggcgtagagttgagtgagtagaactagaaactgtccacacacacacacaaacacacacacacacacataactacaagaaagcagagtaagcagagaagaggggcacgatgggtggtgtaaccctaagcgtaacattacgtaatccgatcacccatcactctacgtcattagccgtccgtcggactgtgcgggaaggatctctcgattgtctctgtccttgtacaggtgacagagcatgtgttgagggatgccatcagaattgaggagcagacctagtgatactgatgatggtgatggagatagtgatggcactggcgatgggactgcaaccaggactgagtatgctgaatgggatggagaactcaagtgaaggtgatcaaaggaaagtgaacgttcgtccagaaggctgttcaatcagtccccagacagaggccgccgctgagcaaacacatacacaccacacacacacacatctccagacactcacacacatgtttaccatcgtcatcggttcgatcgagactggattgtaccccagtcaagattagttccctcctaacagctgacctcgagattaggatttgatctctgatctccataaaaggaagagataccttctgtctatcctgtttctctttccctttctctttctctttctctttctgttctccacattccacctagccttctcgccactcagcctatctatccgtttaccctttacacactaacaactccttataatgcatatccctaaccttcagaccatcatggcttctgccctcgccttctctggtgccgttcagaacaaaagtacgagccgttctgtttcccgcatgtcttcccgtcccgtttggttttggtgatctgatgcattctctacatcctgttaaccatcaattgtttgacatcccggtcatcagacccatccaccgtcgcgaagggtgaagttctcgatttctgcaataaggcttgtatcgacgatgatggcaacgcacactgcaccaagcctttcgctctcgaaaagtcaaagtgttacgagtaggtatctcaccatcccgttctgttgtatcatctaccctggttgacactatcgatcgaatggttggacttgtcctaggttcgcttggcagaccaagggtaacactttcactcacaccaccctcgagcttcggtaagatcgttccttctctcttcactttctctgcaccccggttctctgtaacagaccattcgtctgaccgccgttgtgtgttttcttcttcttcttcttcttctattccctcaaccagaaacgtcaagaagcccaaggacgtggtctactacagggacacgaacggaaagtacactgtcgagaaatctgggctttactacctcgactttgtcccccgaaccggttgcgacaacgaagtcgagtacgagatccagacttgtgtctagacggtctctcgatactcgtcttcgatatttgacaacaatactcctctgatgatcttctatctctgtcttgcccctccccaattctgttatcccaccacactacttgtagcccatagccttctgccctgcctttttcgcgaaacacctgagttggaaatcctatccgatgtgttttcgtctgtaaatagaaagaaagaagcctgcgagccgaaagagttgtttgcacatgctcgcattgaaaggtctgttttcgagccgaacgggaagaaagaatatccggacatgcaagacaaataaaatgaaccaaacatcaaagataaatagcgcaagaaagaagagaaggttgatacagcgtatggggtgtctagatgccaagatggtgggtgatgagagtacagtgaatgttgagggatatagaggtgaatcgtgggtaaaagagagagggagatatgtgagaaaatcggttgatttgacgtatagaccttaaaagccaggcaaaaaaaagaataaaaaagcgaaaggagaaagaaagaaagcaaaaaaaaaccaagaaagagaggaacacaagaccgaaccaagatctacagaaacgggagaaaaaaacagatagaaggggagtgagaaaaagaatattacatccccgtctcacattattgcgcaagctgcacatccgcccttcacttcctcatccccaccgcctctacttcttccaccacccttacctccacctttacccgtgcttctatctatagattgttctggctgtttcgttccgatctctccagaggttgtgttggatgccacattctgccctgaccggatgacatactgtccttctcgattctgcgcctgggcttgggtcgagggtacttgatctgaagaactcgatcggtaaggttgactaggagaccaaaaataaaaagaaccagaactaatcaggcgcaggtccaaaaagaattaaacataagaaaggatagacgcctgacgtcgagaggaaagaagaagaagaagaagaagaagaagaagaagaagaagaagaaaagaaccatggacagaaaaaggaagtacatacgatccattcatgtgagacagagactcgactcgttcacgttgtctattgagagaaaccgaaccgtcgtttcctatagtcgctccaagagaatctagagcgggtgtcatttgcgcaggaggaatcggatcgacggcggttgttgttgttgttgttgctctcgtcaaaggcgacggcgacgaggagagaggaggataagggagagctttatggtcggacggccgtgaagcctgttcagtccctctgtctgttccatcattgattgggcggtcgacaaaatcattcatctcgatcaaatcgaacgattcctctttacgcgccggtccgtcggcaggggttccagactcggtttgagagacctgtgagatctgagcgagtcgtctgtgggagggtgatataggaagaggatcttgccattctgagagcgggttgatttttaaattcttccggaccgctagagcatgcaagggatagaaagagcgcacgatatcagacttcagacgacaacatgataataaaaaaagatttaaggaagggagagaagtagaccaactaggaatgacgacctcgtcccaattcctcagctcattcttcgtcggcggactagagctactaggcgggacggaaaattcgtcaaacatgctcaatctatacgacccatcaggtgtcataggtgaacccgaatctggctgtgcctgtctagatatcgaaccagatttggccggccttcgcttcgaagaaggatcagcagaattcgtcggaggtgatacccgagatcttgaattttgtctgttcttcgtggtcgtggtgtttggaggtgaagtccgagaagaagaaggagtgacaccggtttgagatgtcttgattggagtctgagaattcgtacgaacgatagatcctttaggcgttatcggagaagagcctattgactttgatcttgttggctgagctggagaaggaccgtctctatcttgaacattctgcgttgggatcatgttcgtctggacggttggtttcgactgacgagcacgatcgactgatcgtctaggtatactcgaagattgctgaccggttgtaccactcatcactctctttctctcgttctgaacggatccgtcctgtcgttggccggtaggtcgcatatagccatgtgtttccgttgatagcctaccaacaaatcccgtctgcgccgcttccgacctctccgaaccgtacaacgtttccgaaaggtcttcctcactcccgattccgttgaggatgcccacaccatcaggaaggtggccgtttcgagcttgtcgagcgagttctttctcggtaaacggttcgagatgacctgtcgcactgattaaatccctagacaggatttgaaagggagcgatttcatccttgatcatcaattccgaccgaggttcttcctcgccccatggatcgttcatctctgagagtacgaacgccatgagaaagaaaataggcaaccgagaagagccgggtgttatctcgagcgagctgagggaacgagacgagctgtctatctggtaggtgtttgagggagacagacagggaacatcgacagaaaaaaaacacaagtgcacgtctcataaatcccgatacggatcacgtggatctcactgataagattgtgggatagaacgtttcctttatttattgattgactgactgactgactgacttgacctggaccaaaagaagcagcaaatcgatgaacaagaacgctctcgaaagacttaacgagagaacaaagagaaggtaagtaattggctgtaaagcctgaaggcatctataagtttctacttctttctgagaaaacaggatgactagaatacccgaacccaaaaaacgatagagtaagaagagaaaaagacgaagacgaagatgagaacgtagtatcgatcaatcgatctagatatacgggaaggaaaagaagaatcggagagagaaaaagctatttgatctaacaaacaaataagaaagaaaccgagggaacaacagagagaaggattaataatcaagaaaagactcttaacctttatcaactgaaaggagatacagaggggaatttaactctttttttatttacccaagagcgaccgttgaaaaacttcagaacggcttcaggtacgatatctgtagaaatacacagggttttggatttggaagaagaagaaaagagccaaagagaatgcgcaaactcaaaggaaagaaaaatcgaaagatgacagccaagacagaaggaaaaaaaggtgaagaaagaaagacaaggagagacgaaatgaaagcaatcgaactcaaagcaactcaaagagacaacagagacagacaacaaataagcggatgacgtaaagcaacagaacgaaataaaatgtagaaagagcaagcgagaaaacgaagaaaaaagaaaagaaagaaagtaaaaagcagactcaagacatgaactgcgtcgagtccgggtggcttaattgctgtgaaagattggcgaattggttcgaggatagaccaacagttccgtacatatttggctgcgactgttgtgtttgttgggactgagcttgaggctgaggttggagttggaaaggcggggcaagaccgtggctaggagtaaccatcaaagaggagccaactcgaaggatgtcgacagaagtggccgaaggaggtagaagcttcaaagcaagaggaaaggaagggaaaaattagaaaaggctgatacaagcaatcgaacgtagatgatcaacatgaaacaaggcacatacttctgcaccataagcaaccgctttgatggctcttgccgttgcgtctgcatttgtctgttcggcgaactctctggagacatggccgacctcaatgaatctttgctgacattcagcttgagcttgcgcgatgaccgtattggatatcaacgatgattcagagacaagcaccgctttagatataacaggcagacaaaacgagaaagaatgaagcgcgagagtttgagtcaatttgtcagacagcaaaatggcagaagaaaagaaagaacaagaagaaacggacgatgggcgccaatgccggatggctgaccagatgcttcctggattaatcaaacgagtgttcgaagaaagttagtatcatcacaccaacagaacaaagataggccaaagtagattacgaacctgcacagcctgaatcaccgccctctctgcctcctgcaaagggaacgaaggaggcatttgcatcgatcttgggttcatgttgatgttcgtttgttcagacagcatagaaggcgaagagaccaaattcggtctttgatcaacaagaaaaaagcaggaaaataataaaaaggaagaacgatggttaatcagcaaaagagaaaagaaagagagattctctcgatagaactgaattgatcacccactggtgtaagaaactagtcgtcaaccctgtattatcacccacgaacccaacgggagtatgatgtactggctggggcaaagggaacgaagggtactctgttgaaggcgaagcctgtagcgaggacggggcggaagcagcgttgaacccagactgagacggcgctcgtgacaaattggctcccgatttttctttgatgaaagattgtacagttagttcgcccctgtgaaccacgggatggtgggttggctcagccggaaactattttgccaaggtttggaaatgatgaaatggtgagtaaggtggactcaaaaacacatcctccacaatcaatcaatcaattaaaccccaagaccgcgacagagaactcacagtcgcaacagtctcgatgacgatggtctcaacatggtgaggcggaattccggataaccggttgtctttccacttcaaccagacgggtagtgagcccggtggcgacgagaagaccgcttcgatactggaagcagatgtatgcgggtcccatactcgcggttgccactgtttctccatccgttcgttgataacagttagctaatcgtcgcgtcggtctgactcccaacccaaggaagaacaactcacttgccacattgcaccaaccagcgcggtatttgtgaagtttccattgatcttccgtgagcttaagaatgagaagaagcgcaagaaggaaggtcggtcgatcaaccaagacacaatggatcccgaacgaaaagagcaaggaaaaggagaaaactaagataaaacacctacaactttctaaactcccagcctccttcaggaagctttcgagcgtcaacattccagatgtggtttcctttggactttgacttttttccatcctcgttgaatcgagcaatataggactggttccatagataatgcttaatcttcttagccggcatttgttcgtcgtcgaacccttcggcctgaagctgtagtcaggtgtgtttcaagaggccaagtcagtttccccgatttgaaacatgtgcaaatgaggcggaaagaaaacagagcacacgaactcgatcggtaaaaacgttggtaaatgcctgaattcggaacttgaaaggtcggaaatcccatgattcatcaagacgttgcatcttttttgccatcaacacctgatgcaactgttcgcctttagaatcggtgacgttgactatcaaataaacaagaaggattaaagaatggtcaaaaagtgtcaacaaacccaaaggaaaagaagagccctttttgttatgaaagcacgagaacagagagagagagagaaagcttacgatcagaacagacggcactcaagaaccggaggaagaccccatccagacgctgtctaaattcttcggagtacaacacttggccgcctcccagatgatcattcgaagatccttcacctcccgctccggaactcatccgtcgcttcgactctcccgggatgatgtccctatagtcgtacatctcggacgcatacatcctgctatcttcatcacccgagtcatccgagtcttgctccgagaaatctagatagaggggcgaggtcgagcttcttcttgaaccgaccgcctgggccgttccttgtggcagaccagtctgtatgttgaacagagaggaaaacacaggctcggctgtcatcgtcccacctgccgaagaagacacaggtgaggccatcaggttttcaacgtttggcggattgctgagagtagaactcatccctcggagacggacgaccggcctaccgtctgctgtcgtggcggttgatgaactccgtcgggaagacgaattcgaactggggtttcgaccactcggtgttgatacagaagaagaagcaacggggagcgtttgagattgggaatggacgtgctgacgcgaggaatctccactgcccgaccggttgccgacgaggcccatcgcgcttgtcccagcattgtcgaccgtcaaacccgaaaactccaactgattctgcaaatccatccccattcccacattcaaccctaatgactgctggggttggtttcccgaccaattctgcaaggcaaccggatccatcgtaccccctgtcatcatgtcaaactgcccatgggatgcaagtatctgctgcagagacagagcaggcgacgttgaatcgggtctcgaagttgatattgctagaggggagggaacaatagatgcatgcgactgctgaggttgggtctgaggctgctgctgctgctgttgctgttgctgctgttgttgtgattgcggttgcgttgagagggatactgatggcgattgtgtagacggggatggtgtgatcaacgttaccggtgtcggggaagatcccaagccagatggtgacgaggatgaggcaggtactccgagggaagaggtcggccgcgtgggaacaggcgccataagggaggggctcaagaaggattgttggttctggtcaacctcactcggaaggacctggtgttgaacgttcgggaacgaatgagaatggatcatcggaggcggctgggctggagaggactgttgggaagtaactgttgtcgaagttgtaggagccgttgaagaggatggtagaccgagtcctagaacacctagctcgttcgtccgaaggtgtttagatgctggggcaacctcattggtctgcaagaccgatgatgattcggcagaccgttttgaatgctgaacctttgagacatcagcggatgagttgatcggatgagtgttgccggacaaaggtgaatccgaagaagccacattcataggcactgaggtgacagctgttggcgacaacgtctgtgcgagaagagagagttgccggggaacttggatggaggtgtggtccaaagacgcgattgacttgagagtactgctaatttccgtcagatcaccatgaggaatatcagcttctctaccctcaatgagagagttacggatagcagctgcctgtcggttgatagcggtagatgcagcttggatgctggtcgaccgaaatgtcgattccgagaacggagtgagaatcaaacaaggggtaagcacactctagaatcatccgacacgtcccgcgtttcctgttttcactttcggtttcaaagaaaaagtcaagaacgactcacgcttcgagatctctcaatcttgattctaatgtcatggcttttattctcattgaaagatctggtatctttgctcctccctgacttgaatccccggaagacacttgggatgaatggagcgaggaaaccattggagaatcctgcaggctaccacccactgtgccgacgggagcaaatgtgaagctgctggatgtacttgatcgaggtctcgtacgcgtcggcgagggcgtatggagcgagtagggatggttgggatccatcataccctgtaccgagttggtcggaggcggtcctatgccaggcgaaggcagaggaagcatagcatgtgatccaggcgggctgagctgctggagggatggatacaattgttgtcgtggcgagggagcttgagagtgcaccttgagttgttgaaagtggtgggttgggtctccaacgacggactcatctgagatatcggcaaatgctggatggttctgaaggtgttgctgctgttgctgttgctgttgctgggatagcagataatcctcagagagctgaccgaagtagccggaagagctagcctgagaagccgtggtgacggacataccccactcgctggatgactggagtggagactgtccgagattgggggtattgtagttggatgctaacgcttcgacaagagaattcgttggagacatcaaagggggaatctgatgagaaggggtagagacatttgaatgtattgttgcatggttgccgggatgatagatagaattcggagagtctagatagggtacggaatttaaatttccggtgaaaccggtatcgaataacccgttgaccggtccggcagaggccatagctattgagagcgacatctggggacgatggcctcgatgggtggtgaaggcaccgttcgaagggaacgagctaccgggctgagagctcgaccttgacctgttccctaccggagcagagttcgcggttaccctggctgcgacgacgttcgggtttgaatgaacgtctgagccagtcggtcgagtaggcagcgttccggatggagagccggtcatgttctctgttgatatcgaggggaccaaattagactgagtggtgatctgttgttgggaaaatgaggaaggagtggatgaagaagcgaagtcgttttcgacggatacggccggccaagagaacctaggtggtgatccttctccaatagtcccaaggctgaaaaaggaaggaaagagaagcagcagcaaagaaagaccaaggggtatatgcggtacccgaaagatgtcagtttcaggaagaggagagagagatagagagaaagaactaaatgatagaaagaaaagagaagaggaggaagagagaaaaagaagaagaaaaaggaaaaagaaagccagtcttgtgcttacggtggatttaaaggtggggacgacagaggcatatcaaggccaagcatcccgaactggtgagagttttttttgatggtgagagaacgaagtgaagagactaccaatgaaccaggagatcaagaggttgtaagatatggatgtgagatgtaagatgtgtgtatgcgagtgagtgaggtagatgtaccgacagagatggaacgggatgggattgaatttgggggatggatagtcgattatagaaagcgagactgagcgggcgtgtgggaaaatgcccgggtgagtgtcgtagtagttgtagtagtagttgtgacagtaggcctagtcagttctaatagcaagtgtagaatattctaatcagggttctagtccagttgtagtatagtatactgtactataatgcactataatgtatcgtgttgtattctaatacaccgtagtgttcctgtcgagagtgccatatcctagtctattaggctcgggctttaacactctgtcgcctttcactggcctacttcattcacactcggtgtccccgcttacttcgcacacttcgcatactccctcactatccgctctctcatcactttactcatacatattcatacacacacacacacacacacacnnnnnnnnnnacacacacacacacacacacacaaacacaaacacaaacaccggcttttgcactcttcttgtccatctttttctccttctctctgctctatcaatttttcacttacagccatagtcacacgtggttacagagagtttttcgccgcaagttctaggcctttgacacaagtgtaacatgagcgtggtgctgcgcggcagctttcctcctcatgtggcgaataacacgtgtcatgtctgaacctcagctgtacgcatggttacgcagcaatccaaattattctcatccttctttcctcgcttctgccttgcgttcccttctcttttgccttcgagggttcaatcgtacaacctacagaactctacttttcagctagaagagatggccaactcacttaacaggtctctcatatcctcttggtcatcccagcagtcagctcctgccccctcgtcttcttccagaaagtctaaactcaacctaaacgctctgccttctccaaacactacctcttccacaaatcctctcgagtctcactctggccctcctacacctgcttccgagtccggtccttcgagctcgactgcgtccaaacgtcggactaggccgacttcaaccagctctccgaatcctgctggatcagccaccaaacgggtaaaaaccacacctagttccaccccggccaatcgagagcctccgacggccagattggctgccatcggtggtctgaccggaaccattgagaaactactcgagcttgtggctcttcccttgttgcacccggagctttaccaagctaccggagttcaaccaccgagaggtgtgttgctttatggtccacctggttgtggaaagacgatgatcgcaaatgctatcgccggcgtatgtttctctcttgctctctctttctctggcctctgaccgtggatcgagctaaactttactcgcaaaccccctcacaggaactcggcatgccgttcatttcgatatctgctccttccgtcgtctctggaatgtctggagagtccgaaaagacgcttcgagaaactttcgaggaagctcaggtgtgtgtttggatgttcggggtttcggactatgatgtctcaatcttttaggcctgtcgtgctccaaactgaacgaggctcctttgaatctatgtctcaatcacctcagaaaattgctccatgcctgctattcatcgacgagattgacgccatcactcccaaaagagagactgcccagagagagatggaacgtcgaatcgtcgcccagctcttgacgtgtatggatggtaagtctccgactttttgcgtctcaaacggagatatgagacctgacctatctctttctctcccttctctcttccttccttgacttcccacattcagatttggcatggcacaaagatccagagaagaaaccagtgattgtgatcggagcgaccaatcggcctgattcattggatcccgcgttgagacgagccggtcgattcgattgcgagattggaatgggtgtacccgacgaagcaggtcgtgaagagttagcctcctttttctccttttctctatctctcatcttgtctctgggcctctctcaaagaaagctcattccaatgatgactaatcaatccacgacgcatcctctttcttgctacaagaattcttcgaacgctacttgctcctctatcgattcctaccgactttgacatccgggctttagcaaaggcgactcccgggtacgtaggagctgatttggccagcttgacgagtgctgccggagtgggcgctgtgaagcggatgttccgagaactcggtacggcagacttgaccgcacataactctccacgtgcggcattggaggaacttctcccgtcggtgggagaggatggccctgctggaacggctctcgagggatcaatcgaggaggacgcgaccatggagaacggggacgcgcctgacgagtccgggatcgtccctcccgtggctctttcttctttactaacgtcatcgacgcccaactctccgccaagcacccaacttgttcttcccacttcctctctatcttcatcatcgacagaactcttccaaaatttgtcttcctccctgctctctgctccaatcactcaattcctcaaacatcatacttccgcccttcctccttccttactgtccacccttagaatccttccttccgatttcaagtcggctctgcagacgacccaaccgtcctcccaacgagaaggtttcgccaccatccccaacgtcacctgggccgatattggagcgcttcactcgaccagagacgaacttcacatggcgatcgtccaaccgattagacggcccgagttgttcaaacgggtcggaatcgaagcaccgggaggtgtgctcatgtggggtccaccgggttgtggaaagactctgttggctaaagcggtggccagtgagagcagagcaaactttttgagtgtcaaggggccggaagtcttgaataaggtgagtgtccagtgtttcttagagaaatgacgatgatcacgacagaaacagacaacacggattcatcgggctctgacaaatgatgtgtgcgtgtcttgttcccgatgtttacgtagtacgtcggagagagtgaaagggccgtcagacagatctttgccagagccagagcatcagcaccttgtatcatctttttcgatgaactcgatgcgcttgttcctcgtcgagatgatagtatggttcgtccggaatctctatttatcttttgaattcaggaggaatgaagctcaagaggtctttcctcctcctcatcacacacacatatagtctgaatcatcagccagagtcgtcaatactctcctcaccgagctcgatggattggattctcgaaaaggaatctatgttatcggagccaccaaccgaccggacatgatcgacccagcgatggttcgacctggtcgactcgacaaattgctctacatcgatctccccactccgaccgaacgagcagagatcttacgaacgatgacaaagaagacacctctctcacccgctgccgaagcagctctggaacccctcgcgaccagttcggcatgtgacgggttctccggagccgatctggcggctctggtcagagaggcggccacgttggctctgcgcgggaagcttgaacaggccggcgcgttcgaggtggacgacggtgtgctcacgttcgagggaaaacatgccgatcaggatcctctcacacgaagcctcgacggcggcgcaagcggcgaggaggaagagacgatctgggtcgaaccggagcatttcgttagagcggcagaaaaggtgacgcctagtgtgagtattgcccagagaaaaaagtatcaggcgttgagaaacaagttctcgggcttgcctgtcaagggaaagagagagcccgagttagaagcgggcagaccggtcgaggcgggcagcagttcaggtgatgctgtggccgatggcggcaaggagggtggatcgaacgaagagatgaactagaagcgagacaagaaaccaaaaaaaaaacacttgtggctctttaatgtctttcccatctctctttcttctgccaattttcctttctccttttttttccttccctcttacatgacacgctcaagcgaaatttgaaagaacacgagaagaatattctcccttttgtcattattttgatacttttcatacaacaagcaatcttcaacgaaacgttgacactgtcccgtaattctagagacttttcgacgagcacctaacaagccttccagcaaccaacccagatactcccaagaagacacggaaagatgagcaaagacacagacacagacacgcgccttttacttttcggcgttttgcttccgggcgtccgttccccagatgaaataatcacatttgtactccagattgacttcttctcgcagtcgaccattcttctttccgcccgaatcatgacctggtccaagaggtcttttttatttttatttttattattttcattaaaagagcccaggaaagagaagaaagagaaggcaaagcaaaaaacagagcgaaagggaaggaaagaatgagtatacggagagatgtaagtggagggaaaaacaaacaaagaaggacactcacaacgaacagagccagaacttctttcccttgttcggtccctgcttcgtcaccgttcgctccacacaaggcgcctgatgaaccctacatctcggaggttccaccttcttcagtagacccgtccaaagctgagctgctgacggcgcaggttcgcccgaatccggatcgattttaggatctgtgttcgactcggtttctttggcgaacgcttgttcttcctcttgagcgagctgaagcgcataggctctatcggcggcttcgtcaggctctgagcgctctgctgatgtatgctttgcgtccggttcgtctgagtctgagcgcggccgtttgagttttttgtcgggcgagatagaatgtgggggcgatgaccgtcttttcttgaaagccaatgtcgatgctgtcgggggcgtggaagaaggagtcgatggagcgaagaaagagaccaatgatgtctggccgccgttcggtttgatagggctcgatttcgttcgattctgaatctttggtctcgtctctgttggcttgatatccccccatgccttttgatgttgtttcgatgctgtcgatgtgggtattggagcgggtaatgtttgagaggacggccgttgcggtttggcggggattgagcgaggagccattagttcatccgattcgtccgtcaggtccacgacgacgatctgatcgttcaccttgtccgtcgcagttgcaggcgctttggaaggggcgaccttttgtactggttggaagaacgacttgatgctctttgcggagaattctggatagaacattgtggccagctttgggggttcattcgccactctcgtcccatcctctcttggtttccccactaccttgacgtttcttgcttgctcttcgccctcttgatctgaacgttcagacgaagagttagctttcaaggtcgagattgaaatcgagggttggaaaggaacgttcaacatgtcggccaataatctcggcttttcctctggcgagaggggaggcagactttcgtgcaggtctacatagacaggacagtgatctgagcctctgatatcaggtagaatatcacacgacttcacccatgggagtaagccttttgtgacgagaactgtatgataaaaatccaagattttcacacccgttagccgaatctttgagatatccggtttacctccaagaaggaagggaggtaaggaggacaaactgtaatcaagcctggtcccatagtttgaagctcgagcgtcgatcttcgtgttccagcctgtccgattttgcgtggccgcaagccaagttcaaaggcgatgttcgtgaacaaacgagacttcacagggcagagggtgtcctaggttgtaccaataagctgttcgaccgaacaagaaaacagtcacgtacaagtaaacattttctctctttctggaaaggccgatcggacgatatctgtcataattcctttaggttcgagaaactggtcgaaccattgtctagcctattaggtcgaacatcaaagtgaagaaaagaaaaatatgaacactcttgatccactctctcacttgtgttatctctgttcaacagacgcaatacaccacgccccaaacaagaaaacaagaaagaaagagagagagaaagaacgaacaggatgatcccaaaacccgttttgtttactagccagcgtgccctctccatgatcgctcggcctgtgaacgacgttcatatcacccaccaccatgacttcccttccgttcttcaccagttccttcactcttgcctctaggacggtgagaaagttcaatttgaacggtaagcgatcttcgttcgtctcgttcgggcaatacacatttataagaataaacatcccaaggtcgagtgtgagggatcgaccttcgacgtctagtttccagagtggctgttccggaggagggttcggtctttcgggtgtaggctctgttttgaacagagggatggatgaaacgtccggatagggtaggacatgatcgtctgctggaagaggcaaagacgatggcgaggatgtgggaactgaggaggaaggatctttgggagagatagacaagccggtgattccttctgaagctttgtgcggcacaacaaccgattgagaggtatacactccgacgcctgaatatcctttaccagaatgagggaacgacaggaaggcgtcataaccaggagggcatgcttgggctttcgtcaggttcgatcggggtatcttgagctctgagcgacgcgaacgggaaaaccgaccgggaaaagcaggagccagaatgaaattagtctatacaagcacagagagagagagagagagagagagagagaggttctcaaggctaataaggatggaagtggaaatagagagagaacgtcctcaccctggacacataggatatcagcctcgagttcctttaggacggcatcgtacgtcttgagcgcgtaccacggactgtagttcatcaacgtcttgagcccattgacgttccaagtgatgatcttcatgtcgaactgttccgatgcgaatgaatcgagtcaacgtgagagctgtgtgtatgtaagtatgtatgtatgtctatgtttacgtgtacagatccggatggtgaggggaacaaggagacgatcggcgttgagcgagagtcggtgacgtgagcaaacggaccggctggatggattatccggtatttctttctctccgcctccgatcacccttcgtcttttttccagctttcaagatgtctctgcaagatcaggatactctcgctctgtcgaccgagctcacggaggaagatgtgaacgtcggactccgactagcgatcgaccaggctatgaaatctcttggggaaggcggtatacccatcggtgcttccgtgagtgtctttccgatacttgagaggaaaatgaaaaagaagaaaagagaattattctctctctctctttctccaagtatccactttgctcatgatgtttgtcgccctttacgatgtgtgaatacatgaatcaagctgtatcaccacccgaccaagaagatcctagctgtgggacataatcagcgagtgcaggtgtgtgtgtgtgtgtgttttttttctcacggccactttatcgttatctcgtgtgaactgagcgagaggacgaacagacggacggactgacgatatcgcaaacgaaaaaaacttgaccgaccgaacggatgaacgaacgaacaaattaacgatgttgaatgtgacctgtgaaagatgaactcaaacatccgacatggcgagacggactgtttggagaatctcggccgagtggagccgggtgtgttgagggaatgtacaatgtattcgaccttgtcgccttgtgtgatgtgttcgtctacgattcttgtgagtgtgcatttattcttggtttactttttgggaaggaaaagaacaaggaacgttcccttttctcttttcttgtgtttgccttaccgactcgttttacttttttacagttgtacggaattcctagaggtgcgcgctcaatttacagctttaaaaagtccagctaacgtccagggatgatcctgaccatacagctgtattttctcctcgtttaaataaaaaaaattaaaaaaaaagtggttatggctgagaacgagaactttcagggtggagaggatctgttgaggtcgcctcctagctctctggccgagcctctgcagaaggctcgaattgtgatcaacgcccgatcggaggaagctactcggatgatgggagactggatcaagagtgaggccggagcaaaggtctggtgggaggatattggactaaaggaggaagagaagtgagtaagggagggaacgagcgagcgagcgagcaagcaaatagagaaaaatacagtttagatgagaggagggagagacggagcaggttgtacgggtaggtgggtctcggagccagagagagagtgtgtgcgtgtgtgtgcgtatgtgtgtgtatgtgtgtgtatgtgtgtgtgtatatgtctactaggagggcctcacaagaacatgatgagaacacagagaggacatgacgcgagctctgaaaggcgcttgtccagcggactacagcaatgttgtagtcttctctctaatgaagactacaaaagcgacgagcaaaaacactacaaaaaaagactacgacttgactagaactcgaccagaaaaacactacaatctctagccattgcatcatttcccgctatcggccgttttcttccatctcgtctcttttccccatctcaccttctgctggatctgcccaagcgtgcacccacgtcgacactcactttcctcggacagcatacacgtaccggcaccggcactggcaacaacacacacccaaacatacacccacactcacaaacactcacatacactcacatacacacaaaaaaacaacacactctataggcaggatcccgctcgccctcatcctaatgccaccggtagagccaatctcaaagcctaatcgctttccaccgtccgtcccgacgcttcgaccaggaggttggctcaacccatcgagcacaccctcttcttcaaccgccaccacatcaaccactccgtcctcgacgtcctcgtccgcatcgccttcaaggtcccacagctttctccaccacaactcgtcttccttcagttccggtccatcccagtcgatcctgtcgaacgggaacacaaacagtctcccgagaacgccttccggcatgaacacaccaggtgatcagccagccgaaggaactaccatcggtggaccaaagaaacgtacgttccacatcgttcttttctattcatccatcgttcatcccttttcctcttgtactcgatcgtccggccttgttggcttggcttcttgttctcgttcttgttcttggcagccgtgagattgaatcaagagaacacacagtgctgacgtcccactccttccggatcgtcgtggacatgccagccaaagatctttcgcatgttccctgcaagttcttcaagtccggaggctgcaccgcaggatctgcctgtgtctttgctcacgtcgtggccgaacgtaagtcgcctcgttcatatcaaatccgtttgtcctgggtgatcctgatatgtcctcatggctgactcctctggcgtcttggcttgatccacccatcattcccagccggtcaacaaaaacagacctgccagtacttccagaaaggaagctgcaagtttggtcacaaatgtatgtgtgccttctgatcacatctgatcgacctggcttgaatgtcgtgtgctgatagatatccctcgtccaatctcacccggttcctccgtctcacccatcccggtccctcaggtgctctcgcccatcttttgcccggacaacccatgtcgatggaccgaaagaacaaacgaggtttgtgcttttactctaccttgcctctgacgactcgttctgtccgctttctcacaccgctcctttcatctctcaatcgtatgactcatcggtgaggacctcgtgaacagccgtccagctgcaagcccaagctctcaacaacggcctcaacccagcccaggtacatcctacccagccggatctcaacgtggcagccaaccgctcgctcgcctccacattagcaagcttgcagacccagtcggcaaactcgggtatgatgtctgcgctctcccaacagatcgcgtcatctccgctctcccaccagacgggctcctcgaccatgccggcaaccccaccggccgatgttctttccaacggatggcacaccgacatgtcgtccgcgttggacggttctcgaatctccgggacgagaacccttccgcaaggtgtacacacctttcactccctctccgaactctccgtcaccccgacctcgtccggtctgtccccttcaccaccctcgaccgcagtcaaccaactgtcccgaccggtcttgttttcttcacataccacatcctccggaccatctggactgaacccatctcgggatcccctcgcgatcccttcctcggccagacgtccgtcctttcccgccgccctctcgtcggccagtctgttttcgtcttcgccctccagacgactcatcccacccctgtcctcatctgtcaacgtgtctggcgatgcctctcccttctcgtcttccccgttcgccgctccaggcgggaagagtctcttcctgtcgtcctcgtacgaaaatcacttcatgtcgacggccgaccagatggcgttctctccacctggtcatcaatcaggaggaaaacacctcatgacctctccaccgggtgcgctcagacggccgacagctgtggccgaagaagaagctcactatctgagctcgctctctggtaacgatccggaggacgaagagttcattcaagacgatgtcgtcgacgacgatgaaggcgaagagtttctccctggtagtttgagcgagcttctcacagacaacgagatggaacggcgaatgatcagaagacactcgaaccagatcgccccgttaggactcaaggcgttgtcaaagtcggcagcgccgacgttcccaatcggccaagggcgatccgtcctcaagatgggcttctcaacaggtaacggcacttctccttgggacggaacagcacaaatctcgaacggagcacccaatccggacaattctttgtcttcctcggccggactgaccgtcggaaggaactcgacaggaggaggtcggggcccgctatcgttcagacaactcaccagtaccatcgttacatcgcctatggctcatcctgaggatccgacagtgctgatgaacccccagtcgtcttttaaccatacctcggttgaatacgctcatcaagactcgaccccaacgtccgcttcggctgctctggccaatactccgtgggacagccagagttcgttggcgagccgtcgatcatatgccgctgccgcgtcccctccgctagcgacccaacagacgtcacgcgtacattcagcctggccttctccttcggccatgacgacggcaacagcggcgaaccccaacttgtccccaaaaaaccagttgggtcaccctcatctgcatgaaccgacatatacccaaccgatcctatccccttcgtctaaagcgcttgcctcccatcctcccggaacgtcccttcctccaggtctgggcgcagcctccagcaggcttcatttcatcccggcgacctcaccctcgatgtttactccctttggtagtgtggcaggtaacgcaggaggcggaggctaccccgatcggtcgtccacatcttcttcggcctcttccgtctcgacctcccaggccggactttactctgatggccagaaccaaccgttctcatctctgactttccagacccagggtcacagccagcaagcgcaggggatccagcaaagccctcatggtttaacctttggcacggccgttaccctcagttcttcatcttctgcagataggttcggccgaagctctatcggcgacggacgatcgatcaaccaggaacagaaccaacagcaacgaattggaggtattcaaggccaggacgaaccgttcagcactgccgtctttaggaacgtgtgggaccggccggatcgacctaacggttatgagactggatcaaaagcagcaggtggggcagcagtaggtggacctcgttatgaaggacgaaaagtcggagtagagaaccttgggtcaggagtaggaattggggaggacgatcaggatgagttcggggatgacgtcttgttcaactaaatgagctagaactggagagccggaggagactcaggtgggtgtatagcaccaggagtacaaggggtgtctaggttggggcctctcagtagtcgcgtactcttctgaccgtcaagccctctctttaatcctctttgggctctcttctattttctatgtttcctcaagtctatcatttatttatacgattttttcttctcttttgcttcttctcctttttcttcttccgacatataatctagttgtatcttgactccaccccttacattctctcttctagagattgaaacaaataataacattcagaagccaaacaaagaaaaagggtctcaacaactttcgttctttcacgtcattctacatacgaccttgctttgttcttcatctatctacacatgtcgttcattctcttctccgaatcccttctctctctctctctctctctctctacctcatctatcctgcccgtttcttcgtaaggaatgggtgtctttcttttgtttcctctctttgtttctttcggtctcttgatgatgcattcttcctctcctttcgaacatgtcttctgaatggtgaatctatgatttcgtttttggatcactttcgttcttcgctactcacccatacattctttcgttgtccctatgtcttttcttgcttcctctaatttttctttctctctctgagatgacatctagatctgacaatggatatccgagaacctaacaaagaggctaggagcgaatgagaaaaagggggaaaggggggggggatgaaaacaagaagaggatggaagagcgaacgtgacaaatcgagaaaaggagcacacaaaaggaaagagatcactttgatcgcttctccttccgttcccttcgtttctttccgatcaacagcccaagctctttcctttccctcttttccttctcgaccgaaggatcctcagcgggcgcattggtatcaccgcccgccggtcctccctcgcgctctcggttctggccgggtcgacgacgtttcgatcgatcgtctgttccttcagagggttcatcgttgaatttcctcttggatggatctctatcgcctcggggttctcgaggaccggacattcggttcgtacgtctttgaacaacctgattatgggtagtgaagccaaggaaaagaggaagagaaagagagagagaggtggaaggaaggagagagagcaagaaagaaagaaagcaaattagtggacagacatggaagccagccgaaagaaggaaagtacggacctggatgttctcaatcgaaaactcgatgatcaacgtctttttcatcacaacagatcgaccggacgcaatttgttccttcagttctgattccttctctctgagcttcatcaacctcaactcgagttcgcccagatcaaccggaccgcctgcctgcttgccgtcctttcctcctttcttaccggccacagccttggcagaggtctcctcgagaatcatgtcttcctcgtcgatgtcagaagcctcggcgtccgctcgaccttttcctttcttcttgggaccgtgcgatcggataggttcgggcgcggccacggcggtcaactctgccaatctagcttcgtccaccaatttctttgttcgttcgatcagatccccaacttccacagcccaccattctctcatcaggttctcgaccgtcgggttgttgttcgcccatcggagtgccttcagtgcatcctggtgggatctcatctcgaggaaaccgtatcccttggatttaccttcgccgatcaacgagtccactcgatcggtagcccggacgatcttggcttgaaccaccaccgtctgccgttcggcccggccggccttcttcttcttcttgggatcctccatcgacttgagcacagcggcagaaagagtgccgtcccgtttctcatcctcgtccagatcttcccgttcgcctcgaccgacctcggcatcgaattctcgacaagcatggatcgccaaccgcttgagcgttcgatcagtacagaacgtaggcagctgtcggatcgaaagtcgggtctttgagatgtacaacgacgggttcgaagaaagtaaggtctttcggtcgttgaatgacttttggcgtttctcgagttcgatctcggataatgaggccgcggcaggggagttggcaaagatgactagaagggaaagaaaggaaaggaaaaagaaacaaggtttcaatggcgagtttgataaggtggacgacaaaaaaaccaagagactgacctccttccctcatcaagtaggtgtttttcttatcgaccttctccttcctcctctcgttctcctccttcatcttcccagcctcctccctggtgacagcccagtcgacgtccaaaactcgtccgttgagaaccatgttggaagccaaggaagatgacggatcggccgtcaggacggaagagagcgtgaaggggttgctggcagcagctgttcgatctttgacctgtgaggcgtcaacgaatcgtatgggtcagtatcaaaccgcgcaaagctttaacaaatataaattcgatgattttaaaaggtttggtgaggggaaacaaaaaaaatcctgaaagacaacacgtacgggcacagagtttgcaccagaaccgcccatttcggaagccataagtctagcctgctcgacagctttctctgcgtcctcctttcgccagaagcaaacgaaaccagtccctctggatcgaccagtagctctgtccatcgtgattcgggcgtatcgaaggtttccaaacgttcggaacctattggtaggcatcgcaaatagaatcagtcatcaacacttaatgtggacatcagaggaagcgcgccggaaaaaatgaaggatggggggagggacaaacaggttgcgcaattcatcctcagtcacttcgaacgagagatttctaacaaacaaggtggtctgatcctggacttgaggcaaggcgggcctgacgggttcctcatctttctctttttcctcgtcttcctcctcatcgacctccatgactccttcctcggtcttctccacctcagcctcggcctcctccgtctcctcctctacaggctcctcctccttctctttctcatactgatccttgctcaaagcccaatccacagcaacctctctgctggcttcctccttgccgtcctccccgatgacctttgttccgttcacactctccattgccttctccgcgtcttttcttgaaagcatccagacaaaggcgaatcctctcgctcgaggtttggggttggggttcgcctctgtcggctttcctggaagagagggaggcagggtgattgagtggattggaccatgaggcaagaagagtctctgcaaagtcttcaatgtggtctggtttatcggaaagacaagccaaaaacgtcggtcaggctctgagtgggctacgcagcctggagactgatatcaaattgaacgtaaggataatgcaagagggaaaaggacttacgtcccaaggcaaatttcgaacgatcattcgactgttcttgtgcaccccaccatctttaccggtcgcagcttggatcttgtctgttcgcttcttgatgacacatgacaaaatgttgcccaagtaatcgtgggcgtgtagtcggatggtagcatccaacgcggctgccgggcttggcaagagtaaatgagctacaagaggaaaaaatccgaaacgaaagcgagacaatcagctgaagccggatttgaataaaacaaagaaatcccagaatatgaaaacaggtaagaacaaaagcaaaagctgtagtgctcaccaacggtctcatcgttatccacggggaatacgagatttcccaactcggacccagcgacctttctgatcttcttccatagcttcgctttggttaatccctcggggatattgctaatgacaaccgttcggatcgcgtccgagtcgtatcctcctcttgagccagaaggcgccgagttggtgggcacagagttggcagacgtcggttggaacggagtggtagggaaagcaggtcgtcgcttggtgattcgctcgacgggaggagcaggctcggtcgatgatgggtctgcttggagaggctttgagagtgacacagtgatttatttttcgatttaatttttttttttccaaaaattcgctcgagcttagctcagtatggactgacaaagcgttttcaaagcagggggaaagaacaaaccttcttctcggcaagaaccacacccagccttcggtcctttccatctccaaaggaacctccatgaagctccttgacggcacgctcagcgtcctccttcatggcgtacatgacatatccaacacctttggactttttggtcgtcttgtcgagcacgacgaatgcagatcggacgggtccgatatcagaaaaatgagttgtcaaatcggtagtggtagctttatcggaaacgattcacgggaaggaagacaaaatggagagtatgaaagttggaatcatcagcaaagttgtaccctgtgtgagtgagtggttgattgagagcgaaagacaagagtcggacagaccagagtaaggcaagttggagacgaaaagagtacttccaacaggagccgaggaatcatcctcgatgaccgccttggcgatctgtgtttgatccatgtttgctgtggtggctaggagggttgaggtttgatgagcaccaaaagttgaggatccggaatacaaaattttgtaatcttggtgggttgattgagtgatgcacgtgatcgttagcgtctgaaggcgcaaggcggacgttcactctagaacgccaacttgattccttccttgctcagtcaatcatcatatgttgtctgaatagattcgtttgttggaatactagactggtcagtcaggtagaaatctctaggagactctgtttgaggttgtgttgttgctttcggcgatacagatatacatgctgaaattcgacgagtttgatctctggttcggctctcggtgcgacttcctttgtcattcttactctcctccaggctgatacaaaccttggtcttcaaagacaggtcaagcgtcatcacgatctccccatatgggtctcccaacgctcccactcgagatcctgtgccatattgtgttttatgcgttccatctagatgagccgctgatcgtatcgagactggcgacccggtcaaaaccgactgaactcttggtcctgtcgaaagctcacctggaagcgttcgagccgttgctctaccgacggatctttcttacctgggcggtcgactacgtgacgttctatcatccgttgacgggcttgttcaacgatcggaagcatggcgctcgccgagcgagttacgtacgcgaggtgtgctgggacccaagtcagcgcttaccgttaaacatgcaggcttactcgactggggcgagaaacgaggatggtagcctaatggatccgtcgcgtgtgcttttgccgttgacgatcgttccgctcagctcgctcgaccatgtatgtatactctccacgaacccgatccctgtcgacccgagtgaggacgatgtggacgtgttagtgagagatcaactggcttcgctctctgctaggaggatcagcccggaagtctgggacgatgtgtatgagcttgtgctgggcgaattttcgatgaaacaaaccgacgaatccttcgaggctcaacaagaactcatccggtcgttcgtctcggaaacgggactctgtctgcagttcagtgtggacgcgttgacacaggatttattgttatccgaccatcgttccgtcgacggttggactgacggttcacctatcaaccgtcttgttggaccgcaaggtcagattcatatccgactagaacctcatccgccatcgacttattctgcttctgaacaactcggcgaaccggccgaaccagaagatcctatagcgaacgaacggaacaacatattggatacattggatgaaccggtcgacctggctcggaacgagcacatgaagagaatgctctctccgatcaaacctttcgttcaggtatacctctacaggatagcgccgcatgaggtgggtcgtcctgcggatgatgatgatggcaacgaccaggaggtcgatggggatcctccgaggtttactctcgtcagatcaaacggttcgctgtacggtctcttcttcttgccttcctttcattcgttctctgttccttatgttgcgtcatttgctcacgtccccatcaaccgtctgaacgaaacagccaaccgattcagtccaggtctatctagatgcaacacgaggaagaccgagaagcaaacggaaacattgacaggaaccggaatggggttgttaactgtcaaagactaatgtgtccgtgtaattatcatacagacgttcaaagagatttctgttaaacatacaacaatctacattcaagtaaagggaagagcacagacggatcgtatcgagaagggggagatgtctatcgagggagaaataataagataaggacaggaaaggaaagacatctgtctgggaggaaaaagaaaagctaactccgaaggctgaagagccaacaggagaagaaaagaaaagaaaatgctacagaaagaaagtctgatgggaaaaagaaagaaagcaaagttccaagactgaatatataacaaacccaacagagctatatttgacagtaattcctatacccaaaaagaaagatgagatatagatgcgacgtcctaaaagaaggaagaaaaagaaaaaggccggaaaagagaacaaaaaagaggcaccagagacgagaactacgatgaaccgaaagcacttcaagccaacatccactcgatcggtctttccattatgtcgacctgttcgacacaaagtccagctttgacccatttgcccactctgctctcgtccagttcaagctccatggtacgttcgctcgggggagtaagcggatgatctgagagtctaatgtgagcgaccggaaagttgatacctagttcgatgaacgagtcgttcaaattcagtgtcaagcatggatctagcgccaaaggatcatcgatggtgtgtccggtcagatggctgctgctactactgctgccattggccaagcccaagcccaagccagatagatagtcaacttcgaccgagtgatcgatggggatcgaaaagtaatcatccgtgatcgttccctcgagagaggaaagcatgatgggcagatcaacggaggacgaactcgtggccggtccgatggccctactgtcgaaagaataggcaggcgagtaagacaaatggccgggtaagggctgggtggcctggttgagggagatgacgtcgtagaatgagagcgcggtcgacattgattcgtcagtgccaggctcaagcatggatcttggttccgacgttggggaagggtatacgttttggtccgaatctctgtcgatcggggagtagtatggtgattcgaggatcggatagaccagcccagtatttggttcgtactccgaatgggatctttcgagggaaatatggccggagcaaagggcgttccgtctgcttcgctggtttggcatcgtcgacgagtggtgtatgggtgtctattgggtgtttttttttcgaaagcaagaagaagaaaaacaaggtaagcataaggaaacagtggcaagtatagtatcggacagaaagataaagatgtattcactaaaaacgcgggcacaaccttctgcgtgtaaggtctgggagataaaggaatcgaaactttcggtcgatctcgtcgccgacggatcgtcaacccgttcgaggcaggactcgatgggatgggcaacgatgaactggccacgcttgctatcttcaccgagtttgcctttcgcctcgcctttcgttctcgagtggccaccttgtcttcgaacggcacggcctcaaaagctgtgggagatgcgcatcccgacagatagttagctcaatacattcatccgcagttcgacgacacggaccagagaaacatctgtgactgaccacaatcggtcttccctgccgctttacatcttgaacaggccccgttatctatacttccggaacattttacttttctaacggaggaggatagaaagtgccgcgttagaatcgatcgacacagttatagatcaaaaagggaaagatggagggagagaagtggcagtatcagttgagctggttgttgtttgtgttttgtttttggggcagggaatgtatgcattgatcgagagaggatgaaaacaacagcgaccggggtgacgatgaagaaaggaggaaaaaacgtctggacggggagaaaggagaagtagatgatacacaaatgttatggacaaaccttgaacggcacaaggtgcaggcctggttgactcttgatgttgagctgactgcagtgttcgtagagaagagatctggcaggccggatgagatcgcaaaggaaagagacgccgatgccgagccgctgggcgaaggcgatgattctgcagatgcaaatggcgacataggagcaaggatctgtcgtgagtgagtgagtgagtgtgtgtgtatgtttgtgtccttgtaatagtcttgctagcagagccgaaggaatgagtggtttagaacgaaggcgcgaaggagagcgatttgaggacaagacggccagtgggtacagatgcgactgaaggtagtacctcttgataggatttattaaagagaagcgagctagatccgacaagagtcgaacgatgtcgagaaagatgagaaatgatccgaggattaaacgaatgagaggatgtaaaacaatgaaagaaaaagggaagagaagcgagagtatgtgtatatgagagaaggagaagaggattgaatggtatgcacggatgtatgctcttaggttttgtttatcacccaagaagattgattgtgaaggaagaaagtttcccgcgctatcgtttctcctcttttcttttcttctcttctacatgttcttcgtttctttctttatttttccttctcttcatacggccccatcgttttggtcctttcatgtacaccactggaatggcctccgatccaccattcgcttccgtgttctgttcggcgcggtgaaaataagaaagattactgcttcttatgcgagaatatgagtgaaacgcgcatgttagcctcggttcgtccagctatgtgaaacgaatagcattcataagcgagcgagtagagcggcgttttagagacagcctaattccagagagagacaagccacatttaggacgaatggcaaggagaacttctgcggctgcgagcgctaggtgtgtgccatgtctttctctctgtggtgtttgcgcttacctcttcagtctcgttcccgcgtgttctctctgtccatgtatctctgccagtgtgtgtgtgtgtgtgtagnnnnnnnnnnagacagatgaaaatagtctatcatcgattttcttatccttttggttccaaaaatgattagagaatatcactaaagaaaagagtaccgaataagaattacccgatgatcgagaagaagctcgtgattattaaataatatcctacccggccatttgacgaggcccgcacaaacacaccatctaaaacgtgtcaagtagacttcgcgtttagtctcgccgccagctacgatcggcgagtttcatagatcgttcatgtcgcaatctaggcttttagttctggactttcatatattgagttttggcccgacagacaaaaagcgcagcgtcaggaattgggtcccgccgcctgagggcaacaggaggaataacaatagtacccgttccttcccgcgacctgatctatccgttacactcgttcgaaacatgcaaggtgacacatagcgttcgacgcgcgaagcaatcgatagccggttacctcggtagtcagcatctcgagaatgatatagattaatccgagcgtacacagagagtttacatgcctaaaagataagcatcgggtgtgtgagccttaatagctcacgcgcgaagcgtatttctcagatagtatcgatagagacacgtgctcagacgacgcgtccaaattccaacccactttctgaattttcctttcgtcaacacttactctgttaaggagaaaagagactctctcgtcacgctcatgtctcacagttcagctcatcactggtctcattctcattctcatgcatatccgcctcctagtgtttcagtagatcaatcggcctccttttcctcgtcgaccttcccagcggaagaccaaccatcacagactgaaggtggatactctgatgcagaagaactactagatcaggacgtcgatgacaatgacgtcgtcgacgaatcaatcgacgaccaagagtcagaggacgggtcggatgaagctctgtcggacaccgggtttgaagacaagatggaaagccagctcggactctggaagccgaccgaacaagaattcaaggcaaccaaagacttgctcgtcagctgggattgggaaacacaaactgtcaaaggtcggtcatcccggcttccgacatccagtgtgataaagagtatactgatctttcgctatttcctcaacagaacccgatcaaggtcaggtcggaactgaacaagaactcgttgcggtcgctcacaaggcgatgcgtcgagcactctattctctcgaccgggatcagtggagatatgacagctggccggctgacgaacaaacgtttgcccctccgttcccgcatcgtagccagaggggtcacaaccagagtcaaactcagggtcagagtcagggtatctctgttggtagactctaggttcggagaacggctcgaaatgaaacggtgtaagctagacgtaaaatcgtgcgatactctgacgagacggaatagagtacgtgatctctcacctcatctcgtttctatcattttttctctcttagtctcttttattctctatctaaaacaactggttaattgcctttcccctttctcccgcacagcgtcctagttcgaaccttgatggccgtcaatgaaacgaaccctctaagatttgccccataaagattagggaagattgggtcctagatcattcttctgctcaaatgtcccagaagtggttcgatgtccaatcagagtttctgttgtttcagtagtatctgcctcacaattatttggggccctagcatccttcgatttctgcaatttctatgatagaccaaacttgttgtgatttttaggagacttgttattttcatgaaccccttttatgaaaagatgacaggtgtctgtacgacaatcgtcaacataggctaactttcctcctcgcatataagaaaagcctttccccagtgcacacagcatggtctcgggttttctcgtggcttggttttcttcttcgccccttctttttgctgccttcgtttcacttttctcctcgatacttgagatgttatcctttcctttcttgtgacatttcttgtaaccctctttcctcgat

SEQ ID NO: 153 - DNA, 44722 bp, Xanthophyllomyces dendrorhous
ctcatcgagcagcttgaaatgttgatttaaccaacttccctttagtcttcgattggtcgtttttctctcggatgtactttttatccattctctttttggaatgtgaagtttctcgatcgtttggccatccgtccccattagctcttctgtttgttgttgttgttattattattgttgttgtttttctcctttccctcatgatttctaatgcttattcgatttttgatcgtttagtttgatattgccactgtctctgttttcactgctgtctgttgttatttttcttcgaattttcgattacccttttcgcctagatccgcttaattcgactctttgaccgagccgtctccccgaagtcttggtgaaattagattcacaatgtgtgaaaacttaaacaaaggaagccgagaaatgaaagcaaaaacaaagcagagcgaggcaaaggacgctgctagccgatctgtgaatgctgtaaatcaataagattatgacttaaattaacatccacaacaagggccataggaagaagaaaagaatccgcaaggaagagaacagaacgagggtctagaaagacaaaaattgacaacggcgatttgattagacattcagaaggatctagtctcttttttccatcgagcgctggtttatctgggctgatcagccacccaccaaattcacccgaatttcagccaagattcactctgggccgatcaatcgacggagaggaggatagattcgttttctgacgttgtttttctccgatgggatcagcgtcttcgatttcagttttatagataatattaccttgttgcttgatcggcacgaagaacttactgataccatatgtcactcttcggacactcttggctttcttccgaatcttttcaaaagtcttcctacccgttcggctcggtctcggtacacctccatacattttgttcaaacccttattgtctttgtttgttttttctctttgtcctattttcgttctctaacacatacacacacacactctctctctctctttctctctcatcagcccactgttttgagtgttccttgacgtttgaagggggcatgcacaatgtgccacgtgctctatcacgttcaaagtctcatcagaagaaaaatcagtcatttttaatcattgtgttatgtcctctttgctctactccttccaaagtctatacaagaagcacaaaaagttcctctacctctccttctcataagacggaagccagatttagatgcttagatgttgtctgtggatgcatcattcacggaagacaacaacacgaaagagaaagagacggagaggtcagttgatgttttcctaaagagcagaagaaaagagaactgcaaagagaacaaaaaacgaacagaatacactggtaggagaacccggctgggcgtcatccaacaaagcttggctaaatccgttctctccatccttctcaaccccactctccaacaaggcctgagcatcctcaacagtcatcagcttagcggaaaccaacttgagactcttctccatatgaggcagcaactggctaagagtgtcaatctcggagaaaggaagcgttcgggtgaaagcggtggtagctccaaactcagcgattcgtttctgtacagtgcgagtaaaaatctctctagtttagcacgtggaaatctcgctcgagatttggaaaaaatgaaaaagaaagtcagacacaccttgagagtgatggcgtagggcatggccttcttgttcttgatcaacccggcctcagtcaaagcgactcggaccttgacatcatcaacactgtcggtcttttcatcatagctagacttcacggcctcaaggaccgtgttctgccaggcaggccatgtctttgcgataaacaaccgaagtcccaacggctttgacttgtcaaccaccgggcccttgcccttgcccttcttcttgtccaatgcaatctgtcggtcccgagtatccttaaggacagctcggatatactcaattccgttgatgatctccttgtcgatcggtcggatctcggggaagcgagctttctggatggagctcgagttttgaagcacggtggtccagaggtgatcggcaaagtgagggatgatcggggtgacgagcaaagcggtgtatcgaatgcactcgagcaacacatcgtagtgcatgcccacatcggacgtcatctcggtgtatgatcgtcgagcgttatccataccatagtatccgtattgaagagcctccttgtaccaggtcttctcgtaggcatccttggtcttggcggcaagatcgttcatctcctcctcgaacaccttgtcccagtagctatccttcggtccagttcggagcgcagatttgttagccaaagtctcctcgatccaggcaagctgggtgtagagtcgctggatagcagagttggcggtgagctcctcaaagttcgcgtcctcaataccgtctccggcatcagccaaagtcaaccgagtggcatcagctccgaatttcttgacagaatcctccaacgtcaaactgtttccggtactcttggccatcttctttccgttcaacatcaagtgtccgttcgctcgcatcgcctgaggccagtggtgctccgggaacaaggcggcgtgaacgtagatgcagaaagtcaagtggttcgggatcaaatccttgcctgacgatcggacgtccatagggtagaaatactggaactctcgcttgagcttatcaaatgtctcctgggagatgttggaagaagcggggaaagaaccggagccgagaacgtattcccaagcctcgtccgtcatatccgcaggagagatcccggccggtccagtggtctttccagtgatatcaccacctggttgtcaaacaaaggggttaactgttgggtcaatctcgttcaaagaggccaatcattgaaagaagaagaaaaagaggccactcaccctgaagaaggtaggcaacagtgtagtaggacatgtagatggtggaatcactcaaggactcaaccaagaactgggggtcccaaggaattcgagaaccaagaccgtaagatcgggagcaggcccactgcttgagccagtcgagaacaccctcaaatccgttccgggtctcgttgaagtaggtgttcatctgagacaaaagcctattggtgcgaagaacaagatttagcaaagtatagatgacatagtcaaacagctcaatgcaacatttgtattgaaacgttgactcttacctcttagcagtctgcttccactcctcttctccgtaatcaatgtaccactgatctacgagcgcgacaatgcactcgtcaccacttcgagaggtgaccaaactctcaggctcggcgtacttgaaggccaaattcttctcgatgagcgagtccctgaccttggtcttagccgtctggacagcctctcccttgaattctccgatggccatagttccattgaagaagccctccttgtaggcaatatctttggcttcggcaagctgcttgacatccttctgggactgaatcttcatctgctggcaaagtgtggcagcgatcataccaccgtagttgggagtagtgatgaccgagatgggctcgttggaagcccattcaggctggatcttgtagaattcagccttctttcggagatccattaaagtggcgtaatcgtcaggagagtcagaaggaaccgaggtaacaactccagtaccctatttatgaatatcacagtagcccagacagaacagtaatgagagcagatattgagtggtcaaatctttgactggaaatgtgacaacaagactaagagatgatgattataccttggtagcaaggactccgtccataggcaagacccagacctcctcgtagaccgagtgaggggccttgattttagttccgacaagggcatctcccttgatctctccaagcttattgatcttgccctcttcggcaaagattccctggtaagccatgtttcgggcggcccgctcagagataataaatacctcattgttggcggcctcgaagaagccataggtgatgttggttccgacgaaacagttggtctgtccgtacctagaagcccaagagcagcgagacaccgagtcagatgtacagttttcgagcggcaaagaacacgacgagaacgaaagagagatacgaacatggtctcgggcctcaaagtggcagcaaccatgtagaccttcttgccttcgatgccctggagtccattcaaaacctgcttggcagcctcaggccagtgggtaacctccatcttgagaccggtgtactcctggggcccaacggcctctccgccagaacggtcgtggtccatacagggctgtccgtccttgatcgagtagatggtgtttcgcttaccgaacttgatcttcttctgagcgtgtagcttgttcatctgccatcgaacaaatgagtcgtagtaggggttctggtcggtggtctaatggatgcagaagacacaagatacacgcgcgctcttcagcaggggtattctcgccatgcggctcagatattcagataagaaatactgacgatgaaagttcgtcgccaatcgattcgagctccgaactcggtgcaatcctttcgagcgataggagggaagtactgaagccagtggagaggatcagcaaacttcttgatctcctctcgaggaacacctagatatgaacaaacacggaaccatacaaagatctaagtagatgccagctttagaatttgaaacgcaaatattgatcaacgcaccaatgctctccataatctggaactggtaggtcaatccggtagcctttccggcgatctttcccttagtagctttcgatgggtctttctgagcatcagagaccttgttagcagggggaggggcggccgaagcctggggaacagggttctcagggtcgtaaccctcgaactcaggtccaaacatttccatttctcgaatgagcttatcagcagcagcctagagacgaaaagagagaaattgttgaaaccaggatcagttttgaggaagacctggcaggaacgacaatgaaacccatggagaacagaacaaaccttgatgggcatacccgtgcagtgaagtcccatagggaacaacgctcgcttgccaagcatcctctggaaaccagtagcaaactcgatcttggagatagtgaacgcgtgtccaagatgaagggatccgttcatgtagggatagctatcagaaacaaacgacaagaagtgcgctcttcgttaattaactgtcgcctttggtctctctgagaaaagacgagaggaggagagtgatcgacgtacgggaaagttcccatccatttggggtgctcggcctgaatttcactaggggtaagctccttagagctgagctcttcgattgatggaggattgatctcgaagagcttctcttcctgccaccgagcctgaagatccttctcgatcttgataaggtgatctcgtttgaaggtctgtggtcatcgatatacacagacaggattaaagttgggatcagtgtctgacgagaacgctttacggatgcataaggtcgaccatctgttcagctcagcaaaatgaaatctcaaagcaacagctctcatccttctctgacgccatcacacacggccaacctgattctcttccaaaactctgccacaattaccgctctactgtattcaagctcgataaagcagcagcagccaccaatatgaagagaaaaagaaaagccagaagagaagaagagaaaaggacggagggaaactccttaaagatggcagaaaaacaagaaacatccaaagaacaagattgattagactgtcacagagaactttcagtatgactcacattttccaagacgagaggtccgaccttgactttatccatcatgtcgaccttggtgttagaatcggccatgtttgcgtatgtcctctgagagtgggtgtgactggcaccgtaaatgtttaggcttgagaagattaggaaccgcggttttaaagagcggaacgctagagagtgaatcgtgacagatagaatcctcggaggtagtgaggatcagagaaggaaagaaagaagagactttcgtcgtatctgctggaggaaacgaaaaatgggagaggcgaagaaagagggtgaggaaggccttggaatccaaggattagttatctaagtatgtaaaatcaaaaataaaataaatatacgacggccactctactcttccagaagccagcattcttccgtagctctactttcagcgcttccgtcgtctctgttaacatggctgaagccgtattaaggatcgtcattgttctcgtccgtatcgggcgagagaacgacgtcggatgttgcagagtgacctgctgagtggtctatcttgattgcaacttctgggcgcgatttcgagtctctgtacactttacgagtgcgagtcgtacactctaaaatggcaggagatagaacaattcggaagaggaacggagtaatgattggaaagattcaattgatcaagaaaaaagaggtatagttcgtacgcgtagaaggcgcgtcacatgataaatgggaggtagcctgaaagaaaaagaagagaaaatggaaatgacaagaaaagaggaggaaaaagagattatggtcgatgacgccagagcagccttgaagattgttgatgagagagcaacaagatgaacaatgaaaagggtgagaaatcgttgagacagcttggaaagaaaattatgaacgatgttcagatgaaaacaaagaggttgagaatgatgaagaacgaaagcaagtgtcaaggaagttaacgaagagaagaagaaaaaacgcggagtgtattttgttgtttgtttctttccagatcagaaggtctcatcctcgtgaagctgaccatcatggagttgttcttctcctacaagctcggcatcagcgggcacctcaaatccctcctagatttgtgtgcggcaaatgtggtccattggaagattcccaaaacaacatgcgagaaactcttaaatcagtctccggctgcggacaaacagaagagcatatgaagccgaccaccagtgacaagaacgaacctctgtagagtagagaatctcttgaatctttgaaagtgtagccttctcgagttctggagttgactcgctacccaatttttcctggacaatcatctcgatatctcggagctgcagttttgttgtttgcacgatgtttcgtagccaagacagacgaaatagaagggaaaacgagatttttagtaactgactcgtgagtcgcactcagcacaacgggttacagattttaccttggcaaagtagaaatctctctctgtctccagaccctctaccgatcctttcaactcgtttaattcagccgtgagcgcatgaaccctttcagcagcagcgccgctcatcgaagatccaggccgcaaacctgagaagaacacgacgaaacaccaagccgtatggacgcaacccagttagttcggtgaactgacacgctcgttggggtttcgcttgcgcgcacacgtatctaccctccatccatgcactgtctaaacctggttcaagaaaaagattggggaagtacgtaccagcagctttggctctcgcgccagaactaccccccagacttccacttgacctggagataggggcagaggttgacgtctgtaacgccggtacatctccctttctgcggccagcggcgtcgtagtgccctccgccaaaagattggtcgtggaatcggcgaagccactggaggaactcgaggttgtcttgcatcttgcatttgaccagtcggtcaactggaataggctttaagccccaatcaagagggaggaatggagttattttagccattgtcatgaaaagatttatatcagcagatgggtcactaataacaacgggtggcctgtaggtatagactgaccttcgcgattttgtgatctttgaaagtcttttgcagaaccttgaagttgtttaggtactcgtattcctgcttagcagagaatttgactctgctcataggcacatcacctgaagatcattttcagacagttggtgtttaaatatcgttttagtacataccgttttatcaatgagctgattggaaagtgaaagaatgaagctaaccaaatatagagtcaagaatctgttgaagaattccaaacgacatgagtcggtaaatccaatgttagccagcgagctcgtagtgacaaccaacgttcagattgaggaatgtatcgtagaatcctgtctgaagctacaggattaacccaaaagtgcgaccttccgactgacaggcgagctggtcaccgaccatctcatctgcatccgtgtatgctctttcaatcattcatatactctgcgttctgagttgaacttctaataatgaagatcccggagcacaacgtagacagatctcaagacgacacaggatatatgccaagctcggtctccaagtgacgcgaagaacaggagagtgacaacgaagcaggtcaagaaagagggtaaaggtaaaaacgaacctgacagtaagccgctccggttccaaactgttctaccttggaataactaatttgaaggaggtcatttgtccatgcgatgagttctgatcgagctagatttccgacatacaagccagtgatatttaagatggaaagcagcttgttagtttccataaatctacagaaagggaaaggaaaacaaccaagaagagtgtggccctctttcttcttcgttcaatctcttctcttcctctctcctttctagtatttccagagaagatttgaactagatataagaaagatacttacattctccagccatgatgcccagcgaatgtgtagagtacaagagaggaggaaaaagaaggctaaacgaattgtgaatctttggtgagtatgtccaacaaacaaccgtatgttttcctgttcctctctggagacaggcggcggaaatgtcttacaccatttacagcgtgttacactatttcccactcataagcacttgttctcctgatacacaattcgactcagacacttttggaggcagttcgtcacagaggatagtatatcaaagtcacatcacatataaagagatacccagaaggaaatgcgtaagggaaagacaagagacagccttcactttctagttatcgtagcctgaatcaatccactaggcgaagccactggctcaaacacctctaccaatccttctcggccttttccgttctcgaggttgaaaggtttgaggttcacaggcctgtttccattgagtattcagaatgatcaagaccgatcagtttggaactatcatctactataccagaattttgatgtagagatgcgagacatacatataatgcttgttgggcagcgaataaaagacttctttgattggagaagctctagataggatagtctgagcggctcggtaaagtgtagccttaatcatgaatttcagaaacgcattagttatgccggctgcaggaataagtaaaactttaaggacatacctgaacggaagccgagtcgtgcgtcgcaaacacctcaagcgtagtggttcgtgctgtgctcgccagctgatgatgcacattggaaaatcaagatgataagcggaaccgtgggcaagataaagaaggtgtcagttagttcctttcagacggggttgagaacattcactgaaacctaatcagtatggttaaagggaaacaacggaccttctcgaattgcacctccgcgccaatcttgtttagattatcgatagtgagcgggatgtttggtggaagcgttacagtgtaatcgcaagtgattgaagtcgagaaaattcggtcgtccacctctggattgattgaggttcaagaaatatgcgcgaaaaatggaagaaagtcaataaagctcggttggttggagatgaagcaaaggcagaaagaaacgaaccaggcaacgtggtgaattcgtctcgtaaaaagttggtgaaagaacttcccgccgtcttcaagaccaagagatctttaactccactcttgacgattgctgtgatgtcgtccgttgatgttccatcgaccaccacggatacgacacgcttctcgtctccgtctcgaacgaaagagtgtgggtgtgctccgatatcttgaacctttatttcgaaagaaatgcatgaagtaagatacaacaggtcagtatctacaacgaacagtgaaacgctatgtatacacatacatcgattctagaccatcggagggattggatatcgatgtgggccttctgaatgtgactgtacttctactcagcagaaccgaaattccatagatggcttccttatcagtttctatggatttgcccaagatttagagcgataccaaacaggacgtacagtaacgaaatgagttccaagatgaagagcaaacaactctggggtcatcacatgaggcgagacctttgccatgatataggtagtgttcttgactgttctcatacatacaaaagatcttatcagaggagcatctttcgaccgagagacaacgcaaatcacttgtgatgaacaacgtactagaatcagtagcaacgattcgggtattgtccgcagcgtcgtagctctcggcgaaatcaccttcgagaagagctcgaacaacatactcgacgactgtggccagcatccgttcgacaaggttttgcgtcagtatgctgagagatcgaataaagatcataggcgagaatagtctcaccctcttgtttagcaggcttgccatctgcagcgggggttcgaactactctggccactcggacgagatcctttccgtatcgagcagaggaaaggaaaccaaggtcttcttgagtatcggacatgtctgtttgtttttggtgaagagtggaaacgtgatctagttgaaagttgtaagtgatgaatgggataaggagcaacgaaaaaagaaagaaaaacaaagattaacggttctatacaaggtgtttaaatgaaggtgaggatagagatgcccgtttggatcatacgagataagcggaggacatggagagctccgttgaggccggagccgggagccgaaagataagatataaccctaactccgagttgcctctctacatgaagatccctcggtcagcaaaccttccatcccttccaatgacatccgacacgtccggatattccaatatattctcagtggagttcggagaagtgataggcagtcgttttcgtttttagaagaatatggcttgtatcatcaaaggcagatacagtgagatcagataggctcagtgatgagggatgagatcaagacgtgagctacaatacggaaaggaaaatacagcaaacctgaatgtatgttatttgagtaatgcagtgagcaagaaacaacacaacagcctcgcgaggtggttgttcactcaaataacaacaatatgagctccaaatatgatgccgacacaaacatggacgcttccttagaatagggtacctagcagaatgagcctggtgagagaacacagtcaatgcagccaacgaccagacgcgctttttcggactgacgcgtcaaaggtacattgcgaccacaacgttcaatcagcccacgctgttctagcaaggacacctcaaacatggctatgctcaataccatctcccctcctccagccgtgttcctacagcctaggtgccagaagcatcagttcaatcgaccttcatcgaagatatccctttccaatatcgtcgagcgcccggctagacttcgagcaatctacgttggtatctctgctgccgttgcccgacttgaacacctcgtctcaactcagcctatcaatccaattgaaatcagagtcgagcctctaaggtcggatccatcttccaccgcagacagcaaagaacaggacttaatcaatcaacttcaaggcctaaacctttccacctcttcctcagcgccttcgtcgattctgccgctcccctcgcctctctctcgaattccccagcttgtcttttctgatcctccaaccgacaacttgattctttctccggcggtcaaattcattcatgctccctcaaattccaatgttactaccggaaagatcgaagcaaactatctcgaaaaactagtcgaatgggtaaagtgtaccgaggacaagatactcaaaaaagagagtgaaataccagaagatctgcctcagttggatctatactgtaggtactgattcctctctatttggtcttagtctgagtcgtttagagaaggactaaataaacaggtcatgaccttgtgtctcgacagtatgctcagaatcgcttgaagcaattgaaggcgccttgtcaaccgtcatccaaagtgttgacctcgtcatatccaacaccaatgtcgagacacgaaccaacaaagcgccccttcccgaagaagccaacagcaaacaaattaagacaacccaagctttctgtgctatccgtccgcctggccatcattgctctcaagaaactcctatgggattctgttttgtcaataatgtcttggtaggagcggcacatggtgagaacatatcatttcgaatcttcggtcgcacgtgctcggaagaaggaataacaacagctcatatgcgtgtttcgtttgtctcgtcgaatggtttgatacttagctcatttgaagcacggaatagatcgagtgatcatccttgatattggttcgtataacatcccttacgatctccgcgtccctcgacctgcctctatgtcctactaatctgatgctcactgtctgcttgttgaacctatgcgtcttctcaatagaccttcatcatgggaacggtactcaagacatcatctaccgaataaatgctgagacacatttagaggagcttctggtagccggcggcaaaccgccgagctctacagccagaggactcaaattcttctatgggagcttgcatgatatcgtaggtgtcaatgctaagagctatcattggcagattggtctctgatcatgcatcgactgacggaagatctgctcattcgtgattacctttgtgacggcaggaaagctttccttgcgaagatgggaatgctgagcgcgtcaaagacgcttcggtctccctggcggcccatggtcaatttatgtacgtttctaccgtaacacatcagcgaatcttttgactgacgatagaacaacaactgcatgtcattcttagagaaaacatccacttgtctccgtataattcccccaatgatttctatgatcgatgttacccaaggtacaaagtattactcgataaagctcaacagttcttgctcaagacaggaggtgtaccagagaaaacattagtgtttatcaggttcgtcatatcatactattgtgatggatcattccttgttattcagttcatccttttcacatcctctattcctaatttggtgtttaaatgctggcttaaaaatatgaatatagcgctggatttgacgcgaatcagcatgagttgcctggcatgcaacgtcacggatgcaacgtccctgtccgtatttttcttccttcccaccttttccgaaaagtagacagacatggctcaacctacattccgaactgatctgtcgcatgatactctaaaatttctcaccgaacaggtatcattctactcccaatttcattcagacacattcaaatttgcaaaagagcatgcccttgggagagttattagtgtacttgaaggtggctatggagacaaggcattgatgagtggagtattgagcagtttggtaggaatgacgctagaagaacaaggaaggttgaacggggaggactggtggagctctagctgtctgagcaaggtaaggaaaatcctctctgttctttcttgttctacatctcatgtcttggaacgtagctaaaatgatcagaccaaaatacatagcttgagaaagcgacccgactgccaacttctcgcagaacaacccgatctcaaccatcagctctggctcaaccaatcccagcgccattgacacctgaactcgcttctctgtcttggctaactcgatcactaacgattctaaactcaattgagtcccatccgagtttcccacaacctcctccgccgattccaaaatttggaggaatgagagatgtggctgagaaacgagtattgaggacgagaggagcggcagttgcgagaggggcggtcaaggtcgatgtgaaggctcaggaacgagtcatcacaacagatcagaaagaagagcatatatcttgctcctcttcctcttcctcctcctcatcctcatcgtcatcatcatcatcagaagaggaagaggaagagacggtcaagccaaccaagacaactaaagcggagccaaagaggatcatcctcgctcaaccaatctctgaattttctaatctcaaacttgaccccaaacccgactctgactctatctactctacatcaacaccaacgactatcgctactcagccttcaacgacatcaacgacatcaacggctgttgctcctaaacgaatcattctaaagtttcctaagccggcttctgcacccatacctgctcctgcgcccgtgtctgtgtctgtgcctgcgcctgcgcctgaatctgaacttggacgtcatcccgacggatcaagtcaacacatctagttcttatgattatctccattctgcatgagattaattgagtgacatcggcgttctttatacaaaggaaacaaatgagaaaagaaaggaaaggacagatggaccaggaacttcggactaaaagaaaggaaaagaaagacggtttcctatataggagagggcgacgatcaatagatgtaagaagaaaccaagtgcaaatagtaagagggatactgtatcgacaagtggttagtgaattgagacgtttaagttacatgcaatctgaaaggtatgataaatccttaaataggtatctgcagagaagaaagaaagattcggtaaagatgggaaaagatcattcgacgatgttcggtgaagaagagaaaattcggcagagtacaaaacggttgacttcagagagaagcaaagagagggaaggaagaggattctatcataatcgagtatacagtttcgagtgcttggacaaaaccactgacttgtatgaggaggaagaagaggatactatacctgattagacacttgtcgaagccagctcgtacctaagagtttaaacacgtgaaaatacaacaaacattttagaactcagccggataattgagagcagataccgaacaaagagagaagtgaagaaacaagaaaatgatagaataaaagaaaacaataaacaacttacgggcaggtgatatcttcaattgaggttcgatccgatcgagtgccaaccacgccaacagctttcatatcgattaccattcgaatgtcgaatgtagtcctgtttgtacctggatagatatgcgcacatgcatcgtagaatgataaccctgcagacattcattcgacgttgtgcttagtacgaactaggcccggtacgaagatgaaccaagagacatgcaaacaagtaacagaaactttgtaaaacacacaggtaggatccgtagagttgtaaccttcgtatgagaaagtgacattcatggagaatgggaacagcttcttggcaggcattgtgcccttccatacacctgtgccaacttgcttgtcggtgctcagatcatacagccgagcggtgatcgacttgaaagtgattgggatataagtcgctttggtgtcggctgtttatgggaatttagagtcaacatattgctctgcgatagaaatgaagaacgaaagaaacttaggataaagtctcaaaccttggaggttcaaagtggcgggaaaggtgaagttggcaggagtccgactgaatacagcggatgtgttgtccaagccggtagggatggtgaatggatccgattctgcccagctgaagctaggaacccgagggatgaggaagtacaacatgatcgccatgctagtatccgacgaacaggagcaaataagtttccaattataattacacatgagatagaagtggaaagagaagacaaacatgataatgaggacacctgtgctgtaaaggagcaactgtcttagactcagtccacaacaataccttccacgatcttcatcccgagtaaatgctcgccactttcgtttcctcttcagcgcagagtcttcttttcgactctttttggtcaagctatgtaattcctccttcttccatctgataagcagagcaagagtaaggattccagtcttgttggaagaacaagcggaaagagacgattaaagcactcactctgctcccagaacgggtacggttactaactccgagatttgcatctcggcgttgctcgccggctttccaccttgtgagaattcactagcagcatattttccataatgcgatctgcctctctcttgtgacggcaggagagaagccattgactgagatcctgtcgtggaatttgggccttttggagtctgatgaggttgaccagccccatacaggagcggtgtgttgtacattgacgatcctggccggctgctggtcggccttcaagattcgtatgaagaatgtatctatacacgtcaaggataaattcgagactgtgagaattctagcctgttggaacttaccgttgattacgagtggaagaaacgaatcgctcgccctcaatgcccggagcaaggtgtgaacgggtgttgtaccttggtccggcattgttgaaatctgttgcaacacgtggaagaatgtatataagtgagcgtgtatgttgtatttccggcatacacaggccaggcaaccaaagctggcctggacgactgaagagaagaagaaacgggaacaaaacgaaccagcgtagatatcccaaccatcgccttccccttctggtgcgccatagacttccctttcgtcttcttcctcctcctcctccgggtgatctctgtaggctgattgccgagtagactgaccaggccgattcaactgtgcgctttccggacgagtccgcacggacgaagcgtaatctttggaatgagggcgagaacgctggcctgactgtccagagctagcagagagcgatatgagagggattgaagccgacgggtcagactgacgatgagagttatacgaggacatgatatgtgtatgtgtgtgatatccaagatgtgtgagtacagaacaggcgagggaagagcaacagccaaggacaacaagcggccaggaaaccacgatcggtgactaccccaatttgacaatggttacaaatagatgatctcatatgtagcggatccgtaaccaggctgcataaacaaagaaaggcacaagagaagaaaacccccaaaagaggaacgtttccattcgctttcgccatctcttcttgctccaacccaccatctacttctcatcatgtcttcatcgtaaggtctttttcggtctatttaatctcatgggtgtctgattatgtactcaagctttggtcctctcatagtttcaatcttcagcacaacaagactacgcctttcgaaggagtgagtatctgtttttttctttattcagttcatcttttctttctcggtctccatctcaagtacataaatatatgtatactaatccatcttgctcatctctcacctttctagcaaaaacctggaacttccggtttgaggaaaaaggtcaaagtcttccagcaacaggttcgtagccgtcgctcactcattgtctcgattgatcatatcacatcgcaaacgataggtttcattcagagtgaaacatctacacgcggatctctacactcctttgctcatcactcaacaatcagtccttcgagcgtctcacacacgaaagaatgtcaactgatctcatttcctttgttatcaaacatacacatacatattcaaatcctttgctcgtatattagcactacactgagaacttcattcaggccaccctttcttccattcctggaggaccggagggcaagactcttgtggttggaggtgacggtcgatacttcgcccgagaaaccgtccagactatcgtccaaattgccgccggaaacggtgttagcaagctcatcgttggctacgactctatcctctccacccccgccgcttcggccgtcattcgacaaaggaaagccgatggaggaattcttctaactgcctctcacaaccctggaggacccgagaacgatttcggaatcaagtacaacatgtccaacgggtatgttctatcgctattcctcttgtgtcatagaactatctcctcaatatatctcaccattttcacaacagaggccctgctcctgagggcatcaccgacaagatcttcgaatacaccaagaccatcactgagtacaaatcgattagcattccccatgtaagtgtcctgaaaattatccgggtcatatagcaagttctcaataaatgtgttttacttccctatattcaaaggtcgaccttcgcagcgtaggtgttgtcactcatggccctattacggtcgaggtcattgattctgtagcagactacctcgagctactcaagtcaatctttgactttgaggctatcaagtcatacctacactcccctgctcccggtaccaagaagcctaccgtcttgttcgatgcgctcaacggggttaccggcccctacgggcaagccatcttctgccaaactcttggcctgactgaagcatctattcagaactgtgttcctctgcctgactttggaggatcccacccggatcccaacttaacgtatgcccacgatcttgtcgctcgggttgagaaggagcaaatctctttcggagcagcttccgatggagacggagaccgaaacatgatctacggcgctggagcattcgtgacaccatctgactctgtcgccatcattgctgactgggcccaggaggcaattccttacttcaaggatggaatcaagggtttggccagaagtatgcccacctctggagctatcgacctggtcgccaaggagaagaacttcgagatctttgaggtccctactggtacgcaccattcattgatcttggtctgtcatttgatgcatgcacacacaagcgcattcatctaccggtgtctatcatgatcaaaccgatctgaccactccgttgctgttatttaatcgtacaggatggaaattctttggaaacttgatggatgctggccgactttccatctgtggagaggagtctttcggaactggatctgatcacatccgagagaaggatgggctttgggccgtcatggcttggttgcagatccttgccactgctcaaaagaccatgcccggagctggtatcaccgaaatccagaacgcattctacaagaagtatggacgaagcttcttctctcgatatgattacgaggagatcgagtctgagcacgccaacaagttgatcgaccacattcggtcgacctttgaggcctcatccttcattggttcgtccctcaaggcaaccaccacggacaagacattcatcgtcaaagaggccgatgatttcgcctacactgatcccatcgacggatcggttagcaaaaaccagggactctacgttcgattcgaagacggatcaaggatcgtgttccgactttctggtactggatcatctggcgctacgtatgtctcttttcgttcttttcagatatcgtttcagtctcgttacatacctcttgtcgatgaatgactgattctttatcttcgatttctgacgaatagcgttcgagtatacctcgagcgatactccaagaacgagtccgagtacggattggatgcgcaggagggtctcaagcctctgatcgaggtcgcactctccatgtctaagctggtcgaattcaccggaaggaaggagcctaccgttatcactgttcgttcctgcttattctgttgtcaaacgtctgcatacgagcgctaatccgatctacctttttctcttgatagtaattcgactcgtctatcctgtgctttccctcctcttcatcagatttctcctctgtgctcttctgtaattttgacgactttctagctgcgattgtctgcacttgttccgctatattgggatttcgaatgcttaatggctgtctatctgaaactgtaacggtgcaacatatggaagtgtgacaagagctggaacaagctcaattacgcgcgaatacattcttttacctaacgcgtcaatcaaatatcgacgcgtcagaacgcgtcaagcctgtcaaccaactctcatttaacatctcactgcgcgtgtgctcattcatataccttctctaccgaccacactttccatcttctctaccttgtgcctccttccttggtctctatctaaatcatgtccaaagctaatgctactccaaaagacaaaaagcaaacaactcttcttggattcttttcaaaatcatcttccctcggtcctccgtcttcttccccaagcagaccgttatcgagcgcctcgaacctaaagtcggcaacgccttcgactctgactaagagtcggtcggttggtgggggaagtgctcttcctcatccgccctcatcatctcctctagctgcttcgagtgctctcaagtcaagacagacgaaatctttaagtgggaaaccgttatcatcgaaggatgatcccttcacgatcgatgaagtggaggacgatcatgatgttgagcctatcaccgaggcgaagaagacgattatgacggagaagctggagaaggacgagagaggcggcgaaaaagctttgtcagagacgagcagccggctaagtccgtttccatcttcatccctatctgaagtcgacatgaatgataaagagaagaacggagatccggtggctatggacggagtggaggaagatgaagatgaagagttccctgtcggacgatctgtcagtagaagatcaatctttttaccatctaatataacagctgaagtttaatatggattctgttctccgttggttctgatgttcggtcagcaacgagtcaagagaaagatcaattttgttgaatctgatctatctgacgcagatgatgaagaacctaagaagccaaaggcaatcactcgcaaaggtaacacatcttttgttgcttcagtgatcaacttgaaactcgataagctgaaaccgttcattggtaaaatgcacttctttcaggctccaagaaggcgaaggcagtgtcatctgatgacgagttcaaaatggggtccgatgaagaggctttactcggtaggctttaatttgtcaacttaacgctatcaggctgatcacagacagaagcctgacaatctctgtcgttttgatatcgtgtcttcttcttcgtatgcaatcgaagctgctgctgcttccgagtttgacaagtacgagccagacgactcattctccgctgaagacacacccaaggccaagtctaaacaacaaaagccaaaagcaccgactcgacctccacctcgaccgattcctagtggcacctcctcgagtaacacaggaaatggatccaactcgatgttgactgctgccgaacagaggaagcagcaaaacaaagatgacaagaaggcggccgaggactgttttgactttttgaagacgatcaaagatgtttgtccagctttctcgtcttgtttgtataccgtctatgctgtacgctgaatcggatcgaatcaactcgaatttcctattcgaaactaaacagaaagagggacacactaccggtgaggatttctttcttagtcttcatctggtcagactaactgatatgataacttatgacccgttatcctttcgtttctactttatgcgtcagatcatccggaatacgatcctcggacgctgtatatacccaaatccgcttggaacaagtttacgcctttcgagacccaggttggtagtctataagtttctttatagttgtcgtcgtcttgcttctctctgaaacagtcttgttgttttgaatctttgtttgatctcgtcatacgctacagttttggaagtaagttgttggtttgtttcatctagctctgagtcagaagcagcatgatgctcatatgcgtatatccggtcatttttttcttcttgaaaattatacagcattaaacaatatcactatgataccatcctgttcttccagaagggaaagttcttcgagttggtcagtctgtcttgcacaacggaacgtcaaaattgatacatacgtgaacctaattctctgtttcttgtatattatatagtatgaaaacgatgcggtatgttgattctgtaaccctcttgaatagtcaaaatgactgacaaattctttttcttataaacttgatcagcaaaccggttttctagaatttggattgaaaatgacagacagagtcaaaatgaagatggttagtctggactgagctctgatacacaaatgagtgtgttgtcggtgtctatattgatcataccattcttttgccggatgacaacaggtaggtgtaccggagcagaatttcgaaatgtggtatgcactatccagactacgccagtatctgtctttgtttgcaaacccgccaattcaagactcagcgctgatcgtcttctcgttggcgtaatccgcgctttgacctatagggctgccaaattccttgccgctggatacaaggtagggcgagttgagcaatctgaaaccgctttagggttagtgactcattagatcctattgcatcttgcccctcttctgagattggccattagctaatctttcgtgcctttgtcatttgtgaactgggtttatcagtgcagagatgaggatgaaagcgtctggcggaaaagcgcagatcgtgaacagagaactcaaacatgtgttgacgaacggaactggtatgtcttgtacttgtgctagctctgtttctcgctcatatcgcaaacctgatctttgttcttctctccttcctttcgtttccctatgttccagtgtccgatccgtcatacctggctgggttcgtcttcgtctttcttcaatcgaatgctatcattacttttcgacgcatagaatgtctgaatttatctctttaaccccaattattagagatgaagctaatcattgcatatccatcaaagtacgttagacttcacttgtgattctacatagctcaccacctctgacgagtttctctgccttgcgctctcattctaatatgactaacaggaagactcgtcgaacctgataaacccatctttcggaatcaccgttctcgatgccgccaccggagccttctcactctctgcatttgaagatgatgtctgtaaaaccaaattggagaccatgttcagacagctccgcccaaaagagttgattcacgagaaggtgcgacagcctattctcctacaacagaacacatggcagaaaggaagctgatcttaatcatctgttgatatcttggggcggtctgtttcatatatagggtaacttgtcggtctcaactcttcgaacgcttcggtctatcatctcgtcgtcctgcgcatggacagcgatgaagcctcagacggattttacgtctgcagctaacacgttagacatactttcagacttttttgccctccagtctgaggggtcggacaaacaggcagtgttgccagaagtcattgagaagtttagagaggaaccactggccatcgaaagtttgggaggtctagtttcgtcagtaaagaaatatttctagttccaagccagaatttagtttggtattttcgtcgctcattgctttttttatcgaatgtatcggggttgggtcggagcacagatatctgaagcagcttaaccttgacaaagatttgttgagccaaaagaactttgacatctacgatccgattcgacaaaacaagtctttgatactcaacggaaacaccttagctcatatcgaggtttgtatcctttctcacaatctaattctgcctctctctatcatatgaaaacatgctgattactgtacactttctcatcccggtttgggccaacgatatgcatttaggttcttgtcaactctgaaggcggcgaggaaggaacattgctcgatctactgcagaagtgtagaacacccttcggaaagcgacttttccgcgtgtggctctgtcaccccttgagggacatacaagctatcaatgctcggtaaggttgagtatcttttgaggatcagcttcaaggactgatcaaatctcgagtgattggtgtgatgatgatgtaggctcgatgcggttgacgagctcatggagcatccaacattcataactgattttagagagcttgctaaaggtgcgctttagtttctaagcaattcaataacttattaagccaggtctaaatttacaaaattgtgttatgatcaggtgtaccggatttggaacgaatgatttctcgaattcatgcaggatccatcaagattgctgacttcatgaaagtgctcaaagtaaccacctgttctcatatacgcatcatcagctctccacgaaaactaggctgatgagttgttcataccttttatctcttttgaagtctttcgaaatcattcaaaaacgcttcgaaaagcttcgcgatatttccacgtcatttgagtcaaccagtgtcgctactctccttggttccgcaccggatttatcatcgtatattgaaaacgttcggacgatgttcacgtttgacaaggacgacggtactctgcttcctgcggatggaagagacgaggcatacgaggagataatacaagagttagaaaccctagaggatcaattagaaggtctcagagaaaagtttagcaaacagctcaagtgagtttgttacattgtgcccatgccgataggtcgaattctgatctatctgcgttcatccggacaggacggaagtcgtgtactggcattcagctcagggacagaaagagagtacgtaagacatactccgaatcaatccttgtgtattgatgagactgatcagatgctgctcggatcttgtagttttccaacttgcaggtaaattgacatttacagcaaaagacacagattgttgagcaacttgactcatattggccttgtattctcgattagtcccctcgtccaaaaaggtgccttcgaactggaccaagacttccggaacgaaggtttgtgtaaaatgcatgatttctgcgctttccttgatccatctaataacctcttgttttcccgctgattataggctcaaaatcgatactacgctcctgagactctgccgattattcgaaagattcaagaagctcgagaaactcgtgggcaagttgttcggtcgttcgtcaacgtaagttcttgctttgaatacagtgatgatatatgttgtttcaatcaaattgaacaaacctgcccttttttttccggccacagcgtttatacgccgagttcgataaggagcgcagtgtttggctttcgtgagtgatatcttctatacattctgttatgctctccatcactaacctcgctggtttttattgcacagttccgtcaagacattggccgagcttgattgtctttgcagtctggctaccgcttctctggagcttgatcaaccaaaatgtcgtccgacatttgtcgattcggatcaagcattcttaaagtttgagtgagtggtcttccattccgtggagcgtgagactggctgggattgcattaatatttttcttctggaaactgttatattcaatcagatctcttcgacatccttctatgtgtctccgggcagattttatccctaacgatgtagagttaggaggagataaggcgagaatctctctcctcaccggtccgaacatggcgggaaagagtatgtattggtttgacttaatctgggacgactttcgcagaaaataaagactaacagtgaaatggcttaatcaggtactcttcttcgaacgactgctgccggggttatcatggctcaactggtatgtcgatctatgcattttcctgctgaaggtgctgttctatcgcgggtggctcatgtctaattcaattttccatctctcagggaatgtatgttggagctgagagcgcgacgtgagttgatgcctttcccctaacttcatgctaggcacaaatatacggtttcaacgctaagcttgttcttgaataggttatcacctttggattgtatcatgacgcgaatgggagctatggacaatatgttcagccagtcgtccaccttcaaagtagagcttgatgaatggtacgtttattttcgtattccattccgattttatcagatcattctttgtctgacgagagtcagacctattgctttcaacatttgtcacacccgaacagcgcaaagattttgcgcgaatgtggacccaaatcgttatgcatcttagacgagttgggtcgtggaactagcacgtatgatggaatggccatcgctggtgtaagctttcctcctatcattctctctcacgcgctatcaccgttccatgagttttaatttctggattttggatgtatggcgacgtgcgtcttgaccggaacaggccgtcttacatcatctggccgggacaacgcttccactcgggttttttgctgtaagcgctcgctctgctttctataattccttgtaccttcactgatacctcactttctcttcttcactgtctatcttgaagacacactatggaacgcttactgatgacttcgcgtatcatcccaatatccgagcaatgcatatgcaaactcaagtggacgaggagaaacgagaagtcacattcttgtacaagctcattcagggtaaagccgagagtagtcacggaacccgtacgttatcttttctttcaccactccttatctttgttagcctgtagttctgtattttgtaaccttctctgattcacgttctcctctgttccttttcaacgatcgaaacagatgtcgcccacctagcaggtgtcccgctggaagtggtgtctagagcagaaacgatatcttccacgttcttcaaagctcagcaaagtaggctctcagcaggccgtcgaacagagttacctttggtcgtccacggagacttcgcgagactcgtaaagctcggacttggactaggcgggaatgaaaaggaggaggtaaaggtaggcggagtcgaagtgtttagatacctgagagaaggaatcaagaggactttagaacaagccgccactgtcggatccggttgatcaggtttttttcctcctttctttccgtctttttcgttccttctctttgtggatctattggtgtatatatatatagccgtttctgtcaggttaatcaaccatagacggaacgattgacaaccaagaaacaacgtcttgagaaaagaagggaaaagagatacatagatcaatctggagagctggtaacaaacttgtcataaagataagagaaacgatagagtagagcaatatcaaacacatatagcacagaacgtgaacgaggagcagacaacatatacaaccgaatatggtttttttcgtacaaaagagattttcagaaaagaaaggaaagaaggtcatacgtagacggtcgttgaaaatgatcaacgtatcccactcagacgacgtggcgtctcgcattggacgacccatgagcttccacctcctccaacgagacgaccgccatatccttcaggctcacttcatccgccttcttgtccacatcgttgtccctctccactacagaccgagggggaggggggcgggaatgggtgacgtgatcgacaggagcttcggtcccttcggcaggaagaatcaaattgaggatgacaccgatgactccacaactcaagtaaggagtagagaccacgatgatcaacgaggaaaggaaaccttgtagagcggcgttcgtgctggtgacaccttcgaagaggtatgtcgtccacgtagggaccaaaaggttgccgagtccgaaactgagggaggcggcgaggatgaaacgatctcgtctggtgtaattgagcatagagagaactcgaagaccacttgtggcaacctgagagattggaagataacagaaaagacacaatgtcagtcgatacaaccaaaaatactgcacattaaactgaaacaagtttgaacgaacgcttgcgaacaagaaagtactacacatgttgaagacaggaatgaatcatgcaaatcaaaacatgagtaaaggaaattacacacagctgcatgaattgagatgtcaaaacgagaaaaacacgtacgtgactccacccaggacggggtaagggattgataagaagacaccactaatctttccaatgactccataaagaatgatgaacgaagcgcagaagaaacccgctcgtctattggctgttatttgttgcgtatcgaacaagagaagagacgaggttagagaggattcaacacgtttcgcgacttataacgaaggcagagatgcgcagatggtagaactgaccacatcgagtcaagacaatgattccattgttctgagcaaagattgacatctgtaatgtttatgaaaggcagatttgagtggaaggttctttgaagcacagcttgatctgaatcggaaaagagaagagaggaaaaagagcaacatacgggagagacagtgaacgctccggctagcaaaccagcgactccgtccgaaagcacacctccctggattcggctatcaaacacctcgccctctacttctactcgggaagcttcggaggatgcggtgatactatacatggggtttctcgtcagaatttgcgcagacttcattaaggatagactcagaaagtgtaaaaactcactctccgatggcttcgacagcaagtgtgacatacacagccatcatagctattgaaataaaatgaaagaaaaaatggtagatcagggctctgaacaagattggataaagaggaggtctcaagagattactcacgaaggatagctggtccatagatcgaaagtttaaaagtctttacccagaggaacgtgatagctggggatgtggagatgctgcttccgtcgacgtatcccgtgggtccagcgacgatcattccgacgatcagaccaataacgatacttgcgttcctcatgaacggacttccgaaaatttcggtgatgacgatctgtaaagtccatcaaaacgaattttgagtacgttttccagaggagaaaacctcgagggatacataccgtgatgaatgagaggaatccaagcccaatgaattgaggacttccccacagagcgggtttaggtgcagcgatgttgggacagagtgcaaagtacccggtggctggtcttcctgaacagtcactgttgcgcaagaaggagaagatgggggtggagaacgattagagatcgaacgcaagtgatttatctgttggtagatagggacagaacagcacgtactttgaacctcctgcccagttcaagatacctgaatctccaatcaacgcagctccgatcatgaatacgaccgttccggtgatctacaaatttgttggcacaggaaagtagatgagcatgtatcgtcagatttccatcttgtatctagaacatctaaaacagtctagtgagagagaggacgtacgataggcgggaaaagcttcttgagcttctttgcggagacaaacgacaggccgatttcaagaatcgagcagagcatagcttttgtatcacaaccggttaaagaagagacgttgataggtgagccgatggagatgcttacttcgtttctggcccacaaaagaagataagaggaaaaatatcgtacatgtaccaatgagcgctccgtatgcatccgggcaagcagatttggtgacggttccatcagctgcggtggtcgttgaacattttccagagctatagtacgagtcaaagatggcgaaggcgctagacagtgtggcaaaactggtgcccacaacggtgatcagcccggctgaaaagagtcacacgcaaggtagacgaacagtaatcgttgatgtcagcaaaacaggcagacaagagggtgagttgattgaaaagacttacttccaaggtagtaattcttgtagagcctgatccctggattccatgaagagtaacccggttttgttcgtaaataatgatttgggctgataagaaactctcgaaatgaatgaggcacgaacttgacatttgcatcatagacaaaagtccagatgcgaccaaggaggctgagatcatgtaagactgggtctcggcatcgaggttgatgtagttctaagacagcaaagagggaatatcaggctgagtgtcatccaaaaggcaaaagctatgatacagtccgggactcacagcgaagatgataggaggagtgaccaaaccggcgatcatgccgagcgagtgttggaagccggccacgatctatgtgcatcgaatcggaagtcacaagagattgccatcagatttggttgatatcgatcaagacaaacgagagaagagtagattgatctcgagaagtactcacggccagcaataggggtagatcgtcatgtaacccgtagaacggaggcatcctgttgattggcctcttctccccatactcttccaactcgcccaattcctccgatctctcctttgctttggaacgaccaaaccgatagggaaactggggcaggcaaagctctttaaagtcatagtcaccgaaccaaccatcctttgtggtgagcttatactttgcaaactcgtatttggattgaatcgtctcttttttcgatcgctgatgggcatcaggagcggccgtggcagatggaggggtggtgatgtattctaccgacatgataagtcgtgcgaggggagagtgcgtatggctgccggatatgtgtgagagagtgaccagttaatgggaaggaaaggaaaaaggatcccatcgatcagaccaagagtcgggtatttagatgaaatctcattcaatagataagcaagcaatcaaggacgccatcatccatgaaggtttcctgctctgagcgagacgacggcgaagagagaaggtgttccaagataaatttcattcggctagataagcaagcgactaagccgaggcttatcttttttttgactacctgcgacgcaacccatccggtcgaatcggacgagcggcccgttgctcttggtgatacacattttatcttctttccgaatcagatttctgttgatcgatatcatggattctagtggttgatatcatagatcttggtggatgcttcaatacacgtggccaacgttacagacagaacatgtgtaatcatatttcatttatcagatgtggatgccgctccttttcgtccttcttccgtaggtacataaaagagaagaaaactatgaagaataggcgagcgaagcatcggccatctttaatgctccctcaaacgttttgttgccctgttgataggtaggtaggtagtcgtcttgggtcagtcaaaagcgacgatatttaccgtggcgcgaagaaaagctaagagaacaaaccccgatgaatcccgcggcatggcaaaagatgcaaccgtcgattccaatcagaccggacagctcttgatctcgaactcctcgccatctaaaattgtcgtcacggtcatccgtacagatgagtcagttctgtttcgtcaaaataatggttctcctttccaaacatcgccaagcgtccctatcttctgatttcaccaccctcttcacgttatcacagaatcaaaacattgactcacggctcgggcatagccttcctcgactcgaaactttcgcccgacttgggaatcgcctggatcctccacgcgttggcagcctcatctgggtagagaacgtaaagctgtcgaccgaattgaaattgtcaatagtgtaggctctttgagccccactggctcgaattacaacgccgaggcgccagggcgaaggtacgtaccggcttatcctcatctttgataccagcatcctcctcgacgttgaacagatgctccttccagggagcaaagtcttcaaacacaatcacctttccgctcgggtggacggacgttcgcttctcgaacgcggcctgcactagcgatcgggcgggtagccaggcctcgtgcaagtacgagagtttgctgaggaactctgagccggtcaaagctgaagccacctggaacttctcctatatgtcattagaaatgacagaacagacagaactatcagtaggaagaacacatctagttttgggatgaagaggatcggcacctacgtcaagaatcgagttgtcagacttttcattccatcgtgggttcagtccaccgactcttgaactcaaatcggtgcttgatctgtacctggccggctcggaggtgacatattggctcacgccgttgtcaatcccatcaatcgcctcaatgaaggcctcatatagcttcaggtgaagcgtctgaatcgatggatcggacacaggcacggaggtcacctgggacaggatgtcctttccaaagtgtctttttattgaaaagaatagaaaataaacacatacatacacacatacgttgtttagacgagtcagtttgaaagatgacaaaatatcaatccaagattggaaaggacagacttgtagacaaggcctgcggaggaaagcttggtgttgaagccttggccaaagacctcggtaaagcctcgctggtgatgatcgtatcggtgaacagattcgtcgtagactcctcctacatccacaacaatgtcgcaagtatccactatctcattaaaaaagacacatcaagccgaagcgcaatcaatatcatattgagcttgcccggttggtcagttcaaccaagagggcaacttacgagtagcgggatctcgggttctgacgacggctgagtaccgaagcggttagagttaggcatataattaaaagatgaccagtgccaataagataacgatcgacgtacatgcatccttatactggggaagaagcttgagcataaagacctatcgaaataaagctcaagcggtcaacgtcgaacctcgcggcatgtatcggaagctacctgtcgacgtacagcaagcgcctcatcacagtgaaaggtaccagaatgagtgccgatgaccttgatttgagttttgaatcacaaacagcgcacgtaagtgatcgttcccaggcaaagggaccagaaaacatcagaaagcaacgcccaaaacgagccattcatcaagtcagctatgaactatgaaactatctcagttctttccagcaaagcaagcgatcataacctaccaaaggttcacccgcaagcttggccttcttctcgatatgaacagctgacatattacagtggcgatagaggatagatggtacaggtcgatgagcagatgatctgatgatgggtctaaaggacatctatccgtggatttgatggaatttgagactgggcgcatcaacttttgatccatccccaagcctgacgttaaactaaagtttgatcatgtcagtcttacgccattctcggttaaatccaacctccacttcttacggtatatttgatcttgactctctgttctacacgcagactggcatctactttcagccgtcttttctttcaactcgatcctagtttctgttgactttgtttggacaagaacaatgatagggtccatcgtagagaaaccttcatcttcgcctaaaccgccgctgtttgtgccgccttcggctcccactccgggcggcttcccccgcgcggcacaccgttccaaatccacttcactcttcgcccaagcccgttcgaagccatcgccatccaggcagatccaagctcctgttgttcaatctaccatcccaatccctccacctcctcgctctcgatatcctttggagagccatcatgaccaatcagtctccgaggaaagaagaatcatcgagagcgcacagagggagaatgaagagcgtatagcggggatgagtctcgacgagagagagcaggaagcaagagagctcgtagaaagattcggaggtggtttagccgatctcttaaggaaaagacgagaagctcgagaggctaaagagaacagcaatgccacttccgcctctttgtctgtatctcaggtctcagtggattcaaactcggacgagccaggtgcgttgagtatgacacatcatatcatttgacgtacgcttatgatcttaaattcttccttctgcagcgagttcaccgtctattacagctccgaaagagacgcaagaagaaccctctgtctccaagacgggtatgttccttctcacgtatcattatctctcacgtggttgaatcgtttcatgttgtccttacacactcgttcatcaatagttcggtttgcaaccaatcccgaatccatgccggcttcgttccaatcaacgatatcgaatcaacccatttctgatcctatatcgcccgaggatacgcccgcctcaattctcagccaatacttccctactgataccacttatgatccgtccaaacttgaatggctccaaccacttccttccaattcgaccacccttgctccctctgcgccttcttcgtcccgatacgacctatccggccagccaatctcaatatctcgatcagcctctctgcccacacatctagggctccatcatcatggagatgatcctggcctagcaggctacactttggatgaggtccttcatctttgcctgtcgaccagcgtttctcaacgagtagctatgctggacgtcctctccaagattgtcagagtatccgcccgtctggacacgaacggaatactatctcaaggcgaagaagctgcagaagctgagagtctggcagaaaaagctctggagatagctggtcgatcgttggaggaaggaagaggaggagtcaacgttatctcccgagggatagaaatcatttacgaggttcttgtcggcagcggtgcacagggagagggaaaggaggaagaagatgtcgagatacatgaggaagtgatagatggtgttctggctcctgggctagaagggaaagatagatcaatcctagtaagactgccaggacttattccgctcctggtagttcagctggggaacccaggattgatgtcaagaacaaaccatcaactactggccattctagttcgaatggcacggctgcctgatccagttggcgatcttttgctctcttcgtcctccgtcaattcggtttcctcctcatcacctttgctccagtcaatattgcgaaacctctcagaatcccacccagaccctctcaatttgatactcctccacgcactcgtcgtttcgtcaaggaaaaccgctgagcggctgacgaatcatccttcttctcctttacccgctctccttcggtttgtcgcgctcggttcgagctcaccccacctcttgatcttggctagactttcaatcgacatctattcttcgttaggacggtatgggcttttatcgttcatttgttcagatggatcggatatctggcgcaatattgaaatcactattcatcagaatcttcgaacattgcactcggctaccccgtcttggccttcagtttcccatttggcactggccaggtctttttactccttgcttacaagttggacagtctgcgcgacggatccacatcagacatcaccagagcatgatatcacttggtctcaggttcaaggaatgggttggttccctgatgcgcttgtcgtcttgtctgggcttctgtccatgccttggtcttcaaccggtgatacagctaaagcgttcttagtgagcgtgatgggatttgtgagagcttggatagaaggctcaaaggtgaacgaaccgaaaggaggagaggaagtcaggctgaaggttggtcagttggccgggctacaggtagacaaggcggaagagcttagtcgaatctgggctgggtccgtacaagcggaattacagaagtctgaagtcagttggtcgaccgtagcgaggactatccgtctgatggatggacttattcgccttgtggatccttctcaagcctccatcgaaaagctggacgagactcttggccagacgttcgatgtgcttttgacgttgtcttctcattggtcgtctaaacacgtatcattcctcgacgtccgaccaatcacctcgttcttgacggcatacctcctccacaaacgctccttccttccaaccgccgactggctgtccctcgctcttgatgtcctccgactcctggtccctggagatgaacctttggctcgttctttattggaggtcgtatttgcgctcgacctgacggaggttcctggtggaaaaacattattggatcaagttggacatcgacatgggttctggatcttggaaccatttttctactttgtgacctcaccctcagaagaatctcatatagcaccttcgttccctatgccgaggacgttgaagcagatcacttctctacgacttccttccgcccgatcttcgacctcttccccttcctcttcgtctcaccctcagtcaaagtgtggtctaccgctctccccaacatggttcttcagcccaatggatgaacttttacattcctcttcatctagagcttttgcttctgcccctccatcgtgggacgcttcagaacctgaacttgtccgagccactctcgcgtttgccaggcttgttcagaccttacctcgctcgtcattatcatcgtctaacactacagacaagaagaacagcagcatcagcaggttaaacccgagtcaagtgatgtatgaatgtatgaagatcttccttctcgagaaaggggtggtcgctccgcttgaagaaccaagcaaagacgaagaagggaaagaagtctttagggatccaggagtggaagctctcgttagagatctacttaaaccgagtttgttttggtcgagttcatacaacccacctcgttcgagtccgttcccttccggtttggagcaagcccatgctctgtcttctatttctgccccatcatcaacgatggcgacaacctcgggaggacaaggaggccagacaaaggactcttcgacacctttcttccagacatatacagacttccacgcgttgtacagctcaatctcatacgctcacccgatcttcagttcgttgctcctcccgcctctggcgatgggctacgaaaaggattacagagcgctcttctggaacggagagaacgtagggttactccctgggttcaccactcaggttgcccatgtcctttgtgaatacaacgctacccaggatgataacgaaagcagcggaaagaggatcgaaccgtacttctaccctcaagagacgcaaacagacattttaggatcatacctccgagcgctcgtccttccgttgaactctacccaagggagaccaggattggacagagaccgaacagagtttttgtactgggtagctatccatcatctgacttctgccatattttcgccagagtccgttgttcccaaggcggctggtacggaggtggtagtggaaaacaggaagagacatccatcggcccggtcgtttttactcgctctactcgagaaagccggggacgtcgttctttccgatctcgtgaaatacaaccagcccgagcgttcgatctctcaaacacaatccggacagcgatcgatgaggttccctccaggatgctatgatctctcaggattatcgtcctctgagatcaaagctcgactagacctggtgagggggtgggctggagagagaggcgtgagcaggatcaaggatgtaggctttggaagagacttttcctaaaatcaaaggcgagatcgcattcagactcgagaggaagatcaagagaggttgagtgatttactgtggatcaatttatgtcacttttccccctcggttatcgataggaccggaaagatgatgcatgtatgaagaggagaagaaatgcaaatatgaagaaaagtcatatcctcttattgctgagacatgatgtttcaaaagagtatataaaacgggttgggttgacgagtacatagctgaacagacaggggaagacgagtcaaaagagagatcgttcattgtcgctttgtatctgcgttcaaggccataccttgcggttcacaacaaatagctacggttatgcatcggataatacatcgatatccaagatacaagaacaagctagtgaacgggcaaaagtcaacggccaggcttgggatggagatagaggatgatgaggatgatgaggatgatgaaaaggaggtggtgaggggtatcatatatgtaagtatttttttgtgttttcgtatacctaatctcgttccccgtcagcccccagaataagagacaaagcggatggttaacattcggttactctcaaaggaaccggttataaccgacaagggtatcgtagaactcaagagaaacaagaaagacaggaacaacgcacgacataactgatcgacacggccggtacgacttttgccaaattgacagtcaaacctctatagagacctctccaaccttctctattgatcgtttgttgggcgacatctaggaaaccgttgtaaacctggggatgacctgtagagcctgatgcctgaagtttcgtccggagaaggttcatcgctgtggttgagcagggtagagtacaaaggttattcatgcaagatagtatgtaaacaatatgaaggacgaaggaaatgccgtacgataaacactggtagcgccgacccctccagagatcgcaccaaaagcgaggacggcatacgtctctggctcatccacattctggtgtctgcagtaatgtatttttctgaatcaaccgttcatcaatttcccgagaagagcaaacaagcagagaatcgagtgagcaagactttttcctatcttctcaagcaactactgaaagagaataaaggaaaacgtacagagtttcaaacgtgctcatatcgatggcagcataggggaacacgccaaccaagccaagctggatcaagtataaacatgaaaacaaccccggagatcaaaagagattcggccgttagtacaaaggtgcctaatgtatatcttgttttcttgatctgaaacagagtgatgcattgaaaaaagggaacgaaacgaaccgtcaaaccccgataataccttcttactcctccgttggcccacatcgttgctgccgtcttcagcaacacttttgcgctatgatcagatcctgctgtcgtcatatgtgccgttttcagtgtctccagctttgtagccaaacagaccaaacagaaagagatatcaaaaagccatgagccaaaatctgtaagaagagaaggaaggaaaactcaagatcgacgtacagggtagatggagaattgactggcgattcctccgagaccacctgccaggaacctagaagatccagagatcagagacggatcttcgacatcatcccagtatcgtgctaagagtcgtttctttgttcatcaaattatgatggatggggggagggccatggttagatagatgaatggatataacaatgttgggctaatcaaatagggagaacaaaatatattagaaacccaccgaggattcatatgagaaaaacttgatggcagattctggcatgatcttgattctgtttcgttcagttgaaggcaaagtgcgcgcgaattgttaggtgtcatgtctagatacgattaaacatatgatcagaggcaacaagaaagagacctacacgttcagtccgtttccgacccagaacgctcggagcccaccgccaccaaagtagagcctcatgatggctctcttaagattctggtacccagtatgagcgcctgtcgttgacgacggcccacctgataggccatgagagtctgtgatgaggaatactttaagtctgtcgaacggggcggtggcagtccgggagactgagaacagcgaaacgtttgttcgatgtgagcgttagtcgataatcagaatgcaaaacgaaaaagagggggcgacatactagcaccggcgacacctccggctcccaaaaacttgacggcgaccaacgcgctcaaatggtttgcgtcttcttcctcttcctcctcttcttcttcctcatccgtatcatggtctccatcaaggattgtttccgaacctgaggtttgacctgctgatgttgatggagaagtagactgaggtgactgaagatcagatgttagggtaggttttgatctggatgctgaagatattgttccggtagacaaggtaggactcgaggacgacggtgaggaggcggatgtagatgaggaggatgaagaggaggcagaagaagacgaagtagatggcaaacttgggaaggacggggtgatgtccccgtcagaattcaatctggctgcacctctaccatcagtgatttgctttctgtattgataaaactgtgtacagaaggcgcagacggggcaaagagacgcgcaagtgggtaggataggtgaaggcgaaagcgagaagcgtatgcgttcgttgtcagcttctccagttgaatgaatagtcctgatacataggaagaaaaagaaacaggaaggtttcgtaccctatagaactctggaacgctagcctttctagggaggagcaagaacatgtctctaaattcgatccaccggataccttccggtgtgttttcacctctggcttgtctagactgctcgccatgggttaggtaagatacaaagtcctgaatcgtagctggcgtgagggagatgtctatgaaggaagggtaccagagtatgaatcgatcagcaatttaggctgatgatcgtcatccgctggtgacaaagctctgcacagaggttaaggcaagagagggcctcaccagcacgagcagaagcagcctggatctcttgaacatcgaggaccccgtcttgatttctgtcgagatcctggaacgcatgccatagttctggatgacagaagagaaaaaagtagggaaaatgatgcacgtttcagccggagcatccttatcaaggaaacagatttgatgctaacaaactaaccagcctctctttcccaaagatacgtcctaaactctttccagtccaacatacgttcccgctgtttcccttcggatgtcggtgtctctgatggttcgtcatcttccggtttgagtccctctccagcaaactctcttgcctgtgggtttgtcggaccgagggagcacctccgaacgagctcctcttggtacattgcctggagaaactctgctcgttctggcgaaagcgaggcagaaaagccgggtgaaggagatgtggtcggagatgacggtgcggatgaggaggaggaggaagaagaggaagagaaagagaacgttgagctaagaggattgagccagctggagctggcgtttgagtatctggacgatggacctccggacggtggtgcactctgggttgaacctgttggtgttatcactgctgttgctgctgctccagctgctcctgctgctgtcgatttcgaggtcgacttgctggcctgctccttgtacgggatgtttgcccatagttccctcagctttttctcccttgcatgtttaccttctctggctcggaaggcggtcagctcggcgggcacgcccgctcgcttctctgcgttcgcacacggtagagccggtgtcggaccgtttcctggagacgacgaagatgaaatagaggaagacggtgttgatgacgatgacgatgaagacgatgatgatttgaacatggcaagacaaagagggctatgggtgtgtgtgtgtgtgagatagatgaaagaccggggggagatctcacaagggagcagggcgaagcaaagaaatgggatggccaacggaatgaatcaaccgagcacagaccgggaatcatcgggccaagagtttattacgaaaatttgtagtccgcattctagtcgggcggtgcagattttgtagtgtttagcgggtgcggcgtgcattagagttcagactacggagcgactacaggacgagtaaggattgggtaatgagcgagcgaactatgattttgtctcgagtggactacagaatgtactaggatggtttgtagtgttgccaagaggcgtgtgtgttcacgtgttttgtgtgaggctgtgctgccctctctagctctctcgctacagattcctagtacacttgcctaatgaacttttttgttgtctaatagaatatttgtaatgcttttctggtggattctcgtagtacattggactatccagcttttccaatacaaagttggtgtcttttgtagtctccagtgtagtcattttgcagcctttttttgtagtcttttttgtagtcttttttgtagtctgtcttgtagtcatatcccacttactttgtaaccttctcgctgcgttcttcattccgcccattccgatttctctcctctccgctttccctccaacatcctcaccgatctttgctcaaatggtgtttgctcaaaggacactcggtctctcacacaggtcagtgttttgctctctgctttcccttgctctgtctcgacctgtcctcatcagatctttttcctcctgtgttgcccgttggaccggttcaggctactcgccaaaagggctttcaacgttagatctcgtctttctttctctcttctctttatgtcttgatcctcctttctatctgttctgcttcttcgttccttcctgttctctatatgtcgctctcgctctccttccttcggcttctctcaaaccatcttataaatcctgcagtccggctaagatagtctatcttctacctttttctttcccaaatccttaggcaagccgaaccccactcgtcctccgatcagcccccattcttgcagctcatgccagaccgttctctctatggccttccagttccaagcctgccgagccgctcgctcctgcagacatagaatctagtgtggccactccggtcaacttgccccaacctccatctattcctacctcctccgtcagttcagtcgcttcgaccccttcatccggtctgatcactcccgacgcgtcccccctgggtttggagtccggtgtggtggacccgctcatggaccttgctaagctacccctccactacggagatctcaaggctatgggtctcggtagctggtggccaaccggttggatccaaagtgctttcgaggccattcaagtctcaactggacttccttggtgagcttgttctatgtccttccgcttagaccccctagcacgtactgtggtagactcaacttgtcttcctgttctgcctcctcaggtgggccacgattgtctctctcacgttcgccacccggctggccctcttcccgactttcatcggctctatccggacggccgctggcatggtccgaatccagcctgaaatggcgtcccttcaggaggccatgtctcgagccaagagcaatggggataccacatccatgcagtccctggcgatcgagatgagagacctcttcaaacgacacaacgttaaccctttgaacgcgctcaaacagccgttggtcactatgcccgtcttcatcagcatgttcctcgccctcaaatggatggccgagttgccagttccccagttgaaacttggaggaattcccggttggtgtaccgatctcaccgtcgccgatccgacgtacatcctgccagtcacctcggcagctgccacctggcttgtcgctcatgtcggtctctttttattttctttttttcttggcaacccctcctcttttcaaggtcatcctgctatcagatcatttgctgacacacgcgcgcactcgtctctgctcgtttccgtcttgcttttcttctctagtttggagcgaacggagcgcctcacagtaagcagccagatacccagattgccatgtccggtatcatcaagacgatctcgatcatgggtatccccttcttcggagggtttaccatccccgcggccatccccttgatcggtggcatgagcaacgctggtttccctgctgtgcgttctgcttcttcattgtcaaatctcagcggaattcgtcggttgactgaccttgtcttaataccgtcgacgtttgcaggccatcctgctctactggacatgctccaactctttcactttctttcaatccatcatcctccgaagcgatgccgtcagaaaggtactcaagttggagcccgtcccggagaagcagccgaacgatgaaaagccgttgacttcgattcaggccatcagaaagatgatgaagcctacgatcgaaaagtgtgtttgacatcattgttctggattctatcccttattttgtttcaaaaaaccgacatcaaatctgactttcaattgattcgctcatttcttgtgttttctttaactcaggttcgagcaacagaaaaaggcgttggacgaggctcagagtaggcaagccaggtattctaccaccgccaggttgagcgagaagaaatccgtctcggacgcactgagagaacggaagttagcagaggaagccaagcgagcttccggctcctcctcatcttcttccgcctcgccttctccttctaccgtctcggccgcggctgcggctgcgggccgggcgaatccgttcgagtctccagataaggaaggatgggatactgcttctgtcaatctttccagaccatccatccagaccatcactcctatttctaccgctacccctgcccctacccctagcgctgcttcgacaagtggcaagagtgaaaagatgattgagttggagaggcagagaaaggagattcaggagagaatcgataagcttcagaaagctctgaggaagtaagac

SEQ ID NO: 154 - DNA, 18121 bp, Xanthophyllomyces dendrorhous
tcggtcggtcggtcggtcaggtaggcaggggtgcttttaaccagaagaataagttctctttgcatcttttctcccaagagatagagaactatggattttgttggtggggattttatacaaaaattacgaatgtctgatgttctctcttgatccacaataaatatgagagctgaaaagatttcctaagatttcttttctgactggcgggccgagcagacaactcgtctcctgataaacaagataagcaaacaagtcgtgccgacagagacaagagagcgaaatctgaaagaatccaatatcatcatttcatccgttcataacaccccctctttcttcatctccagttggtgttggactcgactgcacaaactcgacccgcatcccttcgaccgatccgccatccgataccgaatctcgactctcggtctcggtctcggtctcgtctccgtcaacgctcatctcgacttcgactggaagacccatctcggcagcctcgatttcgtccatcgagctgagctcgtcctcttctccctcgagctcctctccctcctcctcgtcatcgtcatcgtcatcgttccactcaaaggactcacctccaaattcatctctgaaacccccggggatgttctccctcagacccgcagctattccattgacgaactcatcaaactcgatgacatcctcttcacctacttctcttactgtctcgtcaaaatactcgatcgttcgccagtcagggtacattcgccggaactcggcttgagagaacatctgagcattggcttctaccaatgggttcgatctagtcagactagaggtcgatatgagtgccgacgtcgatacgagtggtacagaggtgtcggaggtagaagaagtaggtgatggacgggcaggtcgggatggaaagagtggcgagaacggtactcgagaaggcggggttttaaccggtggctgatcgctcgataacgggaacggcgaatgaattagaatagactgggaacgcggtttttgtttgtttttttgtttgattaatagatagatacaaaagaaataggaatctcagccacagatgctagatctcgaggagggaaacggaggtcgcatcttatgaggagaaagtgaaacgtacgcattctacacctgcgctgatgaccatctgagcgttcaccggatgaagaatgcagctgttggtcaccgacgcatgacctaaattttcaaatgaccccgaatagatgaaccattcatttgggtgtgaggaaagcttgaagagtcagtgtcatatcctagacgcaaagatccagatctcgatgcaagtcatgcgcggccggatcatgagaactaacctccgactctgaatgccggccgatcgagttcaacaggaaaatacacattcgatttggtatcatcctttgtgtaaccttccagcaaaggaaatgaagaaccgcgttcgtgatgatgatgaatacaaggagcaacttgaacatcaaaagcaaaaacagagaccaaccaatctttttagagcttctcccaccttgatcaacgatcagcggtcgggtctggcgttctctacgttcgatcagttcttctaccgatgggattttccctatgtccgttgacgcgcgcaaccaggccatacgatgagtctccaagttgaaacaagctcttgagactgttcgaatgatatagactactcacatccgtatccctggtttgttccctcacgcatacgaatcttccgtcagttttccaagtggtaaacatataaggaaagaacagatatggctcacgtggaaatcgtctgagccagtcgagtagatcaaatctcctcctgcacctagatatccaaaagaaccatgctatgtcccatgttatcaacgaccaagatgccccatcagcctagaatctcacaaagcaacacaaataagacatgaaacaaaactcatccaaaccttgacggtacatctattcaagtaagatctttctccgttctcgaacctcaccggctttccatcgggttgcttctttcccgacaaggtagcaatcggcatttcgtcccctatcgagtaaagtgtgggcaaatgcctctactcgccccacagaccaaatgaatacgtgttatgatgcccatttcgaagcaggaaactcgtcatgtaagcaagaaaagagcgtacgttcatatttgtggccaagatatcacctttgggcgagaaccaaacgccggaaaggtccggtttgaccatgttctttgttcttgcagtcgtcaatgtcgtcacgtactaaatcgaacaaacagacatgcgaagaaacacagatgagatgtctcctcatggtaggcttatctattttcagatcgtaacgatcacacatacctccatcacacaattcgaacgatcgttataccttggtctttgaccgaacgaccaacgaccacccattggcctcacggtcgagcttgacggacccccagaaaaactagaccttagatcgaacaacctgcagatttaccctcggccatgtcagtaatcgtgcgcaaagtaagagcagactgaatcatgaaagggagagtaaggaatggagaccaaccgtaacccaccgctttcgtcacacgcagcaaatgaattctcgacgacaggactccaatcaacaccagagaagcttcctcggttgcctaaagaatggaccaatgtcgtggatagtctaaaatcatgaagcgacacgttcttgtcctcacttttgaacgaaaaatattgtatatcagcctgtaagtaatcagacaagatttcgaaatagtgaacggtcgttacctggcagagagtaggagatccggtctcgaagggtgacaagccaatgctctgacagctttcgtattgacatttactctcctacaaggcagctcaggctcgacatctctctttcctccttcagcaaatggagtcgagaatcgagtgagatcatactgaaggatgaggccatcgatacctgaggagaatagatgtgtattatccgacgagaaagagagcgtgaatatgtttgcctggatgatgacgatggtatgatgagagggtttggttcagacgacgaatacaatcaccacaggataggccagaagaggagaaggaggctcactcggtgtcctttgaagatagcagacggtaaaccagtttcaggtgttgataaatccgaatgtaaatcccatagtagaacatccagatctaattttcagaacctccagcaatcaggatcaagtagttcagcccaagacctgttctcgttcacttctagtccatgtgataaatcgataagctagaagaaagaggaggaaacttaccgtcacctccagaagctaaccaccttccttgtcctctcgagatcgagattgcattcacacatgaggtatgacctttcaatttcctatgaatgcatatcgggggtttaaatcatcctcagtccgacgcaggaccattcttgtacatagatagaccgaagcgtacacagagtatccaaacccagaccgatcgaacgctcgttcaaggacacccaatttagctctttcaagacgattgtgcgaaggtgggaaagatgatagatttgctaataaatccattcttctcttccctctctatccctttattatctgacgagtgtttgacttagataggcaattgctggtgatcagtgtatcctatgaaggataagacaaagagtagcaaaggaagtatgtgagaggatgcgaaatatgccctaggatgagatggtttaattcttaaccgctttaaagatctaatctctctttgcttacgtcacccgcggcatttatccactcttctcccttccttctcttttctcttgcggcctgttgtgagagccttgaccagtcagttcataagattgcctcatctttgaaactcagacagaaaggattcttatacgtctgacaagaccatgtactaatcaagaaccctgtatatagagataataagaattggaaacctgctaagcaagggtttacggtcacacccgaagtggatcttctttctcaacccatctcgtgagtttcatcaccttacaaaaggagctccatcagttcagaagattatagaacgtcacacactacagatactattgggtaagaaacaaaaacccagttaggcgacctaaaaactaccaaggagaggaaagaggcagacacaaagaacccggaaaacgatttgcgtcacgttgcaatgcaagatcgtgaaagtaggaataaatctgatgtaatgcctggcgacattcaaggaacgcgcttgcaagtaaattacaggtcaagagtgacagattgagaagatcgatcatgaaccacacggacggatggaagaagatgggcccgtagacgtataaggatgagcatcccagcaaagagaccaaccgtatcctctggcccgtaaagaaagagatttgctaagaggaaggggcaagcccgatatcgaatgtattgaaatcggaacaccaaaagtacccagaaaggcgcgaacacgcgtggctcaaccgtgttttagcccattgatccggaaagatagaaagcccaagaggaacgaatggcaaaagagagtggaccagaagaggcggaaatgttcacgcgtcaaccaagacactctcgccaacggcagattcttcaagttcgtctggaggcgacgccggcacggaagacagcctggaggaatatgaaccgaatgaaagaggccgactagaactctttttgacattcgatgatactttctctcctcctttggtatctttctcttgcgaatccaacgcaggtccgagttccatactgaaagaaatcgactcaaccgaggcaatcataaaatcctggtcctcggcttcggaggaagtgactgaactggcgagcgatggggtagaactattggctgatggggagaggctgtcgatagatgaatccgagctactgctgacaatactcgagaaggaggaacttctggaccgtctcgatgactgatgactggttgggccggtagtaatattgaaatagcttccggaatggccggacggttgagagacaggtactcgtgcagaaggcgattgaacagaagtatgtcgagagtgcatcgctctctgatagaacggagatgagctcgattgaaggtacagcgagttctgaagtcgaacaggaattggaccgggaggcaaagatcggtggagaagcgctgttgggcctaggggcaatgtcaaagacttgttacgccggactatggaattcattttggggggtgaacggaacaaatcgagagattaaatcagctgctgtaggatgatgaaataaagggctgtattgacggaagtaatgggcaaaggaatagggagaggcgaagagatcatgcaagccacgcgaggtggctgatgtgtaagggcaaagtaaatatacacgtatattatttcgggatagccatagaccgaagacgcttgccgcgcctgctttgactcccatccatgaatagaatttgaaagaccaggtctggtcctatccagtcctgtccctcctcttctcagcagacctggactgatacgtagaacctgagagcaaaggccatggaggcatgataccagcatagagatgaatgcaaaactcacggataggtgctttgttggtaacagtgtggcccatagggaaagtcgtttcctgggatacagacagaccttcggattcggccggtggtaggagactcggcctatgggttgacgagatggagaacgaattattcgatcttagtactggtcgagaggatggtagagagttagatgttggaggtacagcggttggcataatcggttgtttggttgagtgagtgtgaacgcgagtgtaagtagatgtggcggaactagccgaaatacggtttgagcgtttcaccaaggagaaatgccaaaagctagtccaacacggatgatcaggttgcaaacgaagaatcaaggagatgatctctgaaaatacgatgatgaagaagataaacaggtatgatctgtcgaaaggtagatgaatgaatgaatgaacgaagaagagcaaggtttgtctcctccatcttgaagagaaaaagaggaggaaaatgaagctgaaggaactcaagagtttagaccaagatggataaacatacgcagcatccgcttgagatcggccgcctcgaccggatcggacttcctgtctacaagctccggccaggctttcttctccggggctgggcagtgagatgccgaacggatcatgccgaccgaatgcgccggcaaataaatagccccggggctggtttgtaacttctcttagttcttgtaaaagaatctgccgcccagtcatctgttctctgtgcctgttgccgctctactctctctgcttgagaagtcaagtgaaacagtcggccatgtggtaaagcgctagtcttccttaagggatgtgatatgattggttgaccagaacaaatcaaaacgagataaaggtggattgaacagtgtagatcattcgtcattcgattagtggcggcatgtcttttccatacggtaatgtggacagtaaaacagctgcggcatcgtgtgcacttgacgttctgaggtctgtgcatcgattggaaggggtttcgggcgagtttctcctgtctgaacgtttggactcgatcgagattgactatacacacggtcttcgagcacaactgaattagttgacatcgtgaatgacatcagaaacctcagagtcaaatgcgcatgcaacacaagtgatccagctgtgctcgaagaccgtgtgtatagtcaatctcgatcgagtccaaacgttcagacaggagaaactcgcccgaaaccccttccaatcgatgcacagacctcagaacgtcaagtgcacacggccgatgtcttgcagggcttcagccgcttggcctccacgatgtcgatcttcgtatggatccagcccatggctgtatcgtcgtcttggtcccatgcttcctgcgctttcggatggctggcagatggccgtggcctctcaccaataatgaccgtccagagcttcatgtttcaagagcaaaacggagccggctctcccagacaccatagtcgttggcaggatggttcggagggtgaagattctcgaagttggcaaacgacgactcggacagctttgtgtatagcggcacactcgatggctctgggtcagtgggctcggctggcttgacatcggaggacacatctctggtagtagagtaagtcagactcttaatctaacagcaaatacagttttgtagagctgtagaatagaacaaaacacaattccaaattcagcgtcaacgaaacgttgttggtaaatgctgaggaaggagaaaagaaaaggacagagaaagagagaaggagggagaagaaaagaagtcgaccagctggcagagtgcgctagctaggtcctaggtacatagatgataagcagaaaccaatgcatcatattcaagcattctcgacagttacaagcatgttacatgctgttctatcacgcttcgaaaggagagcatattcactcgcatgttccactactcacaccaacgagaatcagctgcggtcccaaccctaattagccaaactcacaagacagagctcaaaccaaagatgaaggtcttcagtgcatcgagctccaagcatcgccatttctctctgagagatccggaaccagagctgattagccgtgaacagtcagtggtagtcaagaacatcatgtatcattattgattcactttgtcttgagactgcaaactctagttctatgaggtctttcagatcattgtttttctcagatgtatgtcaagtgggcagcgagagatacaacactcgctcgaataagtagatctgtggttaggcaggacagagcatgagacagaaaagcagaaatgagcggagtaaattaagatcatcttgccttatcagcacgagcattggtcagatgcggacctcaacacagtcttgatggaggcacgatatggatgaatcagtttcaagaattgaataagtatacacaacgttgaacgctcttttctgtagatcatgtggttgtagtagagcggagactgagaagaactggagaagagatagctggtcttgttggttgtgtcatcggagagagcgggtcatggtatcaatatcaggtcaccctaaatgctcggaagggctttgtagtaaacatccgttggggcgcaatctgatcttctaatctcaaaacaaacaccgtcggtagcaaagaacagcagtaccgttcaaacgtcgtcaccgacgaagaaccgccttaccacttaatatgatatacactacttgggtgataagcctaatttgagtcgccgcttagatcaagaaagatagtttctctgatggtacagctcgggacatcgagcttgctgatcaacatgaggtaacaaatagaccttagttaaacccggtcttgtaatgtacatccctacaggtaggtgatggcttttagaggtatctgcagctcacatcgctgtattacgctccctcagagatgtgtcacacaaaccatgtcttgtcctgccactgagacttggaaaacgcatacctagaaatcatgaataatgttctcaaaaggacgtatctcccagatcgaatctgcctcttgacgttctatctctaggcatatctttaccgcaccggttcaaaaggaacatcgtgtcttgatggctaccagaaaagaaggatgatcgaagacgtcctacagtatcacttttaccatctcgtgcagaccctgtttctcgtcattatgaattagatccttgatctccaaaatcgatcccctttctcctatgtctctactcaatcgttgatgtagagagcaatgctgaaatgagaatgagagtgttgacaaacagaagagagacgggtttgcatgtacaaaggcaactacccatccgtatccgaacaaaggaggcttgggaagatgctgattcagctgtagatttcatattgcttcattttctagtctaaagttcgagattttgtgaattaaaagaccggcaaggtcaactgaacatcttccatcggtaagagattctccggtcggtgtattttatcggcaaggattttaaagtctttccctgaactccgtcccaaaccagtgaataatctgggcgatagtaccccttgcaagtgttcgattgatttatgctgaccaaatagacatgacctgttcttgtttaacatccactctcggtctctgtttctttccctctcttaacatcggttgagtgctcggtttcatccaatcaaagcatgtccatcttctagcgactgctttgtctctatatccgctgaaccggttccgccggtccgaataccagagatggtaaggaaagatacggataataggaggaacagaagcaaaaaaaagacgaaaaggccatctgatgaatggggtttagtgaagtccacttggaaagatggtcttcttctctctgtgaactcgtataaaagggatcgaaccatgaggttcagaaatgaggttcttcacttttctcacataatacatcctcctcaagacatttcatcgcttcgtcatgaagttctcgccattgttgatcgttgcgaccgcgacatatctagcttctgcatctccgttacttcatgctcggtttgatctaacccagagagcggacggaacggtcgatcctcatgatccacctgaagttcctgcgaaccacaccttccctgccgcgaccggaggtgccggttggaaggacgcgttcgaaaaggcaaagtctatcgtcgaccaaatgaccattcaagaaaaggtcaacgtcacttctgggtaagaacgtttcccagtttctttccagatcgcaaggctctagtgactgactcaatcatacctgccttcgactagtatcgtcgggccttgtgtcggaaacaccgctccggttcctcggtttggaattcctagcatgtgtcttgaggagtgagtgaagccttattacatgtttcgcatatgatgatatcattctgacagctcgatctggaccaattaatcgtaatctagtggaccattgggtgtgagacctgttgacttcgtctctcaatttcctgctggagtcacggtcgcggccacttgggatcacgatttgtgagcattttctctgtctctccatacaatatatcttgtccagttccttctgaccagtttattcttgcatactaggttctggaaacgtgccaactcgattggagaagagttcaagggcaaaggagtacacgtcgctctaggtcctgtgacgtaagttcgggattcgatttttgactctccttatcttatctccggtgattaactcgtcggtgttttccggaaatcttttagcggtgggcctctcggacgatctccactggctggtcgaaactgggaggtaagtatttttaccttgtacgtctctaaactggtcgatgtcggttctgaccaaagtctcttcattttggatccacctcctttagggattctctccggacaactacttgaatggaattggttctaaactttccgtagacggcatgcaggccgctggagtagtcgcttgcagcaagcactttatcgtccgtgtttttatcaccagccatctgatttcagtgctatcgcgacgactaatcgcctagcttgttcaccacagggttatgaacaggaaacttatcgagacctgaacattgttaccgagaccaacctcaccaagaggtatcaacagatcgattcaattattgatgataagaccgtgagtgatcccacacctagcgttgatctgtcaatcttatgtaccgacgtgtcgagattttgtaacaaaaacagatgcacgagctctacttgacctccttcgccgaggctgtccgagctggtacaggtaagatccattctcgggttcttagttcatcaaccgctcgaaagctgatcgtccatctgttttgtcgatgtgtgaataggatcgatcatgtgctcttacaacagtgtcgacggtcaacatgcctgtggtaacgacaatctcttgaacggtattctgaagtctgaattggtaagatcatcgatcatgcaattggagtgtccttatatcattcaacgtctatctcatttaacatttttcatatcaatcaaaaattcctagggcttccaaggacatgttgtcagtgattggggaggaacctgggacactgtcaaggacgcatcttatggtcttgtgagtctctcttttcaacttaatgaaactcttgacaacagctcatcatttgtctaccgctacaattatcgaacttactcaaccaggacgtctctatgcctggtttaggttttggcggagtactcgggacgtacttcaacgatgagcttgtggaagccattggatccggcgcaggccaggtttctgaggccaggttgaatgacatggccatccgaacattgactccgttcttctggctcaaccaaaacgactcatcataccctgcggtatcttttgtgtctgacaacctatcgccgttgaatcaggatgtaaacgtgcaggctgatcactggaaggtcatcaggaagatcggagaggagtctgctactcttttgaagaacaaccggaatggaacgtatggtttgcctattgactcttccatcaggaagatcggtgtattcggtcaggatgccggtcctcccactgctggtcttaccggatgcggtaccgctggagattgtgtatacgacgtcaatgccaatgctcttgcatttaccgagtacccccatcacaatggtgcgttctgttctattctttctcctattccaatcatatactcttgcgcatcttgtttagatatcacatagaggctcgccaaattcaaaccttactaatctcttccgccctgtcctatggttaatttacaacaggaactcagagttctggaggtggaagtggaacggcgttgcctccctatgtcatcaaccccttggaagctattgctgctagggggcgacgacttggccttaaagttgactacgctcttggagacaatccatacaatcctactcaagagattactttcgtcgccgaaggttctgagaagtgcatcgtcttcgtctctgctttccagagtgagagttacgatcgaataagcttgttgcttgataacgaaggagatagccttatcaacctcgtcgctgcctcctgcgccgatgtaaacgtggtgatccactctggacaacaagtcgatatggaagcctggattgataacgagaacgtgacatccgtcgtgtttgcgtactaccccggtcaagagtctggtgaggcgattgcgtcggtactgtttggtgatctctcgcccagtggtaaacttcctttcacaatcgccaaggacgttaacgattaccccggaggaaccggctcgattgtgacggccaatgtcgctgcgcccgtttctaactttaccgagggtctctttgtcgactacaagtggttcgacgcccaaggcatcgagccccggttccctttcggatttggaatgagctactcctcgtttgcctactcggacgtctctgtcgctgagacctacgctgctgattccggctatgttcagaagacaaacgaggcattcgacggtgaaggtgatttgtacgatgtccgatacaccgtgagcgtcaaggtgaagaacactggaaactggaccgctgctgaggtcgctcagatgtacctgacgttccctgagtcagagtccgaccagcctgttcgactgctccgaggattctgcaaggagacctacactgccggccaggagcagaccattactttccctgtgcgagcgaaggacatggcggtatggtcgagtgcgaaccagacttggcttgtgcccaccggagagtacacctttagtgttggtccctcttctcgagacttgcctttgaccactactgtcactatctaagaacgggaacgaatcgagcgtgtatatagctattgatttcttttcgtgaaaacgcattgtacaaatgttgtatacatattgtgatgtataatgtagtttgttcactaaactttacaacctgatttcttctttccctttttttcttctttgagaactcccaataagaagcaaccgtaacaaagaatcatttcatcgttataaacataagcctggcgtgtattaagatttttctagcaacgtctttttcaaacgtctatgtccaagaagatgcttgatggccggaccgggtagtcagattggtcatatattggtatctaatgacgagataggccagatgatgatcctgatggccggcgaggagacctatataaacgcgtgttttcattttgatccactggcgttcttatcgacccatctgctcatccttcgttccctctccttacctatatacccctctgtttaaagatgaccactgctgctctgtaagtggtcgaactagttcttttgatctctgttcttgacgtataagggctgaatttattcgaatgtacagctcgctccttcctcaagactatggcttcgtcgctttggctgccacctcaacttgtatgatcccttcctccctcatgtttttctctctctccatacagtggcagatagtagtacaaaaggagaaggtgtttctttaacttatcaccacaacttgttcattcgaaaggacagtctatctccacgtgtaccaggtcttgcaagtgagcaagtacaggaagttggccaaggtcgtttatccccagtttatggccgagaaagcccagatggatgcaaacccggacgctgtcaaattcaactgtgctcagcgagcgcatggaaacaccctggaggttcgttgctactccttctgtctaatctcttccttctcttcttccatttacgccctttcttttccgctcgtcggattgatctgtctgtaaacggttgactcttgctgcattcaatctttggttttacattctgatcttgggtacctctgctattacgcctatgggctatacttagattcttccccatatgctttttggcatcctcttcaatggactcttcttccctaagatctcagctgcccttggtgcatgctgggtaatcggtcggatcttgtttacctatggatatgtcactggtaaccctatggctcgttatcattacggtggacgtgagttttctctttttcaggtgtctctgttttcgtctttacttcttctcttttataccttctgtcggtgacctgaatgtatctgatctgcattattgttgttgcccgatcacagaattgcacattctcggcgcaatcggaacactcgtgcttgccacgtacaatagtgcaaaacttatcctccccactctttaagttgaaacgattagacttcagaaggacaaaggttgaataggtagacggatagcatacgcgctgggcgcaaaatctcggcaaaatcttaatggattgaaggataacccagcaaacatttagaattaccatgattgtattatgtcccgacagaaagaaacgcgcacagagagagaacatcttgagttatgttcagaacaaagagctcccagcggtgaaaggatatcaaacagaacaaaacaaaccaaaacgaaaaggtttgcttgcgtaccatatttttgagcaagtgaacaagagggaacttgctcactcggaataacaaatcatatccgtcatcgcgaaccgggcagagcctcggcagcatgctcggtcttccggagcatacgcgtcgttcatcctttcctttctgtcatccatatggaaataagaatgcacttgtggacgaacgcacaatcgtaagaatgacaccggtcacctcccaagactagatttgcatacaactcgtaccccaaattagaagtcgtgaaagctcatcagatgtgttacaagaaggagaggtatatatgaatgtgaacgagaagaaaatgagaaagtgtacactaaatgttgaacgaaacggatcacccggcgaccattccatcggaggatagagaaagaaagaagaaaatctatacagaagcccaaatatgagatatgaccgatgaaagtctaagaaggaacagagtattatagaaaaagtgggtagcaaagttatacaaacgaaaatagatagtatgacatatgtgtattatagaggtaaagaagacaggaactatgagaaactctcgtgaagttcgtttatcgggtcatgtttggggtttcggcgatagtagtaggaccagatataggtattggaggagccaagtgaatacagaagatacacaacagagctacacaaaaatgcgtcgaggacgtcgagttgaccgggaagagagacgttagcataattagagaggtaggagatggtgtaagactaactcacaaaaggtgatgatacccttcatcaacgtctctacaaataccatgagttcagacgtgtttagaacgatcaacttcttttcagattgctgaaaaaggcaatgtcaagactcactcaacctccagacgctttctccttctttaccttcctcatcatcgtactcgtctcttccgctacctccagcctgttggccgccgacggcctgtcctaatcgagttgtcctccatttcaatccggaacgatttcttcgggtcttgaaagtgcctaccatctgacccatccgagcgcgcatccttggccggcctgtggttagccctggcgacttcgcagaaagggcgactttctcattctgggcgagcgtgatggcttctcgatagccagatacacacatctccatagcctggatcgctcaaccaaacgacatttaagcccgattagagttgtggacaaagcgttgaaggaaggatctgaaaagtggaatgagaggaatggatgagaatgttggcttacgtcatgccatgttctgcccgtcgttccctcactggccaatctgcccatctccaatctcttttcacggttttcaatcatcgcggccaacaatcctccgtactctctagccgcttctttgaaggaatctgcgctctcagtcttcagtgcatcggcccaatctttcgtgccgaaaggaagtcggaggagaagaccggtcagatcaggttgaactagatcgcgtgttccctcggcatcaagaccgacgacaggtagaccggaagcaagtgcttccaacaccacttgacctgagtgcgttgaaagtgttgatgttcaataccaaggtcgaaaacaactaagagataagggagaaaccccggaaagaatgaacgaaccgaaagtctccgtgaaactggggaaagcaaacacatcggccgatgcgtaaatctctgccagctcgcttcctgtccggtgaccgaggaagacggcgtcgatgccacgggatgtacaaaatgtttcgaggtcaattcgagcagggccatcgcctgtgaagaccagttttggtggaataggaaggtaagcgtaggctgaaagcaaaaggagaagattcttttcccacgagctggaaatcataaagaaaatgatgtacatgattagtcggttggctgctctgaaagtcaagtggaggatggcaaatacgacgaacattcttcccacgtatagcaacgccagtttctcgttcttgcaatcctcctcgttctccttcccaacccaaaccgatccgatcgcttttgcagaaacatcctctgtgcttccgaccccccactcttttctcaatttcgtgcttcgtcggttcggattgaaatgcgtcaggtcaacgcctctagaccagagtctcgagtcaggaagagaatgacccttcaacatcgacatggtcgaaggtgacggacacaagtaaagtttgcacctgattacacgaggacaaacagaagaagccactgtcagcttccaaagttagaatgctaaaaagaagaaggacttgcttttgatagagccatcgctgccaaacccagatgatcggttctaaccacggcaaaccaaacaatgttgcgtacgttgcaagattggtatgataactcgctactacagcaccgcttactccaccacctacgcctggtccgtttggaccaacccactgttcgcctgcccaacctaattcgagtccaatgagtgtttggccacctagccaaatcttgggagcaatcgaacagataagaaaaaggattccaacgtttagcactgatgagatagaagagtagaatgggcaagcgagatatgcagcttactggatcctatagatatcgaataatgagattaccaagggataatcgaggaaagatagtcagtaagactgagaggacgatctggcaaatgaaggttcgggcataccaccatatggatgacatccggtttctatgatcaatcgatataccataagatggatagcaagacggtgtttagatgagaatccgggtttagagattatcgaccggagtatcggtcatgagtagagtaaacaaggaaggacgaacgaaatcttcgatagcatgcatcagcttaggccgaaggaaatttaacctgaggccaggatacaatacgagtgggattcccaatgtgccaactaacgggtgggaagcataatgcgactggcaaggaattttccggtatcacccaggtgatataacggaaaacagtcaggtcctcctcttgataagctacacttggatgcgcgaggagagcataccattcctgattctggtccacacaacagcgcttcgtggccttccttgtgaagatgttcgaggagcctggccaacgttcgggtgacgccgtctactttgggcaaaaagttctctgttatatgcgggtgtgtagaggttcatggaaaagacagggagaagaagatttagagccagaaatgaacggaaagaacggtaatccgtcgagaccagcgatagacctgtatagaatagacaaaccggtgacgataacgattctgagctttgcagtccccccggttcccttttcttctaaaggaactttgtggtccaatatcggttctgccttctcaatctctattggcactttgtcgtccaaatctcctgcctcgagcatcggtaatctgtcaaacaacggatcggtctcgaccgccgcgaacgttcgacgaggcgaagaggaggaggaggaggaggaggagg

SEQ ID NO: 155 - DNA, 22479 bp, Xanthophyllomyces dendrorhous
ggaggaggacgcggaggacctggatgggtccatcttgctgattcagaaggatgtttatggtgtcttataatcgaatattgctgtgattgctggtgattgttctatgtttgacggagaaaggaagcgaagaaaagagaagagagaagaagatgaggacgaggccggtgtgttgatataggagaactaaggaccgacgagatctggtgaagaatggagaaacgttcgatgacgagtgagtgtgttctgtatgctgtgtgtgtgtaggctcaaaggaacggacctttggacagatgaagagatagcgagtttatctttcagccgatctttataactttcgttcctgaaggaacaagcagtctgtctgttgttgttgtttaggagacctctctctcctgctacaggatgtggtggtcgagagaacgttcgtttttggtccttcctatccggacgatgcggataatcctagagaaggtgagctatagagtatttgagtgagaatctggtctactcactacccaagagaggaacagcgacgaacgtggaaggtttttcctcctcacaacgcgcgcgcgtgtccaaaaagtccgacgacgcgaatgatcgcgacgtgacgcgtcatgaattaaccctaacagccccaacggaagagggtcgtgcgtataaattttgagcgttcttgtctttctccttccctcgcccacattcgcttcgccttctcagcatactcaatcggacgtaagtgtcttgttctttccatgtttccttctgcctggctctggtgtgcttctttcttcccctttccattggtcatgatgctcttgactcgctttacctttccaaatccttcggattttgcggatacacttttttatgtcaacctgaactacaaatacctctatcattccattctccattttgcttcaacgtttgctaacaccaaacatttatgaaagtaaaagttgtaacgatcgctgaccgtcgttttatgtgctctctttttgactggtggcacggttacccgaatcttaggtcttgtcagacgttggcggtgggcttggcatatatgaatgtattcctgtctcaaacattctgttttattttattttcttactcttacacgtgatgcgtatacccctcggatccaaatcaatgattgccttgatcaccaaacgacagaccttgcagttttcctcaagtaaaggaaaaaaaagagaggaaagaaaacgggactacaacagacatctcttccttgtttatatgttttgacaacgtaacaactcgacaaaatactcttctctatattcaattttgaggaggaaaagataaacaaagatcaaactggacgtcattcgagaaataagatgtggtatacgaaacgagagttgtctactgggcaagagtgaaacgccaagcgagataaccaacaaagacagcgagcggaaggaagtacgcaagcgagctttttcaaagaggtggaatgaggtaaagagagttccgagcagaatatcagtctcaacatctaggacagatgactagaacagacaaggaaaattaggaaagaacactcacgcgccctgtcgcgaaggggaaacaggcttggttccgggtatcgacttcttttgaaccttcttgttcacctatagttcacacgtacacgagatcagtgaaatcgtgagtttaagaaaagacaaaatcggtatcgagaggagaaaagagatgctcaccactccatcgaaatctccaacatacatatctttcaacaactttcttgcctcctcggaatgtcccacatcctcaaaaggctcagtcgcatccttacctgtttgattcaaaccagtgtgtgagtgaaatgatttaggaacgaccttataaccttttgatctcgatcttgaccatgaaaacatgggtagggtataagcaagaagtggacataccagcttcactgatgacaacctcatcacctggttaaacaacgacaatcatcatggaaacacaagaaatcatcaaatctcaatacatctgtaggagaggttgatccaactgaagagaaggaaaaaaaaacatacctccagggtgctcgtcgaggaaacttgtcacatcgtaaactatggttgacgtgtcacaaacgattccgaacaacagcaaccgatgaagcaaacaaaagtacaaaaatcacgatcagccttatttttcacaattttatcagtaagccaacgatatcggtcgatacatattcaaaacagagagaaaagacagaagaaaaacaatgcgaaagtagaaaaagaggaaggacaagcttgcgggaaggaaagagaagaatcgaaccacctacctttgccgctgatgaccatccagatatccttgggatccgagtgagcctcaagctgctcctgggtaatctttccagaatcggacgactctgccggggctggctccgacttaacggccgggacggactcatcagggttcgtggacattatcgacaaagtgattgagatgaaacagtatctagaaagttgggtggtggaaagagttgggcgaatggggcgaccgttgattgggggatgatccagggttgtttgattgaaatttgattgccttagatagcgttacatagtcttctctgttagcggtcagccattctagcggctcacatccaaatgagccaacggcatccatccatcaatctccattgacatcacctgttgaactctgtcctttctatctagtatacgaaagaaggagaagtccaaaagaagagaaaagaagaaatcgaatagtttccacataaaagaagaagatgagcccacctttggctcttgtctcaagtctgatccctccatccgggatctcgcacgctctctttcttcccttcacccactccgtcaatcatccactgccgacgcctcccagaacggtatactcttactctccagcagttattccaggcagagtcattaccaatttaattctggctagagggcgtagaatcaacctgtttgaggttagagaagaacaagttgactctgagcttggcggaggcgttcaggccagtacgtctgttaatgggtcgaacactcaggtaagttcatgttcgggcttctacgttgtgaaagaatgctctactggcttcattttgtatcatgatatccatgtctatttctttccttcatacaagagaaaaagttcatccgatatagtttcgcaagacatcttccatctttgcgaatactggcgctaatcagtttctttctctcttcatacatctctacatttatctattctctcctttcctaaatgtgatagccacgaacaacgctccgtctgcgacatgtagcttctcatactgcttacggtcatgttaccgggctcggcgcgctccaaacactctcaacaaaggaggatgggctaagcagattggttctcagttttgcagaggccaaggttcgtttttatatatctctcgttgacctgccaggagtttctaggccatgaaacatcggtttctatccttcctgatctcgttactcttggactaatcattccttcctcggaataacacagatggcgattctagaatggtcggacgccacctattcattctccaccgtctctttgcatacatatgaacgaacaccacaagtggtcagtagagattgcctgcattctaggccatttcagacagattaatctgatatcaacgactgacctgccgagttcctatcagtcgggtgccgatccagatacagaacacaaccctcttcttcgaacggatcctgactcacgatgtgctgtacttctacttcctggcgatgcgctagccgtgcttcccattatgggtggcatgttgcacgatgaagacctcggatttgagatcgaaggaggaaagaatcgaagagagatcccatacttgccaagttatgtgatggaatttatggagctagatcctcagatccgacacgtcaaggacatcgtcttcttgcccggtttccattcacccactttagccgtgttgtacgagattcttccgagttggtcaaagtaagtttgaatcgatggaaatcattctgacaagacagtgaacgatctaacaattactggttgtttccctcctaatatttcgtatagtcgacttcttcaggacaagccaacgacgacactttctatgcattctctttcgctctcctcaacttcctcatcctccacatctattgcgatgataccaaacctcccttcatcgtgcagcgcgctcttcgcctgcccaccttcaatccctggtgttcttattttatcacccaacatgttgatccacgtcgatccatctggaaataccatcgaatggacggccaaccggtttgcaggctacgaaggactacgaggagccgaaggtcaaggatgggaaggtctctaccgagtctggggaacaataggagaggataacggctcagaagagaaggaaggccatgagggtgaagctagtgggctccggttggaaggtagcagagtcgtctggttagaacaagcggatggctccactgccacaggagacgttgaagctctgctaatctccaaggagggagaggttcggaagattgtctttgagaaagagggcaggatgctcgccagaatgaaagttctcaaggatgtgttaggtgtgggcccaattcctgctgaggcactttgtgtgtcgttgggatcaggatcaagctcatccggtaagccggacagtggggagagcgcactatttgtaggcggtcttcaaggagattctgtactttatcggctaggaaaggaatctgctgtcggtaacaatcctactcaacctgagatagaatcttctataaacagcgtcaagacagagaacgggcaagaggaaatagagggggagaaggaggaggagggagaggaagaagacggcgacgatatggatgttactgaaggtcagtatctgtcttggtttaatttgtcacgctgaataggatttgcatgggtctcacgatcgaaaatcattctttgactctaaatcacaaccaattttcgagatagatttatacggaccctcctctccaaaaaagccgcgaaacgctcatctgacgacagcaacgacagcctcactcgacacaaatctactttcgtctctttacacgtccgctttcggagattcagctggatctggaggaaagaacgaaagactccgttttgaggtttgtgacactttgaagaaccacggaactatactgggaatgacgtttgggactgaagttggagaagtaagctcttttagaaggaatatatgtacctgttcttctgtgcaccttcgagatgtttttacatggctgacgctgtcattgcatctggttgcgcgccctgctcgactctagcatgcaccgaatgaccctcagttacttgctttgggagggtctggccacaccgcatcattcaacaccttttacgtaagtagtcaattggatggttcatctatgttctatgttgaatgtgttgtgagacagccaaccaacgaaatagaaccatgagctaactagcgttcttcatcccaaacaacctatagaaagacatgccggccatgttgagaagaaagccgaacgcaatctccggtgcgcgagggatctggtcgataaatgtaactgtacctgttcctgcagctacgcgcggaaagggcgcagcttctgcgatcaaggacactgtgttggtagtcgatgaagatcacaagagcggacataccaaagtgtgtttcttttttccttaagaaagcacagacggtcacaccactcattgcgagagacgagtgacggatgttctattgaacataagctgatgccaaacaatttgttcgattgacctttcttctgctagatcttcaattcattccctctgaaaggagatcctgtcacggctcgacgaattccatctgcaaccttggctgttggggaatttttcaaccgagctcgttttgtacacgttaccaacagttccctcagcgtcttagaaggaggtcagtttttgctcttgtttttgtcacagcacacctagatgttggagactaacagaagttttccctctacttgaatttgactaacaggtggcagagaacgatactctgttagagctccggacgacacttctttcctctcagcaacagtggccgatccatatgttttggtacatctagaaaatggatctgttcatttatacgcaggggatcctaccacggaaactctaaatcgcattcaagcggatttcaaaggggtgagtccgcggatctcttcatcaacacgatccatcaccaaattggtttgatatcctatcttgatattcacataattcatgaaatcgtattttttcatcaggaggactgcgttgcatccagcgtgttcacagactcaacaggtatattttcttatagactacgcgtgaaaagcagtccgacagccgaatcagccgatcagatggatgatgacgatgagaacctctacgcagaggtggaagaggccaaaccagcggctgttgtggcagcacccgaagctgctaaacgacctactcagtgggctcttctttgctttgcagacggaaccattcaagtaagtctagtatcgtcacagatagaaaattaaccactacaatgaagaatggcaaatcaagctaatcaagactgtttgacctttgtgtgggttgtcattaaaggttcgaagtctccctgagttcaacgtggtattcagttcaggcgatctagcaaatttccctctcatcctaaataataaagctggtaaaccaagaactggagaagaagtttctttgacttcttcccctccagcaattcaacaagtccttgttgctccagtgggaactttttcacctcaaccgtatctccttgttagtttaccattccatttcgtcaaatcttttgtgcttaagctgatcaatccctgctcgtatttcctttttcagttccttacaactaccggtcaacttatcatctaccacatagttctagcctatacccttccgccgtccaatacttcggctgatcccctccccattcgattttctaaagtcatttctcgtgccttactcccacctaacatcaattctctagctccttggtctcttgttccttttgcgcgcctttccggtcgaacaggtgtcttcttgactggcgagttccccctttggattgtagcaggtgaacacgcctcgattgtgttacacacagtcgatgaaaaggtcgttcacgcgtttgctgcctcgcccgccttcggagggcatggagaccgattcttattatcgactggagaggttagtctttagccatttgttgtgactccactaattcggtttcatttcagatgtgctgacttaccctcctttccttatttgaaaaccactctatctcacagggccctaaagtactagagtttcctaaaaatattgatatctcccaacctctgccgacaaaaagggtgtctccaggcagaacatactcgcatgtagtgtttgaccctacgtcatgccatgccgtcgccgctggtctcttctcggtcaaatacgttctcttcgatgaggatgatcaaaaagtccgatccaagacgggtgtgtcatttctttgcttcaacgctctcgcttatgtcgagatttactgagcatgtggtttcgacatggcgcgttctcggccgggtgcttacaaatggaagtggacgcaaggctcatgcctatgactgaacggtcgtctttggagctcctcaaattctcttccggagaagtcatggacgggtgagtcgtttctttctttacaaggtccttatacatctgaggacgactattgaatggctcatcaaaacatgaatgcatcccggttaaattctctcgcttagatatgagtttgcggacaacgaaaccgtactctctctatcctctgtaaacctagaaacaaagtcctgtccttctggtcgaaaagattacatcgctgtgggtacgggtatttcgagaggtgaagacctagcggagcggggagctgtatgtcctttctgtatactccattcgagcatgagaacggggaactgatcgtcgacgagctcttcaatagacttacatctttgaggtagcagagattgtagccgaccctgctcgaccgcaacatcaacatcggctcaaacttctgtgtcgggacgactccaagggggctgtcacggccgttgcagagataaacggctatcttgtttcatctatggctcagaaagtaagcattttgattgcacttatatcaagcgcattaagtctatatttacaaattatgtcttgttttccactatagctgtttgtgaaggcgtttgattttgaggacagactgttgggtttggcgttcttggacgtcagtatctacgtgaccataatttcgaccttcaaaaacatcatcatgatcggagatgccgttcgaagtatctctttgctcgctttccaggtcagtattaattcaactattcctcttccttcctgatgtctagcccgacacaatatccagctgtgtgcttctgtgccgttgggaatctatttcctgaacttgtgtacgactatttctgtaggaggagcctttcaagcttgcgttgatctctagagacttcaagcgacggcagatcatctcagcggacttcttcactgcccacggtgaactcgggttcataatctcagatcctaagggtgatcttcggacacttgagttcgatcctaatggttcgtagctttccttccaatcttaccaaaaatcatttgtgcattatcagcattatgcttaacacttttgacatgatatttgatagatgccgaagcggagggaggccagaagttgatcttgcgatcggagtatcatcatggttcagaactatcgtctgtcttgactgttgcgcgacggacgaacgagcaggagcttatcgcccctcaaacccagcttctccttggtatgttttgacgtcattcccatttgatatatacttgcactttcgacttggctcatcagaaagcataacttccacggtattgtcatcaggctgccacgatggatcaatcagcacgatgattccgatagatgatgacgtttataagcgaatccagcttttgcagagctcgatgctcagaaacattcaacactttggagggctcaaccctcgtgctttccagtgcgtgcacacaccctcttgtttttcaccatctcgttcagttaagtttcaggctgatttcggattttgtttcgtctttgcttaaatactcgaatataacagtacggtccggaacgactcaatctcacgaccgttgttgaaaggaattctcgatggcgatctcatttttaacgtgttctctcttctccccaggaatcaacaagagaagatcacacagcagattggaacctcggtcgaggttgtgttggaagatctagaggagcttcgggcagtctggtgatcatatagatacatgtatagaaagatagttctctcgacgcgtaacatggacatgtacacgtccagccgcgggcgcgctcgcgcgttgaaccaacatctttcaatcacctgcttatcgatctgcgtaagaacgatatgatgaatccctaagatcatcaaccgattattcttagtcaaattgtacaagtatgcaaatgtgctgaagtgtgcgtcgcgaattagaaggatgtagaagagaagataattctgaagtgtgtttgatgaggcaagagcgaaaaagatcgttcaacattttccgttttgtcaacgcttgcccatcaatcatcaacctctgaccgtcttcctcacagccacctcactaccttcccatctccgcaccgtcactcgcacccgtattgattttcttatctcgatctttggttcctatgctgctttcctctaaacgactaaggtcgtcgtctcccggccacgtgccctcctcgcccctggatcatatctctaaacgaaggaaaccaagcgcttatccgaccaacaatgacacatatcaggcgaacacctctccggcttcgcattcgatagttgttgattcccctcaaacagctgactgcactatacttcacaactcgtcagcatcacatcctaatacgtatccacaagaccgttctcgttcacagtcttttcaatcgagccagcaggctctaccatgtacgccctatcaacccgtcgcctcgtcttcctcaacaatgatgacaaccaagaccttcgcaacgaattcaatggacgcgagtgtcccagtaaacccagcagacgcaacatctcaatcatctcgatcaaaagaacactggcagactccgattggcgattcttggaaacaacgacaacggagaatccgtcctcggccatctcgacacgcggcttcggttaatcatccaccggacgacttcaggactccactaccctctcaacatggactaaaattacaactgaatgatacggaggaagaggaagagaaagaagatgaagaagaaatgagcgtgtcttcagtcagtcatcgattgcctgcttatcgaccagagcttggggtaacacaatacctggaagaaccgaggcgcttgtcaagttcaagcagaatagactgggtggatcaggaacctccggacgaactcaacgaaaatgacgaggaggaagaggaagaggaagaggaagaggaagaggaagaggaagaggaagaggaagaggaagaggaagaggaatctgagattaagggcgattcaccttacgctcctatgaaccgattgttgtataccttggttagtgatagatatctccccattaccacacgaagcagcacacatagcttatttcaacatttccttgacggaacttcggacggcatctagcaccaacaacgatatccacagacgccttcaacatctccaacagccgcaatcactgtgccaacctccccatgttcttctcccttgtttgccccacctacaccgaatctccgaccaacataccgaccacacccgctctccaaacaaaccagctcggtttcttcgcttcaaccaacgatacgggcaaactcctcatctgaggttgagcttatagtaggcgcaggtagtctcagccgacagaaagtggccgatcaagaagtcatcgaaggacgaacaatcaaagataatggagaaagagagcgagaagaagttgagaggagatatgaggtggctaaccgactgttgggtggcttagttctaggaaggagaagaggtcgagaagaagttgaatagcgtgccgcatcaactcttcttccatgtttcccatttggtcttgtcgcatcctcgcatctgcatctacatatgaaaaaatctgcagctcctgtcatattgtacgtcttgttcttgtctacatcttccaaaacacactcttcgttaacgcagtccttctctctacgtgcgccaaacaggaaacaatgcgtgccgcttcttctcatctcaagtgtccgcaaagcttgtttgttcctatcttgttcaatttattattcagttctcatttgtatgtatctcactatatgtctccaacatttgacttattgtctaacttgacaatccattgaacgcctcttctgttgtgcaccgccttttcactcgtcaggcttgagcttctattcctggaaatccggagagcttctcttaaatggatcttctctgcaccatgtttattttctctctacttctactatttttctctcttttctccatctttgtcttcaatccactgcattgcgggttcaactgtatacctttaagaagtaaccctacattttcatttcctctgtgttcttcatcgatcgtttaacttttcttaaatcatcacactgtctattactctcttctcgcatcgcccacttgctctgtcatctcttgaatgtccgtttctctctttcttccgactcccaatcctattcaattgcatctcctgtgatttcgtttgctagagttgacactctgtggatgcttatgtgattccccgctcttcaactcgctaacagatgtcaactcgcggtgttccttgcaatgcacattatcattaacgattcgtaacaacttccctataagaccgtcgtcggagagaaaatacacaagatgaggttaatttcttaggttcgacgtctcgacctggaacgagtaccgcgtctcgacttttgagaattactagcaccggacgatctgtttggcgcagttgaagtttcgccgtcccattgttctaaaatggcccagtcttcttcgaccgttcgtggtcgtccctatagggcatgatgtgaaaaaagtattagcgattgctgcttactggaaaagaagaaaaaaaggacacaaatgggaaatacaaaccaggtcaggcacctggattcctagggctttgaatgttgtcatccgatctttggcagcaactctctttgcagccgctgaaatctcagccgtatggtcctccatccagcctggtccaagtccagacagattgacttttgagtcggccgctatggagtagtcagatgtgtcatccatcgctgtgtctcctttgaacgaatctctggcgaatgaaggaggaagttgttctggaggagtttctgagtcgtagtatcccggcgtgtcttctggttcagccgttcgagaaaggttagattgagacggagaggtaaaaggattagaggggcttggttttcgaatatctgatcgagggaggtaatcagcgtatgttgctgggtcgatctctagtgcgccttcgagttgggttggtttgaactccacatgggcgccgtctacgatctcttctccatcgaggtattcaccgtccatcgaccaagcctctttcagtcgaacctttctttctggtacggccgaccttccttcatcgtcaggatcgatctcgcccgctttctctaggtgacccaatgcttgttgactctctggactccatccatcatgctcttgaaggaggctctccagatcaactggttcctccgtattgaaccccatgatcgatctcttatcccgctttcgactcgtcctgccgggatatgccggaatatctactccaagcgtcctcatcagcttttcgacatccctatactctatcggagtcattttgtccaacccctggactttcccgttgttgatgataattttattgactgtatggacgggcttaagtcgactaattccccggtctcgcttgacggatgtcttaggagtatgcgggaatgcgtctccttcgttggcgtgccgggcatcgtagaagacttgtctgccgagcgattttgagaagacacgtcgttgtatctcacctaagaagcgcaaatttatggaggtttggtttaatcgaaatatgttaggaaggtagaaggagaagaaaggagaaaggaaaacgaaccttcgggagtacatgtgtccatctcaatatatcctttatgatggactggcttctttataaccctaccccattccaaaatctctttccttaatatttcctcattcaccttattctcctctccagagctactcagaccttcgccctcctgaagagtctcgtaaacaccatccggacccaatatcgctctacccgcctgagattccctcagcttttccgattcctctctatcaacgggtccgtgtctaccatgacctctagtctctggctcaacgactggccgcggaccacgtcgaatgacagtatagacgtattttgtaggaacaacggctcgtttggagttcttcgtcagccgttgaaacgtcggctgggaaacgttttggccaaagtaacaggtgtcgggggttgctaggagaggacatgtcaagtcgtgtgagcactgcatattcaagagggaaagaaaatcacatcaagcgttaacgtctgttatataagccaactcaacaagaaaacgaagaacaggaaatattgacaaaccggtgctattacatgcgcgcccaatactctctcttcttctttcacgagcgcgccgttgttctcttccaccttaacagccgcctttgacagctcttcctccaacttttgtttctcctccgtctgaagcccaaagtccatgtcttcttcgaattcgatcccatcaatcatgatcttctcccttttccttgattcgagcctcttcttctctcttttccgaagttctcttcgttgaatctcggctttatcctcccacccggttggtccccattcgagctgttcagtcaccgacgatgatgttgataattctgtcgagtcggctgttgaagacggtacctctctcatctctgacgaatcctttgctttcttgacctcctcctctccgagtctcagtagaaacttccttgcctcttgaacgacttcgaaactatccctcgtcgcgtgttccaccaggacgattgtctctacccctgagttccacatctgccttaaaattcttcttctgtccccgacatatctcactccagtcaggtgaaaagcgcaaagtccgatcgatttggttggtcggatggtcaaaccaggaggtcgcgatttcaagtatgaaacccatgatcggtaatacagatttacccaagaggccaccggtccaggcgtgtttggctcaagaagatgtttagagagatcggcctgggttcgggaaggttcgagttgaatgtacatatttttattctgaagtgatgagggaaaggtcgcgatggatgaccatgcaccggaaccatgtttggcggcaaaatcgatgatctgaattcctccttcgccttttgaatgtctagcagttgtggcttgatcagatgtagagggcgcggatgaagaatcggcgttcttggagttccagcccattcgagattggacctcgcgcatgacgttcctcaagatcgcgtactctgtcggtaactgaccagccgcgaaagctaacaccagttcctttgtggtctccgatggcatcggttttaacggcaaggttgccaagtcaagggtcttacctttctttggcttaagaagatgtttgtttataggtttgatgtctgctcgagcttttttaccggttttaggaggttcggatagtaagttgtatggggtgttcactttaggtgagtttagaaagagtttatacgtctgcttgaacacctttgcgctttgctctgatggccgaaacagagaccagcgatcagtactttctgagcaatcaacacgcatgaagaacagaaatgtaattgaacctaccagcaaacagaacgtcgagtttgttttccaactcgctaggcaactccaccgttggcattttctttgttccaaaaactgctgccggacttcttctgtcctctcttctctccacatcctgctctggcacatcatatgccatgagcttagattcgtaggcttcatcaatgaatccatatccctgtttgctgaatccagatatcgacccgtctgaaggtatcgaaactgaaacagaaccatcggaagggttcgaagcgtccgaaactggttgagtgtcgaaggtccggcgttgagctagcagtagttgacccggatagtgatggacgtttcgattgaaacggaaggtcgagcacgatcgaggtagacgaagcattataacaagaacccgtctgcaaacccgacgtccaagctagatagatgcaatcaggccgaggtgagtgagcgtgtatgtgtgtatgggtgtgtaatgtgtgtgtgcgctagagtgattcaaaaagctttcttgccgactttcgagatattgcaccgctttctcctcagtaatacaaacttgccacaacgtgatccttttcaaatacggatagctcccattcgattaacttgcatacagtgttcattagatgtatagatcaccgaggtgatgtatgcgcgttgaaaacaaacggcgtttcatattagaagattttatggtattgaatcccgtttctaccccaattgtcagttccttgggacctcttatgactacggcttgtgcacactcagacgtctccttccctctctcctctctccttctacgatgattcccgtaggtgaccctgaagagacaaccgacggcacatagcctgtcgagatcttgcttaatgatggtttcccatgccccaagctcgaactagggttgatgtggttgatcggagagaacatgttggtagggactggcggcggcggcggcggcggtgagattccgtaaagaagcgtactgccgacaacgagagtgctaccgagaacaaacccgaatgtcacgtggttgttgaacaagacggttgaggctacaaacgcaagaaggatggaaagcgaggttgcgaagcctttgagaatgttgtctgagtacttgatcacgattgcctgcaagagaggaaagcaggatgacgtgcaggacaatatggaggagacgtattgagaggcagctcgatcagagtccatacaataacatggataaaatgagtaggtacaacaacagaagaaaatgcactaacagtgagcaatcctcccagaacctgaatccagattgttgtccatgcccagaaagtgaacccgtcgaacagacccctaccatttaggagtaacttgatgactggcaagccggcaggaatgagcgagaatgccgagagctgtatgtttctgatccaaagatctgctttggatcccttaagaacaaactcgaagtagacccctgcgagaccggaggtaaaacaggcggcgaggacagcaaagaatcctttgaacgcgtctccaccttgagttgtattacttgacctggacgagccggacgcagaggaggacgaggtaagactctgaacttgaacgactcctacacccagggcgagaacgaccagtgaaatccattgtttagatgacagctttttcttgaggattaaagcagagaacccggcggttgtcagaatcttcatctggtagagcacagagaacgtggcaacattcaagtttgacgctgcagtatactgtagtgtgttctgaaggacgtaaactgagaagagttaaagttttgagacaatgttaacccagattggcgcgcatatagtctagtcgaaggaagaggataaagacatacgaattgcaggaatcgacaatttccatgcatcgtccgagatcaatgccgccctcagcctgccaacccttgcccgccaaaacttcacctgtctgatgccaccttcgaggctaactccatttagcctaaactcctcgacaagtgagccctccttgccaggttttgccctacccagtgagccggcgagcgctgggagatgatcagaagatgtagaggacgagagcgggagatgaggcgaactcgatgaagcagggattggtgtttggtgaaaagcaacagcgagggagatgagaagcttgagaagctcattcaggaacacagctgtcgaggctgagtatggtccagatgaggatgcgtgcgtccgggagtatgacatcgttatgcttagcgacgcattctgcaaagcgagcgagaccagtctgtattcatcagggtttggggcgtgagatcagcaggaccgtccatccacgtctgatcgtattctgatgtacagcgactcaattcaagggcgtagaagatgtaagatacgcacgatatatatttgaggggaaagccaaagagctctggtgaaggggcatggccgtgcatacaagagaatacagctaagttcgttttatgtcaaggagaggagagacacgttgagagagaggcaggacccttcctataagactagaatgagaggtatgtcgaagcgagaagttcagtatcgatcgatgttattctatcctctgaagggagaatgtaaaaaaagaaaagaggaaagagaatgaagagtgaatagaccgtgtctggtttatcttgtagaatggacctggactattaaccgcgtgatggtttctgaccgcatcgtctccaagcagccatggaaacaaacgcaatccaaggtgtttaccaatcatcacaagaagaaagactcacggtgttttaattagatgcaagactgctgataggacttgactggtatgtgaggttatgaaggtatgctgaggacgaaggggtatgaggaaaaacgttgagccaaccagagaggatgaagttgaggaagatgttgacaatgaagatataggggaaagataaatcaagagacccgacaggatggatgatacctggactcaaaaaaggacgacacgacaatgatcaactgagataaggagagaagaagggaaagatcaatcgaagggagagggctgtagagaaaagaggatgggctggactaaagaaagcgaggaggttagattgttttagattgccatgtaattctctaaccgctcgagtctgggctttcggcctaaacgctggaatgatcatctcagatccttttttctcactaccatggtcttctttgttccaacctggcgtgcagcacaaagcagtttgattcatatgttattttagatagctgcatatattcatcatccaaatatggagatacctcaggacaatccatggcatgtctagtttgtcagactgaattgtaggacaaaagccgatcccgtagagcccgagtctgaatgtcctctgatctaccaaatcgattggtcttgttcagttgtccaccgtttcgactctctacttcctcttctccttctcttctctcttcatcttcttttcctgtctacgttttccacatgtacaataaaatgtccgagataacaagcggcacactgccgcgatatagatctgtaggaatgcatgagttgcgtcaaagtattgacgtgatatattagacaccatgcaatacggtataaaacaatacatatcgccatcactctgaatcaaaacgtgacgtgtgtgttcgcgcgccagacacccatgatcgagcagtgtacgcgtttcccgatcccgtctttagctcaactctcgaacaaacggatatagtaaccaatgtcgagagtgttatgatgctgatgatgatgatgctgataccgatgatgatgctgttatcgatgatcacctgagagatagtaaacctctccatgaagtttccctataaagctggccttggtctaaccgtctcacctattttctctatcgtttccatcgttcattcactactctaaaccgtcagcgtcagatactcgatctccccgatccctacaatgaatatttcgcgaaccgttcttttcaccactggaaaacaactttccttcatcccctcttcttcccgcgctcccgctctcgctaaacgatcatacgccgggtccgatcatgccaacaccagcaaacctacccctccggatcaggaatccaaggaacctcagtcgagctcccaggcaaaagcctggactgttgcggctgttggtagtgtctgtgtacgtcccgctctaaccctcgatccttccctttgttgccttctctttttcttctgacaagaagatttcctcttctctatataccacccatagggcatcatcttttacaacttcaatccgttccgaacattaagcccgccaatcaatatgactggcaaagagacctctgccgcatacgaatctcaagatcactcccaaggtgtcaaggggggaggggggatcggtaaagtcgtcggtggatccgacacacagaatagggagagtagcgcttggaaaagtactgctgcaacgtttgagaacaagaagtaatgggtcttgagctggaagcatatgaactgtatctttagacatgactctgattctctgttgatctgtgcaaaacacattgtacaaaaaggtctaacggaaagatacacgttgctgagagatacctcgtttagacgttcttatgtatatcctcataaacaccaaacattcctccttcctgctccgcctgataatcagccgttgtggccgatgaggaaggaatctcgaacggaagaggcggcgcctcgaaaccagcagggacagggttgatcttgttctcgatctgaagcatcgtgcagaacgcgagagtctgtgggttcgtgtaccacgcggctgaggtggccgatttggatcaacataaaggggaaatgaagatgagaagaaccagatgcaaagtcaatcagatggtttaagaagccggaaaagaaaagatagaacaaaccaggtccacccccaggctcgtccaccgctggcgccgtcttccagaacttttgccaactgcccacctctgctttccctctgacatttttctcctcttcatccttaacccagccaagcccatttgattcgacccagcgtgcctccttctcgactaaaagtcgaagatcactttcggagggtatgcgaaccgatggatggggctgaagggagaggaacggatgcatagctcgggtgatagcaagccagtctggatcaaacgtgaagctcaatggtgtgtcaggcctggccgaggcagtggggatttccagaatcttgaagcaaagagaaaagacaaatggagacgtaaatacaagagtcttgaaaagaagaacaggagaggaaagggagaaggctttcacctggaggaaatccttgttaggcagacacttgtctagagccaaaaatttggtcacataatctttactagatcctgtctgggctaccaggtcgggtctctcatccagacggacgacctcaacctctctctcctcgctctccttcggtgaccgatagttcacatgtccttgcccctgttctggctcttcatcatcatcatctccatcatctagaagaatctcatccggattcgctgatagtcccggttggccttccgatacttcggccaattccgctagagttgatttggtagatgcttcatcgatatcggaaagcggtacatgtattggtgtaggtgctgaaggaggggtcacatagggagtctgaccgtcccgaagatcatcatcgtcgtcatcatcaagaaggatctcgtctggattgatcgtcgtacttgaagaaggaaggagaagcaggatgtttacattcgcttcttcttttgcgtcaacatcatcctcatcctcatccagaaggatttcatctgggtttccttccactcccgccgctgattgaatagaaatttcggttggtagctctgctctcaattgctccgacacagccgactccagatgtttccataccgctgcaaacttgacatgcaagtgtgcgctaaaccaataggccggtcgaagtctctgcaaaagttctaatagcggaggcgagcctaaggtgttttcctcgatctcttgctggaagaacggtttccgacggagaagcgtcggtaaatctccgtgttttgagatcgtgagcggccaatcatgagagagaaaaatgtgtggaatttgagaggaagaggaggaagaaggagaaggtgtaggaggtaggaggaggagtttggaaacgctgtgatgacgaatgtggtatactgatcgaagagtcgagcgatcaaatggtaccgtttcaaaaaagcctggtttggttcaagatgtacaaatgataggcatgaagagagggagaagttagttggacagagcacactgtaacaagaacgagcggaccgcacctttacggtaatcatgagacttgaagatcccggacgctcctgatattctaatcccattgacgaggaccgatccggatgtaccaaggtaatatatattcggagccagccaccctccgtgatatctgtagaccattcaagatagacttttgagctctttctccatactcttactttgaaacgactacgttcaagaaggtctgaagaggaagagcaagagaaaggcagtaggtgcgtggatagatgggtcaggctaaacttacagctcccacatataattacttgcttcatggttcccaccgatcacgatcgttaaaagaggagcaaccttctggccagagtaatacgagtggaatgatcccagattgcgaaatttttgaggaacagctagggattcgaaatcgtgtgggtttctgagtgcctacagacaaagattacgaccaggtcggccaagggtccagcacaactacatgagcatggcaaacactgataaaaagaaagtgagaaatatgctgagaagtttattgctcacttgaaaatcaccacaaatcaacaagagatcgactttgatccctttctcccgttcggctttgtggatggacgcgtaaatggcatcaagctcgccatggcagcaaccttctatggcgatctaattttcagttgtaaacgtctcagcagagttgataggcttggagaaagaagcagaatcagtgatatgaatggacagacgtgcatcgtggcttgtagttaggatgagctgtatctgaactgggaggatcaactgattgttggacgcggtcgacgtattccagatctacgaacaatcataggggttttctcttccgtcttatatatttcaggatcttcacttctatggaatcaatgtttcatgtcattatagtcggcatttcaggctgccatctcgtcgaccga

SEQ ID NO: 156 - DNA, 26129 bp, Xanthophyllomyces dendrorhous
  misc_feature (300)..(309): n is a, c, g, or t
ggaggtccctgacaacacaagccggcagtgcagtggcaaggtcatcgtgtccggccgtcgtgcaagcagaggatggccggacgggcaaggcaaaaagaagtaaaccagatgggtccggtggacccatataagtggttaaacttataagaacagatactacacatgatctaagccaaaaggccagagaggatgaggaaaaagaagaaagcggccatagaccggacgaccgcccgttcttataccttttcccatctcgactttcaccctcgcgttttcaccgtcacgcttgtcacgctgccnnnnnnnnnncccatctcgactttcaccctcgcgttttcaccgtcacgcttgtcacgctgccaggagtgataggctgacatcgggagtcgttcaggtagatgacgcgtatacatgcgaataaaagaagttctcagaggttagctagttgcagaaccgacatgaactgtgtgtatagctgatgttgtctgagcggctataaaatcatatgttcctcctcttatcgaatgaagaggagggaaaacaagtaaggccctatagggacaagatgggaaagatcgtgatcgcactcattggagcagccatctcattgataacatgaagcaatacgctgaacgaacaccaggttcattagctactctgtttcatcatgaatcacgttctgtatctcgaattcatgtacatcttcacaaagtgaattttggtcgtgtaacagttcttaacaaagcagctcgagaatttcaaaatgccgagacttactgggacttgacatcaaatatctcctgttcagctgctcgtttactgcttctactatacggagaaacatcgaattcatatgaaagcgcacgcatgtaagattcgatggaactctttccaaagtttctgatgagaagtgagttccctaagatctgatcgaaggtgagagtattgatgttaagaggaaagatattcaagtattaagatgacttaggtagcgccaggacgacagcaagcacgctaagccatctagacactcatctcctcttcaacttcccatcctttttctatacatcactctcaacagctctttcttactaatctcaatatggactacgacgagcttgaagagcgagacggtacgtgaagcttttattatctaaatctgtcgttgagtagatttgccacatatttggattctgctcataatttacgattcgtcgttttgctcttgtgtccgaacgaactctgacttttccatctctttcaatgatgccctctgcgatcgttttttcttggttcttctccctactccttttccgctcttctcatgaaaccaattttcgattaaataggagtcaggttctcttggaacacctggccttccagtagactggaggccacccgaacggtcgtccctgtttctgctctgtacactccattaaaggagagagaagatctgcctgaggtcaagtacgagccggtgacctgcaagaattgcagggctattcttaatccttactggtccgttcttctactcctgaatgcttgaaaatgattcccctgtgagattagacatccgtcttctctgaacaaggaagtttgagtcgtgtcgtgtgaagatcatgctgatagctcatctatatatttgcacgtgcctccctatcctctcttcctgcttgactttcgttagcactctcgacattcgaagcaagttgtggatctgtccgttctgcttgcaacgaaaccccttccctgctcactacaaggacattgctcccaacaacctgcctcccgagcttcttcctgcctattcgaccattgaatacaccctatctcgaccagctcaaatacctcccgtgttcctctatgttgtggacacttgccttgacgcggatgacctcaaggcacttcgagacgtgttggttgtcagcttgagcatgctacctcctcatgcgctggtcgggttgattacttacggaacgatggtgtgttaccgtgcctttattctgtcttctgttcagtttacttggaatgccataggactacaagaaagacagttctcactcacttgatgtctgaactttatatccgtcccgattggcggattaactgttactttccagaccaacgttcacgagctttcatacaccacctgtcctaaatcctacgtcttccgggggtcgaaagagtatgctccaaaacaaatccaggacatgcttggcctgaacccgtcttctcggccgactccccgacctgggcagtctatgccgcctggtgtggccgggttcgctgctagcagattcttgatgcctgttcaacaatgcgagttccagctgacaagcatcttggagaacctccagcgagatgcgtgggctgtcgctagtgataagaggccgttgagaagtacgggtgttgcgctgagtgtagctgtcggcctgttggaggtttgtgtgctttcaaatacgcgttcttttagacacagatatgtctgactgattgatttcgatctcccttctctttttttctctctcaaagacctgcttccccaacaccggagctagagtaatgctctttgctggaggccctgccaccgagggtcctggaatggttgtcggacccgagctcaaagagcctatccgatctcatcacgatatcgaacgagactctgtcaagcacttcaaacgagctgtcaaggtatgctcctgtgtctactttgaagctgtattcattcaatcatgttgttcttcgtgttcatttgaccttctggttctttccttcttgttgtcgttcgaatatcaagttttacgacgctcttgccaagcgagcttccaccaacgggcacgctatcgacatttacgctggttgtctcgatcagattggtctactcgagatgaagtctctttgcaacgccaccaacgggttcatgattctcgctgatagtttctcgatggctatctttaagcagtcgttcttgagaacgctcacaccggatgccaacggagatctgagaatgggtttcaatgcgacatttgatgttcaggtatgtcctctgaattgtttgggaagagtttaggtgaaaaagggatgcgttcattcgctgaaccatatcttccatttctttttcatttctctccggtggcattcagaccactaaagacctcaagatctccggagtcatcggtcatgttatctctgctgccaaaaaagggtcgtgcgtgggtgagactgagatcggaattggtcagacgaccgcgtggaaggtgtgctcgctgacgccaaagacatcgctcggcgtgtactttgaggtcaccgcgccccagggccaaccaacttcaactcaggtagggctcgtccagtttgtgacgcactaccagcactcgtcgggcacgttccgtttgcgagtgacgacgtgcgctcgaaactttgctgagccaggcggtcaaacaatcgcccagtcattcgatcaggaggcctcggcggtgctcatgtccaggatcgccgttttcaaggcggagattgatgatccagcggacgtccttcgttggttggacaggatgcttatcaggctttgtcagaagtttgcagactatcgaaaggaggaccagagtagcttcactttagcgcctaacttctcaatctacccgcaattcatgttccacctaaggcgtagtcagttcctccaagtgttcaacaacagtccggacgagacggcctactatcggttcgtctttatcgttttatcgggttttttttcctgttttttttctgtcaagtcaaagttgaccccgtacgttctacgcgcgtcaattcagtcatatcttgaatgcggaagatgtgaacaactcgttgattatgatccagccgacactgatgtcgtacacattcgacaaggagcctcacccggtgttgttggactctgtgtcgatcaagccggatgtcatccttcttctcgatacgttcttccacatcctaatttttcacggagagacaatggctcagtggaggaaggctggataccacgagcaggagggctacgaaaacttcgccgagttgctcaccgctcctgtgacggacgctcaggtacgaaaatttcgagttctattctcgtgaagttgtatttcagcccgactaagagtcgattcgctgtgtaattttcattgtcttttgctgtatatgtctatcaggatcttttgggagaccgacttccaatcccccgatacgttacttgcgaccagggaggatcgcaagcacgattcttgctttccaagttgaacccgtcgacgaaccacatgacgacagggacttatggcggtggcggtggaggatccggtcaggctattttcaccgacgacgtcaacttgcaggtcttcatggagcaccttaagagattggtacgtttttgtcctttatttcttctttttggtcgtgcattactccacggttgatctggggatgttgtaggggtgttgatgctgacaatgttatttgtggtttctttttcctcaggcggtcggcccttcaactagctagttgagtagtgatcaagatagattccgtgtttttatcggtcgacgcagctgtttcttttcgatcttatactttatgtgctcaggcttgtcggttggttggttttggccacaccttaaacagagaaataagaaaggtctgaggaagatggaaacaagtgagagatgcgtgaaagtcacgcagtatgaatgatctgtcttattgatatatatttaaaagccggggcgaatagcaaagtaccgacatagcgaagcccgggcgactacgaatgccgaagatgggaagaacgcggagggtatgaagaatggctgttgtcttagagataaaacgcaagatccgagaacctatccgcgatgatttcagaaacaaaggcttatttcatccctgtgatgaaatgaatgtgggaagggatgagcgtggtataaaaacgccggatgatctgtctgagctgcccggggttggaatatggattatatgaatacccactgcgttctgcacctctcgctcaattagcaaatcggttacgtcactaaatctgttcaagccaatactcccgtcagctggacgcttcccatgtcggatcttggtcgcgtccatgcatgcctgcctttctccgccgttgttctgatctgtaactccgagaagtcgaccgagtctgggaatgtttattttttgacgtttcttctggggcacagggagtcgccaaaatatctcgtcaccccttgcttgcctcgttgtcgttgtcactctgctttgtctgcatgcacatgtatgtaattaactaacctttgtcctcttcggaagtggcgaggatcaaacaaaagagatgcattgtccattctaacagtctgtatgttgaactaatctgtacatttgtgtgatgcatacaacgctttatttttgaatgaactcatcgtcccgttacttagatttcgttatggatcatcgttagcagtatcatactgtcgatcgactaggtgactctacactttattctataattaacagatcaaataacaaattaacatcctacccgttcgaaggccaagaagtgtcgtctacccgagtagtagtagctattctttaaccgggcaacggtcagtctgaccttgggatccatgggacttggcgtattcgcctcctggcttatattccgtgatatctcgttctccctgctctcctgtagatcgcctgtcttctcctaacaattttgccgtgtcagtctcggaaaagaaccctttccccaggttttttaaggatcagatcaatgaagggtatgaaaggttgagctcctggaaaatgaatgcatgtatgcatgcacatcctcttaccccagacaactcgcgtgccatccgcttcacctgtgtgatgctttcatatgttgtactcaccccttacctctttgctgttgctccttgcctcatgtttctctttgcccgtcggccaatctgctaacccttttaaaggatgacggctcattgaataacatcttctccatttttgtatatctcttccatcttcatcctgttttgttcatttgcttgccaaacattcttccgttcagctctgttcttcttcgtcgtcgtcgccgtcgtatccagctcttcgccgctcatctcggtttccctatttgcatcgctgctctgtatctgttatcgtcacacaatctctccttattctccccggtatcttaatctgtgttcatcatgcctgttgcaaagtccgctgaatcgctcgccatgtcatatgagaccaccgatgccgtgtcgagagctctgagctcgaatgaactttcttactatcttcccagcagagctaccggtgttaatgacatgtgggtcaattgagtctcctgtttgtatcttgacagtcaagatacttctggttactgacttaggttgtcgttgcgcggacatgattcgtataggtacctgcaccatcgcttggctaccttcgagcctcaccgtttcgattaccaaagaatcgttgtcatttgggctatcctgactggcagacatcctttgttggattcggctgtccgaaagacctctcaagagacctacagtttctggtgcgtccatattgatcggctcgcatgtcgtttttctggcgagcgcacaagctccaaagctgataggtatttcttttctctgctgcttgatggccactgcgcgcttgaacacagctacgatgcaccttccactgttgacgaggctatcgttagagcttcccaaaaggtatctttcttcgagaaatcgaacattggtgagtctattgccttccattgatctcatcagcctataatggactgacctcggaatccttctctcatcttcccgtgtaacagatcttgtcgctacttatcttaatggtcccaggcagctctcggcctcccgactggctcaactcaccgtcgcctctgacaattctggacttgctcctggtcaaccgagccaatttgaagttatcctctgtaccactcattatgtaggagacggcatggcccttcacaccttcatgaacgaattttactgtgtcatcggtggtgcccttagcacggaggagttgataaacttgttgaacacagagatgcaagaccgaagaatggtgagccctggaatccatctcgtcgtatatgcgcttaggggcggccatttagataactttattgaaacaactgccttatcactcgaatagcaaactcctttccccgtctcagcagaagaacgcctaatccctgcagaggtagactcacaagccaaacaaacactcaaaaaagtcgttgacaaagtcgccttccgaaactctgtgtctcgctctatcggcagccaagtccttcctcgagctcctttcccgaagaatgccccaccagaagaggaggcgatcaaaaccatcgtttccacccttgcgttctccaaggaagacaccgatcgaatcgtgaagatctcgaaagcacagggtggactaggtgtcgctcatttcttgtttgcagctgtcaacattgcctggattcgatcgaaacagggattgaacgagaaggaaccgatgctcttctactctgcgctttccttgagaaactcacttcgaccgactgtaactcctgggtcgtactttcacctcgctctcggttactacaacatcacccttccgtccttcctcttggcctcggacgtcaaccggacgttctggcaccgctcaaagtcagtcaaagcgcagacactccaagcagtcaagagcaagttccttgtcgggaagagcttggtcgaatcggacgagagacgggaccgagctatccactgggcgaagatcgacgacgccgaggctgccgtggccactgccgcgatcaaaaggtcaactgcgctcgcatcgacatcgtcagcagcagcagagtgggctatggaagaagaggctgccgagaaggatatcgattcggattcggattcggattcctcgatggccggctcgccggctcgaccggctgtggcgcttccgttgacagcacctcctacacccgaacagaccgttaaacccgtgatcgctgccgctcctgccaccccaagcaacagcccgttccttgggttgtctctgttaggcaaccttgactttatgtatcagcatgctcaattcccgtcgattgacctccaagcgttgacgaccgggtcgagacaacgtcgaggggcgagtttgttgttcgggtacacccttaaagggaaactctcgatcagtctgagttgggaaagtaaaggactcgagaccgagcagatcgaaaagatctggaagggagtcagagaagtcctcggcgaagtcttcttccaggaccctatcagaggagagggtgagggtgaagttagacgttgtgaatgtcgagtttgagaactggaccctttctacttgttatcgttgttgctaccaccttcggggacgtaggtgtgctgtccaatcattgtttagaccttctctaggttcatctttcgcccttgttcataatctcttcattcatatcttggttttctggtcttcactttgtcttgcttttgagtcgctcaattttactttgcttgtctgtatctatacgttccaaaccttgttcgtctcacgttgacactcctcgcttccaatttttattttcgttttaatatacctcttgtttcgctttagttgtcctctcttctgcttccgcaaacggacaagcacttttcggcctatcatctgttcccctcttgttatgaactttcattcaacacaaagaaaaacattttgtgattcttgctgtctatatcatcaaggtttttatgaaataaataaaataaaaacctcttctcgttccgttctatctagttttcatcattcccttctcagacattctcctttctcgatcatgtgtttaaattgcttcatgcttcataattcgtgcttctcgtctctcgttatttgttgtttgttctgatattttggtaatgaaaagcaaacgagatgaatggcgttcagacaatcaagagggttctcaaggtctcttgttctctttttcttgtagaccgcacgggttgtgtgtgggaggttgtttcaaaagaaaagaaaggagggaaaaaaaagaggagaggaagataagatagaccaagatgaaagaaagaacgaaggggcgattgaatgaacgatcatatagcacaaggtgaggataacaaaccagaaaagatatcatgagcgaaagatgcaaaagaaaatagaccagaacgagcacaatcacaagcacattcgagagtgagacaagaaaaaaagagatcatctaatccttctttgccttcttcttgacaggtccgtcatcgcccgactttttctttttcggttcatccatttctacatcgctctccgcttcttcctttcctccaccagcttcagcatccgagtctgattcatcagatgaggacgtagcggatcctccatcagaagaagatgcttggaagtcttcgtcttctataaaattgaacacgggttcccaaacagacaggtcagcccgaaatcgatacttggagatgcactctcatgaaggcttgagaattaaaaaaggaaccgagaataagaacgaaccggactcatcctcgtcgtcgtcccctccaactggcgcctttgctaaagcgaccggcttctttctcttggcctgtccatccttcggctgcttcttccttcctccattctcctcttcactgtcctcactgtcctcgtcactctccatgtcttcatcttcatcgctcagctgaacagtcaacacgtcatcttctgtcttgtctttgactttaactttacgttccatcaggaacgctttgatcggttcggcgtcatcttttgagagcgaggtgaatgagtagtcagatccaccgtccgttcggttcttgagtgagatagacatgtcgaatgtcttcgatgatgccatgtttccgccaactctgtaagaagcaaaaaaaaaaaatgagaaaggagaggtttggcatcgcatgaggtgaaaggaaaaacaaactaggaatgaacacaaagaaggaaagaggacacaccgagagaaactgagggtctggatattggcaaattcgacgaggagaggttgtttggcaatgaatatcatgctcttctccaagaaatagagttctccctgattcgccttcagattgcacttgacgacgttttgaccggatgtgctgttgatcagaacaaacggaaatcgaaagaaaaaaagtcagagatagagctccgaagaaaagatcagaaaaagaggacacttgcctgacgaaagatgaaggggggatgatcttcttgccagtcaacgctttgaagacttgactaacgaccgagaacgcaggtgcctcgtacttcctcatcaagttgttctccttcaattcctctctacattcggtcagatcaagagccggatcaaatcagatgagaaacaagaaaggacaagagtcagtgtacgctcattcacagggatgcgcaaaggagacataagactggatggtggagattatcaattgaaagtaacttactcggtcaagttgagctcagcatccatctcctcatccttggtgaattgcatgactaagtatgggtatcgagtttgaccttgcctgatagcagggtccaaaccaacctaagtgaatcaaacggaaacagagcgcaggaatcagatttctactgaagagggtttccaccacatcggtaaggtaaaaaaacgagaacaagagggggacttacgacaagctgtacatggatctcatctgctttaggtaggagaaagagcctggtgacactggagtgcataattttgtagtcgtaagtctttcctcgaagtcggaaatgagtgaggaacatgtcgatgtcgtatcgaccactatttagcggttcgagtcaagatgaagacggaaataaatatctatgagtggagaacgagcagaacgcaagaaagaaggggacagcgacaagaagaaaggtctgtacgaaccgaggagtgagaacgagaacctcgttgaacacgaccacgccctctccaccaccctcggtaatctcggctcgttccttgatcatatcatggaacgcctgagctttactgatttcctcattctcaccttcgctctcgcttccactctcttcagcctggccggggatatggaatctaagttcgaccagttcgtcaattgggcgaacccgactcttgccaccaccactagcctgaggaggctggactggcggagtaatctctaaagaaacttctgtcttgcctgcaatgttggagttggcgatggaggagagaggaatggtgaaagatggtttgtccgagactagaaatgcgaggttgggacctgttcaaagataaatcgatcataagaagtcgagtgagctaaagaagccaactaggcggtaactgaagtctagataaaaaattgacatgattagaaaaacggaccttggacatcgacttgaccccagttccatcctttgagcgaagtttctttgtgttcgagattaatgtcccagtgctgcttgatgtactttgcgattcggtcatgatcctctcgattgatgccctcaaacaccaatcgttcatcggatgtttttcgacctatcgaaatttggaagtctcgggcgacactgaaaagaaggtgaagcgtaagtttcgaaaatgacactaacggcatacatatatatgagtgctcaccgggtccagctaatccaactgatctctgcagcggtcaaggtgaccaggctctctttgtcatcttcgatagatttccagccaagacctgtaggagcgattcgaagttctaaatagacatggattggtgataaacgcgatgagttctgttggtaatgataacaaaaaaggctgagagagtgcaagaagaataccaacttcctaactttgaggttgagccaaggaaaactgaatcgagagagagagatcagttgaatgtaggatcgtgacgaaaagagagtatacagcggtaagaacatggtaaaacgaaacaaggcagcttaccctcatcaatctgtgtggtcgaggacatggtgtcagggtatgtgtgtgtgagtggttgccagtgtatatgtatgatagatggaatagaaagaggaaaaagagaatgatgagactgatgagaacgaattgttgggttacacgtcctcgacgcgtcagttgcgtaggacgcgtcgaaggctacaagcacagctgcgctccctgttactgctcacgtgtgcgacgcatatactactaacccccccggcgtgtgtactatctgccgtctagtcgattactcttgtggcgttgtcgcctgcagccctacgttctctagttgttttatccacactgcagcctcagcaggtaggacgatagacttacgatgatcttgccaatgcgtctgattgttcctccaaagcagctggaactcgagaacagtcttaacggaacagagagaacacggagaacacgggagaaagacacaagaaacccgttgagcacgttcagcatgtgttcgtttggccctggaatgtccattaggtttgtggtggatttgtaatagaatttttcctaatgacttttagtaactccgtattcttaagtttcctttccggctcatctcgtttgctgccttcgctagttctacagttggttcttacccaccacccaccgtcaacatccatctgagttctcatccagctagacacttgaatggcaatccaggaagggtccctcccgatcaccatcccttgctctacatctagttcaaacaatcaatacgacttttctccttcttccgccagacaggagtcatattcttccgttctgagcacaggtctactcggtcctcaagctgccaccaacgttccttccgctgccctttgcgatcaagcatccaaacgacgtgttcctttggcatccactgggtctcactcgagcatagcatcctcgtcctcgtcctcgtcttcttcggctgtgccttacagaccaaggtcatacagctcgtttggtccgggagaacatgttcatcctcctgacagcccgaatgatcatcaacgtcacagtccatcagccgacctgtcctcgttgacaaccccgaccggtgagattcagttggaacccgtagcgatctccaccagagcttcctttcttgccgccttttcttcctttggccttccccctctccctacattgaccattccagatggaaactctcggccagcgcccgagcccacctcggtcgaaccctctccggcatcttccttcctgagctcattttcctctcctaccatctcttctcaggtcacatcctcctcctcatccctctcctcgttcagcgcactgcttccatcaatctcatccctcgatgatttccctgtgtttgatgacaagttcatcggcagaatcctcggtaaaggctcaaccggctccgttcgcgaggtcctgtcgtttcctgctaaggaacgactgtcaccccctcaggcagtcaagatcgtccttcttcccaaaccaaagctaaagagcgctcgcaactcaacgggcgtacaagacgatgagctggcaacagagctagaaacagaaattagcctctgggcttccctgccttcccatccaaatatcctccctctcctttcttcggaacgaacacaagacgcaatctttctctttatgccctacatggtctctggatcgctctttgatctcgtccgtcgacatcgagagcacgaccgtggtcgtgggagacgactggtctctagtttccgatcattcagtcatgcttcggccacggacaggtcgaacggtcagtcaaatcagacagagtgtgcaggcttagtcggagttggtcggtcggctacccttagggagtcaggtgttggtggtggacttcggttcttcccagaggatgacgctagaaagctgttcagagatatcgtggctggtttgcaggtccttcatagggagggaatcgttcacggcgatctcaaatctgaaaacgtcttggtcgatgaagaagtaagttcataatattgttattcctctttcgatgaatgaaacaccaaatctaaagcaaatgcgtctctacatttttccttcttagggccactgcaaactgtctgactttggattttcccaccgattggaagtcaaccagtctccacaacctattagcatcaccggccatacaaatgccaataccgttctagccagtcttcaacctcatgggtttccatctggaaaaacttctcagaaccgacaggcttcttcacctctccctcggtcggccgctctgttgaggatggcacaatcgaccgcccctcccttcattcctccttccggtggatccatgccttataccgccccagagcttctccaaccagtacagtcactctctggcgctcaacaaaggacaaccttgacgaccgacatgtgggctcttggagtgctcctgcacttccttctaactactggctcgtttcctttccaagacgcgtttgaacctcggttgcagatgaagattctccggggggtatggtccttgccagaagaagtcggtggcggtcggttaggcagagaagcagagagcttgttgaaaggtttgttggaggttcaggtcgacgaacgatggacagttgacgaggttgggaggagcgaatggttggctggttgggcagaagtcagaaagtctagtcggagtcgaagtcggtcgagaacagctttgggtgtgcttggtcaaactacccggagaagatcaaaaagtacccatcgatcggcccggatcgatgaaaatcctggtgggccatcgtccccttctctgccctcaacctcctatcaatcagcttctctatttggttcctctctagaatccttctccagcgttgacggccatcaaacccaggccaacagttggtcggatcagacctatctccctccaacaccacatcaatcgctttctcctcccgcaccacaccaatcgctttctcctccattccatcactctacggcttcgggctcgacgatctttccatcaggcttgaaggcatcaaagagtagatctcggtcaggcagcagggatactagatggagaagacgaccatacgtcgagtcggcccacactcagaatcaacccggacagagagcagaaccaaacgaagggtggggaacattgggcggtcagatgatcgtggaggtcgaggaacctgcacgggaaagaagggaaggcactagcgagaggaggagcagatcgcgagggcgaaggagagaggccaatgtcgattgagacgtgcgagtgatacctctgttttaaacccttcctcttttcttcctcttcctcttccttttcttctttcatgccttctttgccttttttgtttctttttttgtctctcgggtatactcttttgtattttcttcgtgcctgccgatgctaatctacctactctttcccaaacgcaacaaatatttccttcttacccacttctcatcaaaaaagggaacatgtattcattctctgtctttccaattttggacactatctatccgtccatttactcatccatctgtgcctgtgcttatgctccagatcgtggtacatgtatttatatacttcgcgtattgttctccccatctactcattgtttggaaacccatttactctacatcgttttctacccagtattcttttccccttctggtctcgctttctcagtctagaacggggctttggtcttctggttgatctttatgagatatgatgaccctttgcgatcgtagcagtatggtatgtaggtggaaaaggaaaaggaagatgaaaatgaaaagaaaagcataaacatctgaattcctttttttttttttccttcccgcctcttggttcttcgatccggtggttcgaaagaaacgacaaagacagataggaacaaaagggatccgaaataaagtagagatgagtagaccgataggagtagagttgaagaaagaatgaaggacaggaggtagatgtgatatgtcaagagtgagtggtgaaatgaaataactgggttaaggaacggattgactctattgaaggaaacaaagaagaaggagaacaggcaagtcaagtgaaatggtctaaagatttgaagaaagagaaaaaatcgagcatgaatgaaaggagataaaagaagacaaatacaaaagtattaaagaaaagaagagatctaatgggtaactgagatgaaggaaagcacatggacgaacagaaagcaaagaaaaaggacagaaacgaatctataggatctggaagaatttgagatcaagaattgatagagaaagcatcacagaaacgatagtgacaagcgtgatagacgctcgaggagagaatgacccagcaccgctgcttgccggcctgtttcgttccgacattgaaggccaaagatatcaaatggtgcgaaagaaaatgtagagaagaagaagaattgaaggttcagcaacagcaacaagaaaagcgtcaaacggaagaggacgacttacggataaccagtgatcttgacggtcataacagcaacgaggccgtcgatagccggatatccatcctcctcgacagtgtacatatggtcttgaaaatcagagacaaaatagcaaagatcagcaagttgaccgttgtggtccgaaattgccaaacaaacacagaaagtactcactaatgccctctgaagaattctgaagaaggcctgaaacatattggacggttgtcgtgtatgtatagctagcgacgatagaaagattccgcaaacatcagttttcagccagctctaggccagatatttgataggagatcaagatgggatgataggtagatagaggtactcacttgttgtaagatgtgctgccctggaggacggttgagttggtgacatttctcgagacaaccgtttcagtcgttccaccagtggttgcgtacccgacaataccatctcgacccaggttgtagccgtttgagacgatgtcgtgtccctctttagattataagagtatgaatattagctcaaactcgagaatgtggtcaaggagaactaaagagaaaatgtaggacgaacgggcaagatccatctcttcggaagcactatttagatcaaagtatatatcaggatctcgtcaagagcaaatgatgagaaaatttaaagcttgaaacacgaaaggacttacgccataaagatagctccagtagtggcctgtgtccaatacctgaaatggttaccaccctggaaagtttctctgcatgtgccgaagatagcatcgccgaagttgtaacgaatctcggccgtttgaataactttcgtatcgagaaacagagaaacacgaagatgagttctgagtcacccataacaaaagcgagatcgtacacaataaagcgagcatgatagagaatacggaggaaaacaagagaaattgaaggtgcgaagaagatacataccaacatccttcccatcgcctaggtttgcatactgtccgcccgttgatataatgttcaagcaatttcctgagaagttcagactcctattatgaggggtttttttgtccagtgcgagttaatggaaggatacagaggatgcgtcagatatatgtttgtttcttaatgagaaaaaagactaaatatgaaacgaacagataatagttccttagtcccccattatctgctgaatccaccctattgaacaccaaatcaaaagggcggaaatttgttagcgatgcatccagcgcgcagacaggagaacccgatttaaatacatgatatccttgacgttagaaaagacatgtaaggaactttcttacaagacggcagcatcagagttggcagagataatcatgttcaacggctctcccagacctgctggatatgtttcattgacgatctggagaaaggaaatgtccagagaccggttgcccagtcgtgcacaaaaaaatgacattcccaaaataggcgatgacgacaataagcaggcatgtaagtttcaaaatagatgggttcagagaaaagcagtatagggagtgagtagttagtgttagtgttcgaatctacaatgcaaaagatgttctatagagaacaccaggagaatactagaagaaatcaagacaagactagaacgaaccgttaacatttgacctccggtcagagacgggtttgtgtaacctagagatgatgactccctcctgtccatgctattcattgtcatatccactaccggaccacttggtggtttggccgaatatccgaccatgtaagatgatgaagcctgggagacgctcggcggtagttgatttgatgaccagccagaggaaggcgaacgagggaaggatgctggtggaggagaggaaggaggttgctgcgtgctccgccctaagcaagggctaaaagcgtggagagcgaggcagacaaatgccaggatcttccaatgggaaatgtagaaggtcatctttataggtgacattttgattcaagaggagggagattggagatcaagaaactgccagtttctttgagagggcaagagggaagaaaaggctgtgaacgtatgctgatcgatacgaggcgaaataagcaggcaagagggtgattctaacccggagaggagagtagccgaagggagagaaagttagttgagcttgctgtactgaataaattcgagagatgcacgaagagcatgaagagagaaaaagggagacccaacgaaatggtgggtggcttaccagacgatagtcttctcaaagcacgattactcgctccgaagaaagaggagtaggaagaggactatttgaaatgctggatttcaacgccgagacggtcgattctttgcactctgtgttgtttttgaatgaataggaccacctgccttgttgctttccttctcctattcgttatttctcttcaggcgttgatcaagtgaagggtggaatgagcgaagctttgtcttgagttgttctcgttgtttaagtgacgaaacgagtggaattggccaggatccgattacgtaatttcccgcagccaagctttacattacgtgactgaatccggcgaagttctttttctcatcgatctgatcgtgtttctgtgtggagtcttgctttggattatgtgtttactcttctggttgttctctacacacttcatcatatcgtaactctgggctacatctaagcggactcagcctccttctcctcttcctctttggcaagcttaggggtatcgtattcctacagagaccacacacagcatcgtttcagcactcattcgatatttgagacggataaaaagaaagggaaaatcaatcacttacaagagctttctcctcagactcagagacctccttctcgctgacttcttcggtagactgcttctcctcctcctcagcggtctccttttcgggagcctcgtgtcctccggcttcatccttggcctgttctcgagcccgggcagtgctcttgtcctgttgacgtcatcaagtgagaatataggcgtcagttagaaagacgagacaagacgcattagggaagagtcaaaaacgtaatcataacatccttacctcagcgctctacatggtcatcgttgtcatcgttaaatcaaaagtttacgtgagcaaaagggctctcaagcagaaaatcggtaaccgaatcggatacgaacaatgggggtaatttctccagactgcttaatcgagctgggctcgtcggtgtcctcaccctgagccttgacatcgctgtcttcggtgacgtcgttcgccgggtgctcgtcgaacttgtgctccttctcttctgaagcggcgtgctcgtggtggccgtgggagtcgtggtgctcaccgtgagcagacgagtttcggactaagttcacagcccatccaatctttttaccagagatgcagaaagagaagatgaaggaagatgagctgatgagataccagaacgtgcacgcgacatatagtaatgcgaatactcaccatgggaccgaaaatagcagcggatccgacctacatttcataagtgagcatggttcagatgaaaatttagttgatgaaaccaaagagaaaaggaagagaagatagtttagatcagtaaaagctttctttgcatctccttcgttcaatgcggtgagatgggattttaagactcgaaggaaactagctgagagaaaagcacggtgtaaaaaacacctgtgtaaatttgaagaaagaaagagacgagagaactcacaacccaagggatatcatccctcaagctccaagacttggatccgtagtcgacgttgccatgtccagaggcgaaccgcttaccagcaaaggaagcgttgcttcctcgggcagctcgggcagccggccgggcagctgttcgaagagatcgaaagacggtagacatgtttgaatacgtgtttttatcttcttcttttttttcttttacaacggaaagtctgtaagcgagctgcttatacgatgagccttgtcgaatgatgatggaggttggcaaagagagaaatccctaaggaaaaaaaggatacggcaagcgtcggagagacagacttagatgatttctgaatctaagttacgacttagacaacattttcggctatactcgaaacccgactgttcatcattcgcgtcatctaacatgatcgcttggttggcactctcgacctctacaacatgtctagattgcctttctctgcgtccactgatgcctcgtctacaacagtttcggacttaggtctcaagttatcatcaacaacctcaacaccctcgcccgcttcgacgaacaaagcggccaccggcgctttcttaacgatgccttcttctagtttcaatcacccgttccccagtctgtcgagtgtttcatcgtggacatcctttgggagcagtagaatccatgctacttcgtcaagctctgactaccaggagatcaaggagtctatagaaccacggttgagaaggcttgtgtggcaagctgggttggacgaattgtacgttgtctgggatccttatctatcaccgagcatccaaaatgataacgtctcaagagaatctatagcggaagacccatcatctgcttctcaatagcatccataccagacccgcgctcagttgatcttgagaaaatattcagaagactggtatcaacccttcaaccgctaggtaggcagaatgcttcgtttccttcttagagttcactcttatgtatcatgcgcgctgcagaaatgcttatttcactaccatgtatgcgcaaacacatgcatacatcggtcataacgtccttatagtcgagaacgattacaatctcgtcatattcgctgccggtggaagttattatccttcgttctcttggatatggaaagtatgggctcagcttggtcggccgttcagaaagaatctaaaacaacttgttcgttccgcttggttgtatgtgctgagaattgtctgcggattattacatgctttggctgacacaagtcgcgtgtacaactgttccatgcagttcatcgtgcatcctaatttcaagacaaaaggtatgattcattcagacgagagtctcggagatgcgagaacgaaatttctgatgacaggtttctaatttcctcttccgactgatgaataacagctatattgacattagcaactccactaatctcggcgaaagtcttccggaagatcatctatatccaaaagctatccttgttgttctcccatctacctattggcaacatcttgattcccccagagacagtcaggtaaggaaaacgttccttcttccgcttaaaaaatggttacataacattgagaattgtttgtcgatttccagagagaacctcgcgcgcgaacctagctacttgccctctccgcttcccccccgtacactcaacacacaaatctcgcaagaattccctctctccactcaatatgttctcccatctgttattcaagactctgtccaatatcttcgttggggatatagcgaagatgttgactactatggtctccgatctgtatcctcacctccaagcgaggcactcaccacttcaggcatctttcgcaaaaacccttcctcaggtgttcaacgctgcgtggaagaagcgtaccttgtcgaacagccggtgtcactcactctgttcgatgatccacatcttgctgccggtctaatcaagttgttcttcagaaagttgaaggagccattatttggaaagaacatctgggacctcgtgacaaactgtccggattgtttggacagtcagcctggagagcgatacttgaatgacattatcttggggtaagtagttaactttgtaacgtgtgttttgtttgatcggaacgagcatctgggcatttatactgatgttccttgcccatgtgttcttggttaggtcgttgaatccctacaacaggcttctgctaggctatgtgatctgtgagtaagaacccctgatacctatattcattcgccagcctaactgtgtcctctgtgatttcaataacagatctacttcacgagacaatgttatgtaactcattgatgacgtctcgaaacttatcgattgtcttcactccaaagtaggcaggtttctttgtgaagtatatggtctctgcagttcatcggtcctgaattgtcacatctgactcgttctcaatcatacaccgcttgctaccagtctgatcaggtcgaattctcctactagggatatgcttcttgcttctgtcgaaccatcggcatcccttgctcatctagcagcgttagaaggatcagggtcgaacgctcccttgaaggaagtcacgctcggattgattgttgcgcattggattgagaggccgcaagtattttgggaagacgaagtcagaaattatggacggggctcgagagtaactatctaatatacacgtaagattcctcttgagtgattttggtgagatccattacttggtcaagtgatgaggaggaacaaggctcaagtgaggggaagactggtaccgctaacatacagataaaatggataagataagaatatatgccgaaagagtccctcgtagccgcagtcctgctgtttgtgacatatggttacgttcgatgtcaaccctgtaaccgcggaactaacagttgaacttcgttttctcttcgctccgtacaaactctcgacttgccacccatacaatcttcttttgctctcacttccactctccttgcaccttttatcaatacttttacatcatgcttgaacaagtccgaaagaagctcgtcattggtatgtactttgtttcactctctattcgctgtcttttcgtcagagagtggtctttgttggcaggggagggaaagaaacgctagcaggccggatgaaaggtaacccagagcgatgggacatctttcattcatcctgcccgtatttgttcttcctttgcactcgtgtgtttgtcagtctgcaaggacgacagatagcgaacaagatatgctttctcttagaggatgcctttcctaatccttcagagtcttaacgagccgagttgactgactttgttttgttcttgctttccttcttctcctcttccttcccatctatctcgcaatcacccctctcttcacgtgcacagtcggttcgtaacggttcctttagagtcatcttcctccctgctatcccgattgttccttctctgctcgcttgtctaccctgcgggttccttctctctcttttttggtcactcgaagattctttgatcatccgagaaaagccggagaaaggctgttcggtgtttcactcaactatcttgtcgcctcaaccctttcgtctttgttttcaattccctacacatactactacgtgtcactcgatctcagagtctcgacatcatcgcatcatgacaatactaagattctgcaatcggatgctgatcttttccctctttcctcccggacatatctgtttattctgtgtatcgtggcatttctatgaataggtgacggagcctgtggaaaaacctgtttgcttatcgtcttctcgtgggtctttcttgcttttcacatcttcatacttctatccaattcgcgggcaggagaacttcatgtcgttcatatgaatgaagtctccgtgtccaaatcaccttgagtgtgcgagtgactaatgcatcattgatcgtatttgtctttgtcttcttgatgattttcatacatgtagaaaaggcaccttccctgaggtaagtttgttgatacgatcagccaaccgacgtacatacaagtcaaaggtgacggaatgacccggccgagagaccggggttagagaaatgtttctgttaggaagctttgcttagccgcaagtcttctgggctagaatgccggatgcacgtggagagggcaattctatataggatgacagagctctgggtattgatgctcttcgggaggttggaggttgaacggcgaagatactgtggaactgtcggttgtatataccattgttcatcacactcgaatctaactttgttgcttctggtttattcaaggtttacgtccctactgtcttcgaaaactagtgggtatctttctgctcttctatcaaacttcagtgcagattcttttgaatatactgggaacagacctttgaccatgtatgctgttctcattgctcaatcaaacagtgtggctgatgtcgaggtcgatggtaagaaggtcgagctcgccctctgggataccgctggacaggaggattacgatcgattgcgaccattgtcgtaccccgactcgcatgtcattctcatctgcttctccgttgattcgccggattcattggacaacgttcaggagaaggttcgatcatctttccacgctacatcgcatctgtctagaaagtaacagatggagctagacagggccaatactgattacggttttctttttttgttttgtgaataaatctgtacctgaatattgattaatcattctttccaccgccttgaccgtatcaaccttccatccgacagtggatctctgaggtccttcacttctgctccaaccttcccattattcttgtcggttgcaagaaggatcttcgacaggaccctcgtacgatcgaggagctcaagaagacgagccagcgacctgtctcccaggccgaggttcgtttttccgtttcacccttagtcttgttccattgtttttcaacggtgcatcaccggcacgatggtcagttaagacttacactcgatctatgtttttgttttattttctcgatcctctttgtagggtcaagccgtcgctcaaaagatcggagccaggcgatacatagagtgctccgcccgaactggtgaaggtgttcgagatgtcttccagactgctacccgagaggcccttgtcgtacgtgtagtctttcgtgttcatgttatgtacagactgttgatcttcgattttttgtcatctcaggccaagggtggtcgaggaaagagcggaaagggaggaaaggacaagaagactggctgcatcgtgctttaagaagaggggcgggccccttgctcgatctcttttctttcatcgttctctacatgcactttcttttctccctctggattttctgattttcgatcaggcgtaacggttctttccttctctcctctttgctatccgtcggttcttttaccttcagtttcgcttcttccgagttgctcgaccacgttcaactctttgacttttctttcccgtccttttcttcatatcatgattcctctccgtttttcttacccctcgttcctcgccgtctttcgcttgattcttgtctttatataatcttgagatcctcgcttcctccgccttccctccgtcccttcctgttatcttcttctttcctcttcttgctgtcttgcttccttatcgtttatggttttgatgagctcaattcaccctcctcttctttctatcggtcttccctttcaccttttttaggcttaatcttttctcttgttcggaaaacaccgggccggcgaaggaggcttggcaaagacagttgtgacgccgacagttacaccatagatgagacagtggctgagaagaaagacatattcatcatggaagttaaagacaaggatatgaaatattgagatgtgggtgacag

SEQ ID NO: 157 - DNA, 15373 bp, Xanthophyllomyces dendrorhous
ggagggaggaagggagggagaagttgaagaagggaggagggagggaaagctaaaagggaaagaagagaaataacactatggcacacgaataatcactcgaagagcaaagagaagaaacgaaagaaaatcaaagaacaagggaaggaggcaagagtagaactaaacaaacagagtagactataacggtctttgtaagaagagacattaatctgtagaaagagagaggagattatcgtacaaaatgggtcaaacaaactacgggttgaattcctcaaaggaagaagagaagaagagagaatatgaaatccaagggggggaagacaaagagaagaggtagtaagaatgcatatatgcgttcctaataaaaaaacaaagacgtgagaatgttcccttaagcgaggatctgcttatggttctgctggactctgaatccagcattcaatctgatgtcctctgctcgcctctcgacattctcaaaccagccgatcgcctgctctgccttcttctttccggcctctgcccttctgacctcctccgctcgttcttccatggcaccggcgaatgtcgatcgaaggttccaagcggcagctctgagcactcgcttggtctcgagcgaaacccgaccagccgtttgatcgtcccatcgttcgttctcctcgttttgagcaagcagggcctgtcggatgtttgatccgattcttcgaggaatcgttcgaggaagctccgaaaggatgtaataacctaatccaacggtagcggcagcgacgatcggtcctgcccattggcgagcgacagggcttcggaggatatcggccagacggaagaaacattcgaccaagcttcgagtcgccaaggtctttcctccaatcaaagagacgacgccgacagcagtcaatccgtaggggacgagggcctggctctctttggcggaatcctctgaggtgaaggacgagtcggcgtcagcgaagaatggtcggtagatccgggcgagttgctggtgaacgtcaaatacgtccccaagggtgatgttagagagatctcgcctggcagccagaccgaggccaacgtttccaatggaaccgctcattcggcggttaagtctaccacccttgggggcaaacatggcctccggtctgaacaccttctttggtcggtcaactccctgaggaagatgcttctcgccgagcgtcgagacctggttgactccaatcgaagtgatctgcctggcgtcatgctcggccaaaacaacggcggcgtcgagcgaggcaagcaaagcaagcttgacatcatgggcataatcccagagatcgagcaagccagggtaggtaggcaactcgatgcctacggcttccggagcaatctctcctctaacgactgagtcgagagccttggtaagtctggccttggctcgttcaccagacagagcgaccgtctcgtcctcgatagattcaagctttcgctcgaagccgtcctggcctcgtttcatctcatccaatataggcttcgttcgctcaagctcagcctgggcctggacaatctcgtcgttggcggcaaggatgttggcggaagcaagaatgtcaaggtccgagagcaggtgagaaacaaaggtctgtacaggaaggagtttggatttagctcgcttgtcgaggacgaaagatcgaagggcggattcgaggtgttcgaaagcttctgagttagtctcagcaggagggggtccttccatctgagcaagctaattggccaggaaatagacgagaaacaatcaaacaataaggagaagagaagtgagtacacctgtagacatcgagctgacggcaaaaggaggacaaggatgaacgtacctccatgattcggctagaatcaacaaagtgaacaagctcctcagcatcttcccaagtcctggggctaagctgcctgatttgctcgaggatgactctcttgcacctttccttatccctaatctggtcgaacttgttaactacgatgaataaataggccttctcattgctggccgtccagataaactctttagcactcaaggtgaagtgattggctgccgagacacagaacacgacgacatcgatctcgtcttgtctggcaaatacggccgtagtcttgagagaatctcggttcaacccgggagcatcgataagggagatgtcgacaacgccattgtgaataagagattcggatgaagtcctggtatccgacacatagacccggatcggaggacgcgtatcgtcctcgacatccacaaccatctcttccaactcggcgagcgagtgaacagaataggtggccttgtcagacaggttgtacgtctttccgggaagttgaacgtgggcttcctctcgatcgccgttgtctctggcatcatggacggtgcaaaagatggttgtgcagggctgttgatcgacgggcatgacatctcttcggaggagagcattaacgaacgtggatttcccagagttcaaatctccagtgatgaggaccttagacgaggtgtcgaggattcgatccttaagcgactcaaggtgcttggtctgagtgctgattcgtccgtcaagaagtttggagatggacgatcgctcaagcgacataacgagtgacttggaagatcggttgggacctagcttgagatccaagttgaggaccttgaatccagtcgcatgagtagagtcggcgatgtcaacatcgtccgtgtgagtctcctcttttgaatcctcagaagccgggaggagagaaagagatcgtcgaggggctgccattcgttgaacagacgaagtgtgggttttgttaaatacaacatttcggatctgggaaggttcatcggcaaaggatagacttcttcgaagagatcggttaatgtggggggtgctgctcgcggaggaaacgggaggacgagtggccagaggttgaatatcagggtatcgaatctgccagttggacgaattaaaggtcatgaaatccttcaaaaggtcgttcgtagagtcgatagcggtcgaaagcctacgaatcagaaagagagcaaagacgattcaaggggatgagttcttttccttcatcatgtcttcttcctcttcaatcaagacacaggacccgcgtctgttgcacgatcaattccatccttgcatccctgtatccatccgtttgatcttctatcacctaagcaccatggaagttaaagaactcaccgatccctttgagcttcataagcggccactgagttttccaatccagtgggagtaggttgctcattgaacgatccgaaaggaaaagaagttcctccttcggttaccttctgaggagaagccggggtgaaaggcgactgaatagtattcttataaatttgagacatctcgaatttggaacgtgtgttgtatcgtactccactgctgaagtactacgaccgatagatatacgaatcaatcagggtgtagagcaaggaggatagagtggatatgggcagggtgtagtgaatgtgagtggtggacgaatcggacgactaaaagtctagttgattcttacataagttttatatgaatctccatcttctataaatgattagggttataataacttgaagaatcagtcaacatctccgtccactcttatgggaaaagcagcaactaagtttcagtttgatgacaacatattttgatgacggcgaagattggtctcagccgtccataacgagggagacagcgaagttgtctttctaaaatattgcgcttaggatagatctctgtataaacaggtctcttgtatgacagaaacatttagatcaaacatatgcattgtattttgtgaactttaagcttggtgaaaacaatctcaatcgcgagtgaccgatatatggcccttttaaactcgagcatcctcagaccacaaactaccaagatcatatgggccatggtttcagttttcacacgtagataggacaaattcaatgtcagtatcagcaaccagagcaccggcggcagcgtttaacaccagcattctcatcccctcgttctcttccttatgaagggctaggtgcagaatgttgcgcaacatgttgacattcctattccactgagtgtgagagaacgatgagtactcgagacgctgttttgagatatactagatacgcgactttttcgacagacacttcaacactttttgatcacccacactttggctcttcctgaaaactcgccatggcacttgagacacgctttggatgtccggaatttccggattttacaccttggaccaggcaggaagctctcagcttggagagaagcgtattcatcgagctagaagcatgctcatgagaagacgatgagaaggcgcggtccccgaaggccagcaaggcacgtggacgtccgtctgatagacgaaacgctaccttgtagtacacttgcttgcggctgatgtgcgcaccccagtggagacgtctccactttcgggcggcgaagaatgtcaagagccttgagtaggaccgagaacgtggggcgagagtggtgtggagatcatcgagattgatagctctgaatgaacgacgatccgaagcaagatgacgaggccagcaagacaatctaaacagtcagcatgggcctgagaaagcattcatcacggagaattgatgtcattgatgcatcatcctccatccacagccaccatctccgaaagtctcgattgacccctgcaagatgcttccatgactcgcgagagagagtgaccactgggtgccctatatagccagaccgccgttgtccagagacatggccagccctcttgagctcgtcgagagaagcgtccggcgacctggatcgagacccaaaacctcgttctctggctgtagatctcagggaacgtgctctgatcggcgtcgactgtagttagaagcgacatgggtatcagaactctggcagacactccaatggcgcctgtactgagcgagcgggcgagacagcgccgttgggcctccatcttggcgatgtagaaagactgccttcaccaagtgtccgagtcagctcggaaagatatctctgtcacaccgcgcatgccccagatccatatctgccaatctgagataagcccaaaggtcatgaagaaccggggtatccacaaaaacataggaggtttgatagaatgagagggacaggagcgagaacaaaaccaaaccgaagatcaacgagaattgatccagacccagcgaaatctagctgtctgatagaacatcatcaaacgatcagtcatcgttatcggtcttgtcagcaacgaccatggcgctgacctttcgctaacatgtacaacagcagctgctgactattacgtgcagtctttgctcatctattttgttgaaaacaatctacttcctactctttgtgttggatattgtccaagcatgtcatcttgttcaacttcccttcaccaccgagagtccgtcaggttggaagggatgtaaacgttgatttgtttgactttcaggttcatccgcttagacacacatccctacttatgatcctctgatcctctcaccgataatcttttaacactactttcattcgatatactatcctcgattaatctctttttacactgtctcttaacagttcggccttctagacttctccataggtctttcctctttcttgaagattgcgtttgagcacactctttgggagatgatttaaaacaaaaggagccaaagtcaatgaacagtttccagacaagaaaaacttactcatctcctaagaagagagagaaactaaagatattaccagactcggacaactttctccacccttgacaccagctttgtcaccttctctgcctctttccgcttgtgccagatatagactctcacaacaagtatatagagccatgatctcttgaggacacttggatgaatccgagttgttggccgacagacatgtctggatcgcacacgcaagtggatggcaattaggaactggctagaaaatgagaccggaagtattgtaagcgtttcactatttttcagcagtaaaaaaggtctatatgcaatgagataatcatctatcttacagaagacatgtagagcagagaaaagcctcgagagaatttgagagtcaacaccgtttggttcaaagcgaacgcacgatcggagacaccgaggtgacgtcacgaatattggcaagattcgtcttcctgatagaacaacatcatataaatcaggcatcactaaccatctagcatcccattgccaacacctacccgtaaacgtaccgatcggctgcttactatgcaacaatccaattcagctgcatcccaagaattctcggtaggtatttctttcggttacgattcatccagcgtcttgacatacacatccctctgacaaatacgtgtgtgtttcaacaactataaacatacactgaatcatttaggagagtcgaaacaagccagtttccgctcctgtaactagcagactaaacccacagcccggtacaactaatgtgcaccaccttggtttgtcctcttcgactaacaatccgatgttcaacggtctaattttagcttgactatgggtgaaacaggcgacgctttgcctggatcttctactgttccagagattcgttagtacactctctcaagtcttgttcaaacccattatttcggcatatcagcaggcctgacagcttgtgtacattgggcggtttctcgcagccgaccgaccgagaggagtagatgccactggagagaaagttccgttcatggaccgagcgaaaggatacgctaaggtgcaggcaggtactgtgcgtgctactcctccgatgacttctataaccgctggatctatctgagaaacctaaacgtacatgaatctgacgatctctgctcgccttctgcgacctatagttcttcggtaatgagaaagagaaggcactgggagaggcagctctccgaggagaagatgttgggcagaggcactgaactgttgggtgtcattctcgtcgtaccggcgtatgtattctttgattatatttgtttgttattcataaaaagctcccggttgtctccgcctcacgaagccagatgttgtcgccgtaattgtctctcttcagcctggcttcagactgacgactggaattgatcggcagccacgtaacgcgaattttccaatttccttttggttcttgtcttttatttatttattcaaatcaatacgcgtccgtttgctcctttttctgatgatttcgatcgagataaacgatgacaataaatcaacaaagttctccctgtagacgacggagaatataccaggtgtaacgtgaaagagagtagcggagagaaaaagatgatttgtaacatcctgattgtcatcctatgaaacatcttctcctttgttctgtccgattgataccgcgttggcgttgaactttgttcggacccggatgtgtcttgtaccgggtccgtagggacttggtccgttctattcgagtgaaggagctggatggtcgatctcgttagtccaaacatccatcatcgaatccgttttcaacaatacccaacacgtgggcaaatacaaccgaaagctttgtctttaaactcgcctaacgcttccttcctcggccagcttagtgcgatacacaaacttggacaggaataccaagtcgctcagagagtctcaattagaaaaaatcaaggaaggacagagaagagaagagaaagagaaacttcctcttatagccatttgtgtacaatgcgttcgaccgtagataccctcaatcccgagcagtcaacagaatacatatctcttcctgttcttaccgcttcagaatcgtccccgtacccgcttggacaagaacttgaatcgccgtctttccccgcagctggcttgtcgtcaataggagatttatctaaagacatcgaaaacgaaacgtttaacttggatggggccaacaaaccgttgggtcttgctcaggtatacgaaggagatcaacctggggaatatgcttcaacagaacgggtccaacagttcaagctttacaaaagacgttgggctggattatcaatcattgcgagtctaccaatatatcttgtgctagcggagaatatgaaaggctaattcttatattcaacagcttatgttagatgtcataaatagtatgaacgcattgtaagtttaatttgaaaggactcagccggactgtgatcagccagcgttgaaatgatattgttccgtttttagctggttcaccgcgatcgcttccgaaagtgcagagaggttcaacgtgacccaaaccaagatcaactggttcgttcattgtcgatacttcccgcttctgatagaacatgtcttgatcgttatctctttacacttttcttcgtccaaacaggtttgtcaacatctgcagtctttgtagtttggtcaccttcccccttgttcctgtagcctgccataaataccttcctcgaaaactctgcgtcgttgccgcaattgtcaccatcgtcgccagttggattcgatatgccgcctgcgtcgcccctgctttcactgctgaggctgaccgacataaaggatggggtctggtgttattttcacaaatgttgtacggactggttgggccgttatcgctagcgataggaagcaagtattcggagctctggttcgacgtgaaggagagaacggcggcaaccatgctgctgtccattggcgcaccgtgagtaaacgatacagcctgtcccggcaagtcaggaaaaatggaagcgctgatagtaaatgaggcttgaaattgtacagacttggaacggctattgctcagattatcgctcctatcgtttgtactacagcagatgatatcccattctccgttctcgtcatgggagctattagttgtatgttgagcttcttgacctactcgtaactagcccatgttgatagattgtttttataccgtaaatagctctcaccgttctgtccttcatcattccctcccaaccccccatacctcctactttctccgcgtctgttccaccaatctcctttgtggaaacctctcgactatactttgcggacgtcaaggttccattcttacctctctccgacaagccgagtacaatcaccaagagagaacgaatcgatctatggttgttaacgtttgtcttcggtactctcacggcaacaatcactgccgtgacgagcgaagtcaactcaatctttgtgcgtgccgtattgactcgacgttgtgataagtaactattctgaacctttctcacgataactcccaacacaggtgccatatggatactcgtcttctgttagtctgtcctccgctctatcccttacctatgcgccaaagaagaaagacatactaaagcatcttcatgtttacaggctgctggaaatatgtatgagaatgcggttcttttgtatctcccctaaacgactactaatcacctttctggttatctcatcgccctttcataccataatttaggaggtgagggcttttcgtctctcaattccgttgtaccattgctgttgcctgattgtcgcgtatcgaacctattcgcagtgccgccattgtcgccgctggtttagtcggagctttcatctctgcacctataattgatagatacctcatgggatggatgtgtacaatcgcaaaggtgtttaccaccattatcgctttcgcgaatttgggattcctgtaagtactaataacattcttcatttgatccttgattttacgagcatatgaaagaaaccttccttatgatctttggtatttgaacactatatcttagtttcgctgtcaaacccgacaatgtaatcggtattgtagcattgttctgtttgatgggaggtggtgctttcaggtcggtcttctatatttggtattgtcgaactacccgtgtcttgaatggtttagactggggccgagaactcatgcttcttgcggacgacgtcttgttttgggtgggaattcagtcttctcgccatcggacttgaattaggagcagaagtgacacggcagcccgatacatcctctagcgcgttctactgggtgagcagtctgttcacatttgtctgcatcaacagtgagttcactatcaatttgattggttggactgtgacgctcgtcttgactttcctctcatctatatttggacatttatccttctcctccctactgaaaaacttgttttctcaagtcatggacgcgcttcgagcgggtccggaggccaatccaccgtataacatgaagaactcgcttattgtaagtcaccaattgaatcaggtcgattgactgttgcatcctgatcaaaaacacttactaacctcttctatcttcaacttgctcctcgaacgattagttcgaagtcgtgatgacctttgtcgctgttagtttttttttctcttgcgatgttcgatgttcgctatttcatgctcaaactgctgactcgtattcttctataatttctcttcaaatccagatgggtctcgtctatttcatccgaggtaatcagtcgagatcagcagccgataacgaaaaactacttgcttctaagagacccaatatagatagtgctgtcgtagctgcatcagctcgtcctgaagacgaggagaaaggtagaaagggacccagcttcttaagattgaggtctttgttcaaaggcaaggcgtgataattagatatcaccgcgttcgcttttcgttttgtcatcttggtctttcttattcttgccccttgtgaggacctcttatgttcgagcttgttcctttcctcttctcctcctctttctgcttcttctattgatctgtggaaatacatatattgcgtcagcttgaccatgaaatctcgtcaactcgttcatctctctcgagttctggtatttctttttgtagggaattatctatataatctaagagtagtcgatgtcacctcacctaatcattctttgctcttacaatgtttctatcttatgtgttctattcaagcacttccttctgaaaaagaaaaaaataacttgatatgggtatatacatcgtatccaaaacgcttatgtatgcttgtgtgataacatgaaagctacatgcgcacccctttctgactcgttcgcacagaatggtcgacagcatgaaagaggatatatataggtgccggctagatgaatcactcatcagtagcttcttcttcgtcatcttcgaagatgtcggcgagaaatccctagataacgaaaacaggagataaagaaggaaggacgagggtcagacagaagcaacaggtcatcatgtgctaactagctggcaggtagcacaaggaacttacatcatctatgcgtagcaaaggcgatcgaaccgttcatatacatagcggttcagtcttgcaaatcaagctctctatctcataatgagaacaaatcaactgaaactcacaatcataagcaatcttctcacgatcatctactccttcgtggccgtgcgtgtccaactcctgcgaagggatgaccgttctaatcaaacattatagagccgatcagatacgttctagagtaaagaagctgtgacgactgttgaccacggggtgattttatatgtgaactcacttgaggaagtcgatagaagaagcaggtaaaagagcaagttctagatcgagttctgtgatatagggctggttcaattagaccatcaagagcaggattcagcttagccgatatttgcgctatatcgacttcaggacgaagacagctaatggagattatgtggaggccaaccttttctctagcaatctctctgaaggcttcgctgagttgctcaggactctcggtatcctgagtgatctctaccaggagtgaggtgaaggctctataatcaaccgctccaaattcttcgaccagtgtagcatggattcgatcaatctcttgatcctaggtaacaataaatatagccataccagatgttgatgtacatggaaacgtcagtacacagatgatcaacctgatgactcaaaattcaaaagggatgtaaacaccaggatgatgggacttactgaatagcttatactcaaactggcaagagctgctgtgaactcttgtatcgtaagtgtgttggtctcatcagaatcaaagtgccggaaggtcgactcaaactcttccagttgagcaggcgtaagctgtagttgcggcaaggagaaggcagagtagattagagacctgaataacctcaataaaatgagaaagcagatagtactcacgttagtcgttcctctagaaacaatctatgagtgctcagaaaaattgtaattcagcttacgccgggcaatttttttctcacaacgatgatgaagaacattacgaacctgattttcgatgaatccaattcttctactgagactgcctcggaacagctccagctcccaactaaggtcctcccatgtcagaacagtgtagtcgttatcctctacgttcgcagccatgcaatttgcctccgctattctgagatcttctagcaagtcttgtagagaagctagtcgggtcgcttgaatagacgaggcttgagatttttggttctgaaatcgaaaataattccaagcatcgtaagagaacaaggatgatatagaaatagaacatggttcttgggatattcgaacctcgagttctcctgagagcgcgccaagttcacgctctagatcatgtagtctagcttgcagatcctgcgctattcgagcagcttctctcatcaatgtatccttaattctagttcatttttgagagtgcagaacatagatcaagtttagtgtacgctcaatagagatgtctaaagaatggaaaagagaaatcaactaactgcctgattcgagagttgatagacttcgaataaatgacttctgcgccaaggagctggttccaactctcgtccacaaactatttccgtacatggtgataagaagaaacgtcagagtgttcaggaaatgacggacgtgggaacaacaagatcaagaacaaaactctcacctgtaatcccaatccctcttctggctcccatgctctcattctatacgtcttcaactttgtcctcacattgcccaacaagtccctcaactctcccctttctctaacccactccctctttgcggtcttcttccagtccgttaactcagttgaaagccctcggacagcaggataagtggatgtgttggattgtagtgaagtcgcggtagatgaccagacggatcgttgagttgaaagatgctgaagcagtaggcgcgcccggcgttcatagtcattcttgctagacctatgtaagccgcagtcattcgtgtggatgtcagtatcgaagtgagatgcttagataaaaggttaggacaaaccagactccctccattgtagtgatgaatttttcgactctgcgcacaacagtttctgctttgtctgatatttcacagcaccaggattgcgcagatgacacgcaagaaagagtcaaggaaggtaggtagatactcagcaaaaggatgaggggggaggtttgcgcatagatgcaaagaaaatggaagaaaaatgctcactcatattggaaaacgcgtgaaagaacccggcgacataagtcatgatacttcgctcatctggaggcctagcatcacacagatcggcaacctcgagtagcctctgtttatttaatccatagatccagaaagggtaagcagtgattcggcgagttgcaaattgctctccactgaggtccaaatgaaggtagggtagatttcatatcactggctggtgatagggagactaaaatacgaacaggaatgcctaatgactcttcggcaactttgaatgctaactcggtgttggcctctctgtcattctacacgagtcgtagagcgagaccaatagagtgttagagtgtatatctgagatatctcacaagactactcgcttggtataaagcagcgcgcaccttgttcagcctatgatagtctaataaatccggccgatggtgatgaatcagcgcacaaagtgctaatccatctgtccaactccaggtgaagtcctgaacgtctacctctggagcatatccagccgtcttacgttgaacccacagtaatagaccatcttttgctgaaagaccctcttcagagatgtcggcgatcgtaaaacgaagaataagtgtccagatctgttgaagggtacgacaaaacgcgatatagaaatgtatcagatgcaaacgagtagtttgaagcgcatcgggattgtaagaagattacgataggaacgtactagccccaaaatgagcttcaaattagggtcgatgatatctggtaaagtttttcaaaggcacaatgttagctttaaggagatttgaatgagtatggcaagtgttttgttgactaaccctcggccgcaatattcgtcagctgtattcctcgcgctcggatatagtttaatgcttttgtgacattctgaatcataaaaaaacgaaagagtaaactctggttgtttattttggtgatacagaaggtagactgtccttccatacctcagcgcattgaattcgatgagccggtctgacgacatagcgacctaaggatgtatctcccataatttcctacaaaaccatgtagctgaattcagccatctctgataatttccacaccaaacaaacacaagaagatctgaagcgcataccataagctgtttgagtttgttccagacggtcaagaaagtcaatatataggtcagtttttgaaatcaaagggacggataagcagttgatgtttgagtatcgccagtaaatgttacaacttacttgaatgagacgaactccgtcggataagtctctaccaagcttctccatcggctcaattcctcgagtagctagcttcgaattaagcctttaaggttcacaatcaagatcaaaagtcaggttcgtgcaaccacagcagaaggtaatatgtatcaaacatatgatcgaaggagttcgctgaagatagataatcactgtccagcatgacgccgctcgcacgaaggtagaatgacaagctagcactgaccatttgcagaatgttctgaaaaaaagcacaacgaccaagaagcagtaaagttttgaagagttagtacggtctgactaaatatgttaatcaatagcccgttttggcagaccctatgatgcatttctatcgttgaggtatgaatggacgaaatcttgatgccaaggagatgtattcgaatccagacacctctaagaatttcatgacagcacaaacctttcttgaatcgcttctagtgatgttcttggagagtccatgttgttgaaagtatgatgaaccagagatggtagctcgttagaaagaatagaaaatcagagaatgatcaacaaacatttctcgtgatcggtgac

SEQ ID NO: 158 - DNA, 20022 bp, Xanthophyllomyces dendrorhous
ctgtcatcctcatcacgtcctatgacggttgctaccaaccatcgacccagagccaccatggattcctccctagagacagtgcttcttcaagtgaacgagaatctggagagagagtctgttctgcgcgaggtctgtctgtctgttcaatctgttcagtgctttaggccacagagactgatggttccgatccgtccattagcaaatcaaagactcggtcaagctacttgatagacaggttcgaatcgtcctctctctcgtcaataaggtacatgctaccacccaggaaaactgttcgtcctcaaatcaaacttgttgtatatggaggccagcttgttgttcgatcagttgaaaatctaatcttggagactctcatagtgtcgaccctagccgatcaggtcaatcagacgctggtcgagactcaaccgctcctttccggcctcgcccagctcattcctgcccacgagttcttcaagttggtcaacttccgtccggattatatctggctcctcatcctgttcgatgatgcgtctactaacaactagtttgcttattctatacagatggcaatctctgatcacgagacctctgcaatcactcgtgttcgctgccgctcttgcacatttcatcttgcatgaaagattgatcgagatcgatcaggttggacttatcctgggtgtacgtttcgctctcgccataaccttcctattcatctgatagactgatgattcattcgtcaactcactgcggctttcggatttatgaaattatgaatctgaatgtcatagatcgatccatcgtggtcagatagactggccctacttcctgaagaatatctgcatggagttatctctttggtcaatgagctagttcgtatcggtcacagcaacccagtacccttcatgttgtaaagcccttccgttttgattcttacaccaaactctttatttggacaaaatctcgtcgatttattttcatgctctcaagtcccgcttggctgtaaattcggtcacgatgggcaattatgcgtatccgctcaagatttcaacttttgttggtgaattgtttgcaggctaccaactcgtatgtatttaatcgatgttcagattctcactggatatagcacgaaaggtatctatcctactgcgctgacttttgcacgcatgccttccttacgatgcatgttcgtctttaaatatcaaagttgaacctgaagaatgactctctccgaaggagattcgattcgcttaagtatgatttgaagaagatcgaagaggtcgtgtacgtccattgtttcttattctatctgttcgttgggctgtccctcttctgtagagaacaggtattaaccgtcccgtgcttcttcaattcgggctgacaaatcatcagatatgatatctctcttcgaggtttgacaaagaaagctactacaccttctacaacagagttatgatgtagaatctgacaataggatacatgaatggatctagacctttccttgtctttcgagctatgatcaactgcgagtttcttgatcatgaagttgatttcaatattcaactcaaggtatagcatgtttcattcgatacgaactcttctcattcatttcatgctaaatttcaaggactaaggataaccacctgagtgcgcgagcggtaaatcctatggcttgggcagccttttccttttggacgcatatctgggtacgaatgcccaacaaatgagcaggccagccaacatcgcaactactacaggctgcattacgccaaccctatttaatttgatggagaaaacatatgtgaacaagaagaaacgacagtagtgagacgagatgaattgtggataagtagaataaactcacccatactgcagttcgccatcggggatgaaataagagaaaggaaaggaaatcagcttatttattattccagaaaagggccgactacttgaaacaaaaagaacgaagaattcttcattgagcaagataaatcgaaccttagtggatagagcacctgtgatgaaagggaaacaggctgaaccaccttgtccaaaactagcctcaaaaagacattgagatatcggcccaagaaataatcggatgtacttattgatcaagtttactgtgtatgcataaatggccgactgggcaatacatatcgtttctcttcttacctggcaatccaaccgatagcacctccttggcgcgttctaggtatcaatttggtgcatgcggacatgataatgctgttggcatatcgaatccaatatcgtgtaagtcaaggtccaccaaaaatgaaggactgagaggaatgagatatatatagagacttgcacataatgtgggccgatgaacaagccttccaagcacaccgcaattgctcctcctattagagatggtccaaaccaaacggcgaattccagaccgaggatgattgaagtgtacagataaattgcggcctgttcaccaatgcgatctgttatcgacatgaaagccacccgaccaacggtgagaccagcatagtaaccagtagagatataaccagagttgggaccacctgacatgttgatatgaataggcagattgcacatgtgtgtcatcagagacaaacccataagaagcgtcgataagcatcgttcttggcagcatatatgagttcaaagacaaaccatgtcgaactttgatcagatatgtcgtcgtccatccacctatgcgttatgacaagaccattattgagatgaattgggtcagacatgcgcggcaatgggcgattgatgtgatacgtatgtaaaggcttaccaatggtgatttctattccaacatagatgagactgcatatagtaatcaatttttccaaaattcaaaacggtcataggcatctagcaccagagagacgactgtattggaatatagctgactcacgtgaaaatagctaggatatgcacattccttagcctcaaaacatccatcagagtaatctcttttttacgacctccgctcgatctagccggctcgccaacctcctgagctcctgtcgtcgaagggaaagcaacagtatcatctttttcaactttacctccctcattaagtttacccaagagtgatttctctgttcggagtcgaaatacgtatagcaacccagcaagattctagaacgagggtagcgagcgatttcagtagagcagttgacacagtgaggaggagggaactgctgcaaaggcacgtactatcacagcaaccgccacagagcagaggtaaaagtaatgccatttgggaatttgagagaattgggtagataccaatggagatactagcgcgccaatccctgagaatcgcaaccattcatttgagatatcacgaccgaaacaagcagagaagggaagtccgggagactaggacaaaccatacaaggcgtgtaagacagacatcttccacatcatgttcggtagttgggcaataaagttgttacattgggcatcctgaaatccaataccgactccagtgatgtagaacgtgatgcagtagaccgggaaaggaggcgctatggcctgaatggcgtaagcgacgcacggcaaagctgctcctattgtgataacctaaagaagcaggatacgtttgattgttcagtatgcaatagagttgcgcataacaactctctgatgaaacactcatgcgaccgacaaaagtgatttacccagccaaatccgagcttgttggtcaggtagacattcacaagggcggccgataggaagcccaaaaagttgaagacgaaagtgagactgaggatggtgtatgtgatctaggatataagagcgagaaaaaaagtcagcatttgaaagcgccgagagcggacagacagaaaagatttgttagacattatattgttcttgaactcgaagaagcaagggccccatagtagcatcgttccatcctgccacaactaccgttcgaaagtttgaagaagagaaaagccatctcgtatcagcacatcctctcgatggtatgagcaagatcggctcactatgatcctgaaataaacagaagacatacacagaacgaagaacaatgaagcgagcgcagagtgctcctccctttctcccatcttcaagggtcgtctacccttttcgtccagctggatatcctcctctacctgttcgaattcctccatccggcttccatccggtccagaatctaggacctcgaacagaccgacctctcgagaacgcttgtcctgatctttatcgcccccatcgccctgcgatacaaactgttcgacgttcccgttattgctgcttagaacgttcatctggatctcatcagacggtgccatcgaggtatgtatgctgatagaacgacggataaaaaccgaagtcgatcttcattaatatcattatctggccctgatagcttatggcggactgcggatcgcttaagtaatcttttgccggtctagtccgaacccggaccgctggccccgggaaattatcgtcggagatccttaaagtctcaactttgtctatttgtcttgcaggtttttttcctccgttcttcttctctttcgctttattatcattcctcgttcgtctttcatatcttaatcatcatgtcctccggtcgagatatgtccatcgagctcgcagaggctcagagtcatcgacataaccacagcgacgacgacaaggacgtcgactccaataaaattccatcagagaccaacagctaccgtgcaccctcgttctcagtcggtagtttggccaacgttcaactggatggaaagggaaggaggccgttgaatttgggtggatgggaagaacgcgttgcgctgggagtcttgttttggtaccagtgtgagtatgactttggttggatttgatggagaagaggaagaacaccgcaaagcggccatgccgaacgttccgtgatatgatgcagggtttctggatgctaagcatttctttgtatttaattattctctggggctggcggaaacggatctaaacagtcatggctggctggaacgattcgtccatcggtccgctgatcccacggctgcaagagcactatggtatttcttatgtgatcatgtcgctgacattcgtctgcaactttcttgggtaggtcaactctccctcagaaatacgttcttttcttttcttttccgctatggattgatccaaccgacagaaaaaggcttataaaacttctctggtagcttcgttgtcgccgctctggtcaacgtctggctcacgacaaagcttggttttggcaaggtgagatatatatgtgatacgtcacagaacatatcgttctcagcactgacttggtgtatcaacttactatacgccaaggtcatcgtcctaggggcgctcttctccatcgcagcatacgtcattcagtccaccggaccaccattcccgttgttctgcatatcgtacactctcagcggatttggaatgggattacaggtatgtcatggtttacttgaaagcctctaaccggagaagctgacaacgttggttgtgccttttgtagaacgcgcaagctagcacattcatagctcatcttcctagaatgatgctcaaagtatcttttttccacgctgcatatggtaagctcattgtagcgcgggctaatcaacttttttcccttctttttcctagtgctcttgaggcgaggcgagctatgtgattgatggatgtaattgtaattgtaatttcggatgggttgaaatactaggcacaggcgccttggtctctcctttggtgtcgactcagttctccacaattgagcactggaattactactatctagccagtcttggcctctccatcattgtttgtttttttcctatatttgcttgtatgctcattgctgctttcccaattgaccttatctgagagatccgttttttgaccttgtcagaacttttcgttgctcatatcggtcttccgactacgatctgaggaatccttattgggtcttcaccacgagacatcgggagaaggagctgaggaaggtatcatcaacagagaagttactttgcacgacgtactaaagattaagatggtgcatatgtatgcgctcttcacgtacgtacactcaattctcgatctttcgctcctgttgtttctatttattttcgtactaatggcgctacctacggccgatgtaatactcgatagacttatctatgttggaattgaggtcactattggtggctggatcacaacgtacatcaagactatcagaggaggttcgcttcctttttttttcttttggtggataggtccaggcttgttacggaaaccttcgaacttcttacttgaaaatctctattctcacaggtggtgactcctctggctacgtatcaactgttcgcctcctttgcttgtcttatattccctatccttctagtcgatctagtttgaccggaaaacatctatttcgtactcttcataaacactttagggtttcttcctcggcttgacattgggccgggtggtcttcattccattgaacagaaagatcggagagcgactcgtcgtttttatctacattttcctcgcgatcgcacttgaatttgtcatctggtttgtgcccagtttggtgggaggcgccgtcagcgtggcatttgtaggattgttcttgggtccattttatccgtgcgcaggcatgtttgcttcttgacttacccgatgatagtcgtggttggaacgccgagtttgatagtgactaaccccattgcgctcttcttaatggttcatcatccgtggcttgacaactcaagaatcatgattcagtcggtatcgaattcactacccaggaactacttggtcggttcagtcggttggatttcgaggcaagtacagtctgacaatttctcatgtggtcgagccatgtggtgtctgacgaactatgtatggtgatctcaacagctttggacaggctggcagtgcttgtttcccgttcatgacgggcgcgcttgcctctagagtacgtattcttgttttgttttgttcttcttgacattctaaccctgaattttacaatgataaccatctctctgtctttggtgtctttagtatgggtgagttgtatcatctgttttactctcatctgacaaactcgccctcccgttgatccgatccatctgactctcctatcgttctctcatctctccttctgtacaacaacccacagcgttcaagtcatgcagcctgtaatcttagccatgcttggtgggctctctgttttctggttcttgactccgaaagtacccaaacgacgggattaagaagagatgtatatgatgccgttgaatgtaatactactgtatataatatcattgacctaactagaaaaataaaggcgcagcaaatttccaaagattcatgcactcttattttgggggggctccacccgcccggccaatccgactgccttcttttttattcgttctttccccatcaaacaaccactcgtctgttgatctcgtctgctcgctcgcccgcctttcctgaatctcatccactcaaatgacatctcccaacaataccaacatctgtcagttccaggatcgactggctgcgacgctagccaacttaccttcggcacctccgctttcatcctaccaagctagttgcaacaactctggcacctctactccggatgtcaaccatgcgctctcccatgcccatgatcacgctttgggtagccatgcccacgatggaacctggaccccagaggtgagtgcttaaagattttggacttcttgtgttggatcgaggcgagaggtctattaaagtatgtcccggagagacacataaaggagtcattttaaagagtaagaaagaaaagtggtaccgcaaacggctcttcttcttcccaccttctttgcacgcgcgaccgagagagtgttgaattagaagagcattagtatccaccgtccgacgtgaatttgactcgaatgagcacggacggagaacatatcgggttttcttggaacgactttgctttcttcgagcgccatttttccagaaatatcgctgactgtccaaagggggccatctcggccgaagccgtcggcaatctcttattatttctgacatcgctcgtctgaccgttgtttcattttttgttgattcgttttatcctggatcctagcacggacacactcacgaacatctcgagcatgctgggaaattttccgagcgagatctgcccgactggagtggacgagactggaacgagcgagctttcaccattggtatcggagggtatgtagaccccgatattcttttctttttttttccttttctcttttttcttttcctacttctcctcttaacaagattctgatgacaggcagtttgaaaaactgacacgcatgttgaattggtttttcctcgttctatctcgcagaccagtaggatctggaaagaccgcgcttatgctcgcgttgtgcaagcgactacgagacgagtacaacattggtatgttcttctcgtcttcgatctctcggcatctcacctgtcagttagctccgtgctcatattaccatctaatgtatcacgaattatatcagccgccgtgacgaacgatatctttaccgctgaggattgcgaattcttaatccgaaatgaggctctccctgctgagcgaattcgagccatcgaaaccggtggctgtccgcacgctgccatccgagaggacatctcggcaaatttgaacgcgctcgaacaactccagattgactttggtactcaaatgcttctggtcgagagtggaggagacaatttggcggcaaactactcgagagagcttgcggattacattatctacgtgattgacgtctcgggaggagacaagatccctcgaaagggcggaccaggaatttcacaatcgtgcgtgtcgcgtcttcttgtactccttcttgtgctccttcttcctattggctctcttcctctacgttggtacttgacctaaccacaccctccatttcgaacttttccatgccatcagcgatcttctcattgtcaacaaggtatatttatatttcttctctttgattcctccgaacattcgatcgtgcttgcgctcaacgcttctcctacgactgttctattctaaaagaccgatctggcgccctacgttggtgcctctctggaggttatgaagcgtgattcagataccatgcgggacaatggaccaacattatttacgtccatccggaacgggtatgactgatctctatacgttttcctctggtcatatgtggcgctaactccagtttatgttggatgtctctttctgattatttagagagggtgtagaagacgtcgtccagctgattcttggagcttggaaagttagccaggcaggcggtgtcaagaaggacgacaaaggaaagggcaagcaggagtagaaaattgttatcgctgttgttgagttttttttgtatgatgacaagtgagatatgaaactacttaatcatcgcacaagaacagagttcgttgctttatttttcccataaggaaaaaaaaagcacgaagaacgcattttcctttctttatctctcttcttttcttttacgagtcatctcttctccttgatagcgctttctttttctcccttaacgcttaattcccactagatgtatgctccaaccttcgcttgcgctacgttgtttttcctgccttttagccatacaataatcgaatctcctcctttttttccttctccaaatcttgccgctttatctctctttgctgttgaagaggtccatcaactcgtgtgctctcaaatctgcctacgtacattgatgcgtctatcatgctcgtgctcgttcccgtgccgtctttagtgatttctctgtcatccgagaatccacagaggaaattggggtgaagggagccaatcgtgatggccgaaaagaaaaaacagaatagagagaccggcaaaggacacacatgcaaaggcagaaatagaagagaaaccaaagaaaaaaaaccccatcgatcattacatcatctcggcatcacccccatttactgaagtttcctcggatggatgagcatcgaacgtagccatacattcgtatcggtttgaatctgtcatcggcattattttccagagaaaaagatatataaaagaatcagagaatggttggtgagtctgtttaaacgttttctaaagaacagcaagagatgaggagacgtacaggttgctgtttgaattgaatagacataggtagaataccaaaagggaaagagattgatgatcagcctggcaatgactgaaccaagaaagatagcaagaaaataaacaaaagaagaaaccaaaacgcacccttccaaagtctaacctttccatcgtccccactagaactcagaactgtacctgtcgcgttccattctaccttactcacactccttccgtgatctcccaattccgctaggcaagcggccttccatccgttctctccaccttgaacgccatccgaaccatgttcatctccgttttcatcttcagtcggggtgaccttccagatccggacgataccatccctagatccagaggcgatcaagtggtgatctcttccgcaagagggggcccatgagagagaggtgattgttttagaagaaggggccgaaggagtctggcttgaaggaggggtgagcgtgagcagatgttgcgcaggggatggatgaggaagagagatgatcttgatctctccttcggttccctctccgacagctaagatcattccccaccatttctccttgcaccaactcaaacatctcccaccaccaactgcttctcctccagcggccgtactgacactcagaccaagtgatttgtcgttgttggtctttgttcttgagatcccaccttcgctcgggttgtgaacggatggagaagagccggtcggttgagaggatgtcaacgaaggtagatgaacattgaacagagggtaccaatcttcgactgagggcaaggctggcgagtacagtcggagatatgaatcggatgatatcgtagccttgttcatcagaagaccaaattaattggacaaggaaaatcaacactttgtgtatgagagagcggagcgaagaggaacatgtcgagacttacaagacgaaggccaagttcggaagggccaaaagccaagtctcggacgcttcctcgggcttcagagagcttggcaaccatggaccaccgtttattattggaactcttcagctctgaagaaaattatgacgagactgatgttcagtccatttttaccaatgccatttcggaaatgagaaagttgacctaccatcactgttttcttcgaagatccgcacagttcgatcaaacgagcacgaggctatcagagatccgtgttcgggatgagacctgagcatagaagaagcttttcagtcaaaccatacgagaacgtgaaagggaacaagatgggatatgcgaaccatgcaactcgtgctatcggagcgtcgtgagcctatagagccaaaacaacaacatgttttgtagaggtcagtctctcctgattctgaccctggtgtttttcatcctcatagagagtacgtcatgcttcttgatttctctgggttgaacacgccttttttgtttggctgaacccaaaaactcaacaaactgacgctcggctagccatccaacctcacacggttctgacaatgttctatcttgatgacataccttccattcctcttcaagattccaactggcatcagctgctttgctccaaactttgatctgttgatcactactagcagtaacaagccgtttgccaaaccagtcgtaggctgcggtagtgatcaagtcggtgtgagtcgaaggaaggactgaggattgatacattgtgaattgatggacgtagatataaagcaacaggcaggatggcttgggctagttcaaaaacgaccagataacttagtcaaatctgtgcagaactagatagaggcacctggcagacgcgtctctttaagtttgtttcttgaggacaaaggggagagagatggtcgatgtgaaccggatggacggaggcaaggagacttaaggatagaacaggatgaattaaggctgaagagttgaaaatgggtcacgtgatttaaaaggtctttctcttctctctgctttgactacaacgcgcgctcctggccctctcacatctcttctgacgcacaaagacaaagacggaggatgttggatggcagttctaaggacaagtcatctcagttcgatataccactcgctggtccacccagttgaggatggttcgccagtgtttcaacggagttatttatatgattagcattcattatattttcttaatcttaattatcagctctataaattcaaatggcaggactatgaagcgcctcgctccttgtcggataagcatactctctgctttagcatctatccttctatataagaaggagaattttctgaatcaaaacagtctgaagagttgtgaggatacaactcttcagatctgtgatatttgatacaatcgaccccagttgaggcgtcgatgccagtatttgctcagatgggcagcaagcacagtagatgacgacgaatcacttgtccatggccagtttactggcctttctggacaaaaggacgatacctggacacgtatatcgataatctggttgagtcctcgccaagtattcagaaaaaggaatcttgagttatcagaaaccatgagtagtaaacaatagctcggaaaaataaatcacgtactcatctaatcgatatttgccgtcaggtgaagtgtctgtatctcacaatttgctcactcatcttcttctgcatacatttcaggggtacgatccgataacgatatagatcactgggagagaggttgagtatgagacagtagaataaagtgaggcaaccaggtccgagaatgtacagcgttcacccacacagggtatttccatgaccggctcgatgattccgaacgtcagagtagctctgacgcgtacaagagcaaaaagatcggtatgggttccatgatcatagttcatagcaacacctacaaagcagaccatgtagtcaaacacgcaacggtcgcgtagtattcagcaagttaccgttcaagaggaaagaaggagatctaccaaccagtacagaccgtccgccagatccgtcatcacgcgccgagccttgacatcgcctctgttaacagcgcattccatcctctgtttcagcacattgatccgccattcttccatgctcatcagcggattaagaatcgcccgcttctgctgtacacgtctcaagcaagatagagggatatgttgatggaagggcaatcaggaccttttttctcagatacaaacatcaatcgcaggtgtagatggagaatatgcgctatcgtgattagccttatgttcagaagacatttgaacaacatacacatttgatgattccagaacttttctgaaacgtatattgacatatcgaacagtccacatgtatatctcacggcattggtcaatgtagctcatcactctatgtgcgtttgggtcatattcgtcgccgtgcgcttgtaaaccttcacgtgggtgtagctgttacagaggcatacatcagtgtatgattgcgttcgagtgagcgctgacagaaacgcagacctaagtagatcttatgggaatgaatgagacgaacaattggtcgagcatcggtcttcagatagtcttcaagtactcctggagggtttgattgaatctagtcttttattattattatttggaaattcgtgagaagctatactaaaacgtaagaggtgaagtgaatatgccgactcgactgtacatagcggaagaaagacgctgatcacgttttgacagtgcactggtacatacgttttatatttatatctataaacagcagtccgtatactccataggctgatagatgtacgagatgacgagagaaaattagagatgagtggtgataagagttttgaatcttgtgtctgaaaaggtagaccgaccaagattatgacgaactgatcagccgactgaccgtccatgtatgacatcgtccaatgactttttcatactctcctgccgctttacataaggcgctccaagtatatagtaattgagcgagcaatagcaggttagatgtgagtaaggtagaggtcgagtgcctctgtctgctcaatacctcacactgaggatccttggacgcagttgtgaatcaaggtcttggcgtgaaacacttgcggtatgtaggagctcatagggatgaagggctatgaaagacaagccaggctcagaagacaccatagctgatgatacgtttgacatgacatgtcataagaaataagcagaagcttgatcaagacaagattggaagctttgggaatgatcatgtagttatcatgtttgctctacaagagttacccagacaaagagtaatacacacatacacgacgatctcaacagccggcttctttttttcctttctcttccacttattcatccgtccatcaagatgacaagatatcgttagcccatgaactatttctccactccatataccctacaacaaggtagccgacgctacaatcaaaggagtataacaattgtggaagtgataggaatagtcatagtggcaccaacacaagcagtgacgatcccgaactacgtcattgttcgcttcggatgactcatcagaattctgtccgcaggccgagacggatgaatttataaggatcggaaaaactctcttaatttttcttcttcgtcctctttcctcgatcactttcccactcgaatcaaccatcaaccctgctcttcgcattacaacacatctgttctatcacttgctcatacatacgcattctcgtatatacacacgacaacatgggatttatcaacactacccttagcctctttttcgttcccctggttgagcctgtgtatgcctccaaacccgcagtggtggagctccagtcttacgaatctcgcccatctttctctgttcgtccctttcaatggttatgcattcctttccgtgttgattcatttggctgacatccttctcttctcatcttgccttcttgttttctcagtcatcgagcacagtctctcctcgtccctcgatggactcattcggcaatgccgtgcacaacacaaccaagccttgggcgtctaaaggcacaagcccatccaatgtggagtctaggagatcgtcgtctgactcgtatgctcctaccttttaaaggtatgttcttttgtgcacattgatgaaataggacaatttggacaagacgcttatctcatctgttattcttatgtttccctcccgacagtaccctaatctatctacacttgcatctacccacttgggcttattatctatataatcttactcacgctcatatctaggcttaataacacataatgtaaaacaatttatagaactgattgctcttaaatggtccactttgcttcgttataaatatacatggttttcttatattatatgggtggctcgaacatgagagaacaatgataaataaataaatgaaatactgatatctcatgtacaactcaactagggcttgactcatcgatagatcggcaatgattgcccagagtaggcgtatgggatgaaagtaacggtctgatggcattggtacgatgtcgctactagaaatttcgggtaactccgtcgaggcagacccacatggagacggcatcccatgatggacgggaagagtactcgaccgttcttgtttcacctttttccatccacctttttcttctacaagctttatccgacacaacatcgtcatcatgaagattcctctcttcgttgtacctaccctgaccatcttaccagtggccctctcaatccctcttcagtttgtcgcgtctcctccagatgcttcccaactgctcccgtctaacccggacttcacccttggcgatgtcgaccgcctactcaagatccatcctgatccagtcgaactcatgaaacttctctctcccgagacggctgaagaggaggatgagcctcggctgctaagggtgttcggcaggcaggcattctggggaacagaaggagacaagatgaggttgcggagggaaggccttgggtttatggatctcaccggtttgtccgacgagaccgaaggattgtccttgatcgagggcaaggcagacaactgtatgtgtaatgaagatgctcctcttatttctcttgagaagtttgccttgatcataacatcggcatctaatgacgagaacaaataaataaacgattgatcagatacctggccagacctcaagtatcaggatctcgttaaagcgatcctaccccggctttctacatccaacatgcactcaaacctcgttcatcttacatcgttcttcaatcgattttacaaatcgccccatggtgccgaatcatctcactgggtctacctccaagtgctgaagatcgtggcggacgctccagctcatgtgccgctctctgtccgaaagtttacccatccgtttgcccagagtagtgtgatcgctcgatttgaagcaaagcagaccaatcacaaagacaaggtcgtcatcatcggcgctcatcaggactctgcgaactacagacttccgttgctacctgctcctggagcggatgatgatggcagcggaacggtgaccatcttggaaggttggttgatcgcctgtgcatatgccattcatcatgcgttaggggctcctgatactgatcaacaacccactctttctctgcatccattagctttcaaagcgctcgtcgagtctggcttcacaccaaaggttccggtcgaatttcactggtacgctgctgaggaaggaggtctcctcggatctaaagacatcgtcaaggatatcatcgcttccaatgttgacgtcaaaggaatgatccaattcgcaagtctagaccctcaattatgtacaggaagcaccctccactagaaaactaataattttttgtcctctctgtcggactaatgggatccttcctgtcttcttctctttttctttctctttcataaaggacatgaccgcattcacgaaagcgaacatgacacctacggtcaccttgatcgatacggatgtcacaactagtttgactcaatggacggttaaggttgccaaaacatactcttctatcaaggtccaactagcttctctcttgtgagtacctctcttgccttgtgcgcgagttttggtgtttgttcctatttctttaaccagaaaaaaaaagataccttgaactaacgctcttgagagcttcggctttcgccgaattattgatcagcccgggagcagggtcggaccacatgtcgtactaccaagctggattcccttcgtgctttgcgacagaggctgatccgttcgtcgcatttgatccttatgtccacgtacgtgtctggtctccgaaaaaaacatcgacatatgctttcttctagctcgatctgacgatttgtggactgttctctccctggcttttgggtatcttctcacaaactgctttgatctcgcgattcactctgcttatcgatctcgaaaaacataacagactacgggagacagaattgatttgcccaacaaagagttctcgttcgagcatgcggtcgagttcagtaagctcgccattggctttgccgttgagctcggaggttgggaacagtagatgatcagctggcttggtgtcgcctagaagctttcttgaatagctgtacatggcttttgttccttgaattttttctactacattctcctcgattgtaaatttcagttgtatgtaaattcgatcatcagatggagggtcgtgggaggacccagtgcatcgtaaaagaggatacaagaaaacaccctttggtcgattctccttttgttcaggacattgtcaacaaacctctaatggcatcttcaccttccaatcgaaccgagcgccattcattcatgattgttgctcctactttcttttcgtaaaagttgatggctggctcgttccactgggttttgttgagaaaagaaagataaattggtctcagcgcgcacgcatctagatccccagatagatcaataaaagaaagaagacggcttacatcgagcacgctccaatccatccttccacatcctctctcgagcgcgacttttgcgagttccttgaagaacgactttcctacacccaacgcgcggtaaggttcactgacgaagaggtcttcgaggtagagacctggaaaaccagtccatgtgctgcagaaagtgattaaatcgacgatggtctgaatcagtccgagctttggaaatgagacgtccacctgagcttggacaaaggtagaaagagattggatggacgaacctgaaattgaaaaagaactatgaccaaagtgaaaagcggcaaatgagtcagagttcgatggcaaaaagcaacgccggaatgaagaaaaaaattggggtctatattatacgatgatgccacattcggaaaagagattcgtaccagagccattccaatcaccagtcctttaccggttccttcgttcccatcctggtcgttatcaagccgagcgatcagacacctagcatagatctctccatcagattcttttggaaagaggtttcgcctgatttgttcgggcgttgctttggcggattcggctgatttctcgtatatcgcctaggtaggagggaaacacagcatgtgcacgcatgcgtgaaaagacaatcaatacgtcagaggataaacatatgaaaaggaccttgaaggaattatagtcagtgattttacatatgccaacgaaccaactccaagatcaatcgcaaaatgtcaggctgttttggtttccataaaaaaaagacgtcgaatcggaagtgtgaaaaatagggaaacagcatacgatcaagtctgacaaagtgtgagacgtacgatgtcagcctccgtagcaggactgatatgaaaagcgttggagctcatatgatgatgaagatgcggtatgatagactcgagatgttgacggatgatgagcaaagggtcggacaaataactatgagatgagaaaacaaaagtgataaatcatttgggatggacatagtgccaagaagagatggtaagcgtgcattagggttgatggcgcccacgtgactggatgactcatatcttgttatgattcaggtttggagggtaatgtcaggaatacgggttaagtatcacgtgttctcttacgtgggttacccctacaggctattcgttccctccatcccttatgcctcttcgcccattttccatcatgctctagtttgcatggttcatgcttcatctttttagttctcgtgatctcgagcctctctaggctcgtcatatgtatatctttagtggcagaccaaatgcgcgaggggtcctgatataaaacggggacgccctcgcgccttcttggataagagttttcctcaagctgagattcttgttgaaacctcttatccaaagtatattgttaatagtttggtctgcttcagatatattaatcgccagagcctaagtgtcaccccgcgaaccaagtgattacacttggttaccttcttaacaaccgagccttacaggtgacgacgaggttacaggagttgtaaccacaccagactcttaggattcaaaggggaaattcaggccctcaggactggaaaataggatggataggatcacgaagaacaagggtaaggacaaggacaaggacaaggatcaagattaataaaagatccaaacttgggagactaagctatgagtggcgaagtagtctcgtattatatttcgtcctcagactccaacagttatgcataagagaacagatcatagaatgtgctacaagcacctgcgctaccagactatgtacctgcatgttgatgcagtgaggaagcatgaggagtaacgagacaggaggagaactagaatcaacggaaggttaccggggtgtaacactcaggtcacatccctgacat

SEQ ID NO: 159 - DNA, 967 bp, Xanthophyllomyces dendrorhous
gtgtgtgtgtgtgtgtgcgcgattgttatgataatttccatagagttcaagggaggaaaaaaaagggtcaccaaagctcgctcgctcagtcagtcaaccagtcgttcacccatccgacgcacatacacccagagaagaaaagaagaacaggccatgaaacatgaaacaacacactcacctggaaaggtcgatcccagtcgagcgccattgggaaaacaccgagccaggctccgagaagagcacccaataccgggtacaccatcgctctttccaccggtgtcttgagtctttttttcgtgtagacatcgttggtggtgggggggaaaagaagggaaaataaaaatagaaagagaaagagaacccagaaaaaaaaaagtcgaaaaatgggtgtatataccgttagctggtcaagtctctttgcaagtttaggaaccctccgagaagaagaagaagaagaagaagaagaagaagaagaagagaaagaaggagagaaagaaggagagaaagaaaaggagggggccacaaaacaagagactcaacttgacgttcaaaaacaacctgacccagtcccatctagcttttcctccttcgaacagttcgcccaacaccggcggcggtcccagcagggcgaccggggtccagacggtcaaggacgaaagcacgagggagagcaggtaacactcgatctgacggctcgccggggagaccgaggaggtgaacggtcggaggcctaggaggtggataaagaggtggataaagaccgaagagatcatcgtcgtgatgatcgttcgtcggagagccttttggaggggtccataaggtatcggttcaggcgagttcgccaacaaagcgaaagaatgaatgaagggaaacaaccaaggcaaacaccacttggtcagctcaaccaagcctactactactacaccaccacctcaggccccccccccccaaaaaaaagaaaaaaaaa

SEQ ID NO: 160 - DNA, 3417 bp, Xanthophyllomyces dendrorhous
  misc_feature (1014)..(1190): n is a, c, g, or t
aaaagaaaaaaaaaagaagatggcccgaaaagaacagacctttgactttctcttcttctcgccaactttcctcaacacggcctcttcctcctccttctcctggccgccgccgccgccgacgacgagcttcttcctagcgttcgcctcctcctcctcctgttgatcccaaagatccccgatctgtccggtccaccacgcctcgacagcgacgagaccgagggcgacccagcctgtgaacgcgcctgggtcggccgtcagagcggcgacccagtgccactccggtctatccgtccccctcttgccggccggtccggcgggggaagagatctcgaccgggaactctgaccgggggagggcgaggaggacgaaggagaggaggagcacatgaaccgcggtgagagagaggtacttgcccaacggaaacacggccgagagcgagggaagggggagatctcgcgtgtcgtcccctgcggtcgtgcccgtggccgaggtggtcttcttccgggaggggaacaccggtttcttcggagccttcaggttcaacaacggaggcatggtattgaagccttgttgccctcgtttttctttgcgtgtctttctcttggtcttcttgttgttgttccagctggaaacggtgcgatctcgtctgggtttcttgagtgttgatggaggtgttgtttgtggacgtgtgttggttgggatctagagataattcaagaaaaagaacgaaactcctcccataataaatagataaataaataaataaagaataaatgaaaagcaagatgatgatgaagaatcatcttcatctcctcctcttcttgctttttttggtctttcgatgtgacttgaacgtttcgaaacgaaaaagaaacgacaacgatcgaaaacatcaaaacgatggggaaaaacataaatatatcttgggagttgagcccagtcttagcacacactagcacaacgttccttcttttttttaaggtcaaggaaagagtgaaggaggggggggggggnnnnnnnnnnnnnnnnnnnnnnnnnnnnnnnnnnnnnnnnnnnnnnnnnnnnnnnnnnnnnnnnnnnnnnnnnnnnnnnnnnnnnnnnnnnnnnnnnnnnnnnnnnnnnnnnnnnnnnnnnnnnnnnnnnnnnnnnnnnnnnnnnnnnnnnnnnnnnnnnnnnnnnnnnnnnnnnnnaaaggaaacaggatagacacaaaaaaagcacacacacgcacaactacaacgacgacaacaacgacaacgaatagagaacagaaatgatacatgctagggtgtgcggttcgttgagaaccacaatgcagattgaatgtgatgagatagagagagagagggatgacatatgaaaggagaaacccaaagagaagaagaagaggaagaaagacttattttaaaaaagaaaattttaagaaaaataaaacaacccagagaattcacctagcgcaaagcagcttaggcggaagcagggtaggtctctcgggcccacttggcggcctggacaaggttgaccaaagcggcctcggtctccttccaacctcgggtcttcagaccacagtcagggttaacatcgagcaagtcggcggggatgagctcgagcatggcggcgattcggtcctggatctcctgctgggaaggaactcggggggagtggatgtcgtacacaccgggtccgatgacgttcgagtagttgtgctgcttgaagacgtccaacaacttgagggacgacttggaggcctcgatcgagacggcatcggcatcgagcctctggatggaggggaagatgtcgttgaagtcagagtagcagaagtgggaggcgatgaaggtcgagtcctcgacaccggaggtcgacaatcggaaagagtcgacggcccaggtgaggtaggcgtcccagtcgacccgtcggagggggagaccctctcggatggcgggctcgtcgacctggatggcgtagattcctccggcctcgaggtcgttgacctcgtctcggagggcgagggcgagctgcttgcactggatctctcgggagacgtccactcgggggaacgaccagttgaggatggtgaccggaccggtaagcatacccttgacgggcttggaggtcaaggactgggcgtaagcggaccatcggacggtcatcgcctcgggtcgggagatgtcagagacgatgatcgggggtcggacgcatcgggaaccgtaggactggacccaaccgttctgggagaagaggactccgttgagcttctctccaaagtactggaccatgtcgtttcgctcgggctctccgtggacgaggagatcgagatcgatcttctcctggaaccggatgaccttctcgacctcggcctccatggccttctcgtagtcctcggcggagagctcggacttgttgaacttgtttcgggcgattcggatctccttagtctgggggaaggatccgatggtggtggtggagaaccgggggaggttcaatcgcttctgctgggcggctcgtcggacggagaacttggactttcgctcaaagtcggagggcttgatcgcggcgactcgctctcggacggcggcgtccgagttggtctcaaagtctcgtcgggccttgatcgaggccttgttggcctcgagggcggccttctgggcctcgtcggccgagccggagacggcgtgggcgagggtggcgacctcggcgaccttctcgagggcgaaggagagccagtcgagctgctgggcggtcaatcggtcctcggaggcgagggtgaccggggtgtggagcaaggaggaggaggtggcgacgatgactcggtcggcgccgagggcggcgatggccttctgggcggtctcggcagccgcggcgaggtcggccttccagacgtttcgtccagagatcaaaccgagggagagcacagtcttcttgtccttgatggcggcgatggtggcgtcgagctgggaagcgtctcctcgctcggagagatcgacgtggatggcgtcgacggggagatccttgacaaagtcgagggacttgccaagtcggccgaagtaggtggtcaacacgatcttgggggcgaccttggagagctcggcgtaggtggaagcaaactcggcaccgagggactcggctcggtcgaggacgaggatgggctcatcgatctggacccactcggcaccagcctccttgagctgggcgaggagatcggcgtagagggggacgagcttgtcgagcgactggaggggctcgtaaccgggggcggcgtcagcggcgggcttggagaaggcgagcaaggtgatgggtccgaggaggacgggtcgggtggtgatgccgagggccttggcctccttgaactcgtcgacggccttgacgttgttgagcttgaactcggtggatccggagacctcggggacgatccagtgg

SEQ ID NO: 161 - DNA, 969 bp, Xanthophyllomyces dendrorhous
ggggagggaaggattagcacgtgcgcagcagcggaagaaatttgcaaaaaaataattgaaggcgaaaaaaaaaaacccgatcgactcaccatttcttcatctccatggcggaaagatcgataccctgctcagggacctgtcgacctcgacccatggcaaaggcaatgtcaaggggggagagtccgtgcttggtgtatcgctcggggatcaagttgaaagagacacagtggtcgaggacgtgatcgtagaaggcaaagtcattgctgtgtgtgtgtgtgggagggaagaaatgggatgagttggtaaaatgaagataaagaaaaaaaaagaaaggaaaaaaaaaggaggcatacgaagcgatgaaatcggctcctcgctccttctgggtctgccatcgctgctgtcggacggtcttggcggtggcctggagatcctcagcagaggtcttgccagcccagtaagcctcgacggcctttttgatctctcggttgggtcctggggaagagaagtaatgggaaggaagaggtaaggagatgggataaagagatgaaagattagatctcggttgggaagggaaatgggagaaaagaaaacaaagagagagggatttgccaataacgaagacgaggagatcgacgatgattggaaaagggaggggaagaaaaaagaaaaaagaaaagaaaaaaagagagatggagatggagacgaaccgattcgggggaatccaagaacggcggaagcgaccatgatgaaagtgtgtggtgggtggtgaagagtgtgtgtgtgtgtgtgtgtgtgggtgtgtgtgtgggtgtggaagaacaagaaagatgtgtgaactccttcaattttacaatcgaaagaaacgaaaagagatagaaagagaaagaggaaacgagagcgagtgagatgaaaagtggcggggaagagaaaagaaaaaagaaagaaaggctttttgttgtataagta

SEQ ID NO: 162 - DNA, 42966 bp, Xanthophyllomyces dendrorhous
cacacacacacacacacacacaccaatccaaatgaaagaatccgatatccaaataccaaaccatcatcaccatcatcacctcaccatcatcactcgattggaaagaaaagacacagagatcacgacagggagagacagagagagagaagatttacgataatcggtcagaccggggcgatcgaccgattggagccgcccgataagccagccagccagcagccacacaagcacgcacgcaagagcacagcccgtgtacagcttttgctttcacgtgtctacacctacttttgctctgtgcacttactacccatactccaacgtgtgcatgtctctttcaaaaatagtgccggcacaacgattgcctagctctaagcccgggttattgatgcactcacactcacactcatagaatgttgaaccttattcatacaagcatcacacacacacacatacacacacacacactacaaagaagagaaagaaagaaaagaaaaaaagaaaaaaagaaaagaaagactaaggtctccttccaaagctcatccaaagaagcccttcgtcccaccccgacctcactgctcattcacaaacaccgaggcaagacccataccagacccaatgcacatactcgtcacaaacaccttctcgccagatcgcttggcatgggcaagcgcagtcgcaacctgtctcgccccggtcgctcccaacggatgaccaagcgcgatcgcccctcccccagggttgaccttctcaaagtccaaccccagcttcttgacagagtagaccgcctgggaggcaaacgcctcgttgatctcccaaaagtcaacgtccgaagactcgatccccgcgttcgccaacgccttcgggatcgccaccgccggcccgatccccatcaccttcggaggcacaccagcgtacccggtcgtcacaaacttgcccaagatcggaagcttcagcttctccgccatatcccgccggacgagcaacaccgcggcagccccgtcagatacctgggacgcgttgccagcatgcgtgcttccctccttcgagaacgccggcttcaactttgccagcgactcggccgtcatcccatctcggatcccgtcatcctcgtccaccagcaccgtctttgtctctcccgactttggatcaacaatctcggtctgtttcgtgtacgaatcatcacacatgaccagaccaatccaaaatgagcactcgggtctcgagagaagaaaacacatctcacacaactaaccttgacgggaacgatctcctccttaaagtggccagcctttctcgcagcaaaagccttctgataagactttgctgcaaactcgtcctgctcctttctagtcactccaaactctttcgcaacgttctcggacgtgatccccatcggaatcaacacgtcctgggcttcctggttggagagcacatcttccgagatcttctcaggtaggacaccagctccgtagtgtgtcgtcatcgacttgaaacaagaaccaaactcagtcagcgcatgcccagaggagagagtgagtccaactgaaacagattcctctcactaacctcgactccagccccaataccaatagagatctgaccacatgcaatcgagttggcgatctagggtttttatatttgagaaagaaagaatggcatgaaaaacgattagttcaggggaaaaccccaacatcacatcaatctcacatctgagaacgatactgacctgagtgatcgcttggagagaggaagaacactgcctgttcaccgtgttcaaagacgcactgcaaaaagaccgtcgttcgatccaatcaaaagaagagagatcaatgatctgtgtggttccttctccaggaatccaacgaacaagagcgaagaaaagaaaagaaaagaaaggaagagaaaaaagagacaaagacaaggaggtcgtacgtatgagggatccctgctcgaagctgagccattcgagccacgttcgcacctcctccaggcggaaggacatttccgacagcgatatcgtcaatcaacgacgggtcaaccttggatctctcgagcgtagccttgaacacagccaccaggagatcttccggaagcgtatccttcaagcctccttttcgtgcctgaaaaagagacccacagcgatcacaaagactaaaggtgtaagcaaaacaagacgaaaacagaaagcatatggacggatggacgaaccctggttatgggcgttcgaacggccgaacagatgaccacatcgttcgcgttcttttgcaagatcttggactttccagatggcattttcgtagtttgtttgattcgtgttgttgttgttttttttttcaaagaaaggatgaacgaggaagtaatagatgagcgagtgtcaagttgtggttgaaagatgggaaggaggaaggaacaagcgagaactgtttgctttataagtacgagcgtgtgatccggtccggttatatgacagccgcaaacaaagtcgctcgttaaccgaaagcatggtacatcacgtgcacactttgcaccgcctagttcaacatgcacatcgaaccacaccgaaccagcccggttcgcctgaagaatttggtttatcccagaaagaaaaaatctataggacacttctgcgtgtgcttaattcgcaagttgagccatcccaacacattcactcacacacacacacatcaaccctcccaatatgcgacctttaaccgaagaagaaaccaaggctgtcttttccagtttgtccaaactttcgcttccttttgtgtcccgccataaatcactgacgctcttcctttcgtcccttgacccaaacagagcttgccaactacatcgttcgtcctttcctttccacatgctttgtgaacgtactcaatgtcgcctgatcatcatcaccatcctcttcttctgtatacagggaaagaacttggtccatctcgttgatcgaccggaaggcgaggaacactgcttccgattacacaaggaccggttcgtccctctcttatatatcgaacgcgctttcctctttcgactaaagtcgtctcctaacttgtctttggtgccatctttctgtttcctcccccccccttgtgactcccggtttctcatgtcaaccctcactcacaacactacagagtctactatctcccgacaccccttatgaagcaggccatttcgatcgctaggccgaatttaatctcgctcggaacatgcttcggtcgattctcaaagtccggcaagttcaagttggcggtcacctcgttggattacctaggaaagtacgcaaagttcaaggtaaggagtgttgactctttcgatccgttcatatactctggttgactgcgaccaaccatactgaccaacatgtcactgtactcatacaaccacgtcttcaggtctggatcaagcccaatggagagctcccgttcttgtacggaaatcacgtcgtcaaggctcatctcggtcgaatcaccgaagacaccccagagcaccagggtgtggtcgtctacagtatgagtgatgtcccgctcgtgagtcctgccatcttcccaagctcgctctcccgtcgtgaaagaatcgttaagaaacaaaaggggaacacagataactcaatgttcggtgcggctaaactgacatgtatatgtgtgtctccctcttctttcccttggcgcgggcagggatttggtgtgacggctaggtcgacagttgatactcgaaagttggacccgacgtctataatagtattccaccaggctgatgtaggagagtatctccgagacgaggtttgtcctatcgctcactgttgcgaccgacgaagcacaaccaaacgaagtatactgaccttgtctcgacaactcttgcttctctctccacaggatactctattctaagctcttctgttcaatcttcctcaactgaaaaggaaagaagaaggaaaaaaagaaaaaaaaacccctctttagaaacgccttgttggcttttcgtttaccttttccccgacacctttttactttctttctctttcacaattctctcaacctcttttcgccgtgtatagaatacaatgacatcacacgtaaggagaggcgaataggagacgaaggagagaataatctcatgatttcatagtttcatattgcatgtttatcggttccaaaccttggtggccatttgtatagcgaacagagacgaacggcgacagtattgaaaacaagcgggttcataatgttagggctatcttgcgctcaaaccactatcacatttagccttctcgtgcgcccttgcctcgagcccaatcgcctcgggatggtgtgtatataataagctaaatgtcgttcacagagaagctgagatgttcagcgaagggaatagagaatgaaatcacagcaaagtgttgataaaataagaataaaaagcaaggcggttactcgcaaaaaagagttgcactctattggaccggacatattaaatcgcgaaatcccgcacgtgtgttcaccgtttagggattgtctcattaagtactcaacagaatatatccacccatccacccatcctacttccttctggtcgtccaccgattggcttacttctcttttcctgttgtcgaccagtgtctcaagccaaggttctttccagaagcccagagtccgaacatcgactctcagagtcatatcactcagagttgtctcctcgcctcccgctctagtcttccttactatgcccgagcttacgccagccacgacgacgctgcgaccagatgagccgctcccaaagcatcttagaccgtcacatgcttggacgaaactatggatcgccacaaagaatagcttgaacttttatcggttcgtttaattttcacctgtctttggtctcgtcctttccttctctggtcagagcaacatcgcgtgtaagacgggtgggagaaggagctcgcaagattcagaccataactgacgggtcttgtcgttttctacccaatctctgaatgctcatctgggttatatatacaaaaaaccctgttcatcagtgtgcatctgttgttcttcacgatcgtaagtttgttttgatggttcataaactcattcataggaggatacgtcacagaagcgaccaggcctattcttccaaatggttcactccttctttgtggccacgaacgacactctgatgattgaactaatcgagacttctctttctttcttggtcgacttgtcccgtcatagactccgctagtgtgtattctataatcccttttcaatcttccttaatcccggccgtatggcaaactgacagaccgagcctgtttcatgatgtcagttcttctctgcactgatgtacgcctcgaacgaacgtaaggcttttcatatgtctcgtattctttttggatctatctccgtccgactctacgatgttgactgaccataacgaactctttcctttgtggaaatctgttcccgcatttacagaattccatattgactatgtcgactgtcttttcaactgcgtgagcgctatgacgtgcgttcccttctgttttctctctcccgctcttcggtctacgagctacaagccaagcgaagtaagactaacacccatcatgctccctttggactgacggttcatcatgtaccgcagggtttgtggattggcgacaagtaatttgagcacgatgacttcttggcagcagacaatcttgttcatccagatgtgtatcggtagccctgtgcgttcctctttctctctctccctcccttccccactttctccttactcttatttttcattacggtctaatctcaccattgcatctggacacacgcgcctattcctctcggacgaaacagatcaccgtttcgctcgtgatgatcgccgtcagaagacactttttcagagtcaaattccgacatgtgatcgaaacccacagacggaaaaagtcgttgtcggaaaagcgatcgagacgactctcatttttgagcagagccccttccagatggtcgaccaaccctgcaggccctagcggtgctgatgagaacgacggaacggtagcaggatcaccaccagaggcatcagcaggaacatcgacagcagagaaagtaggagaaacctcagccgggtcatcgaactgcgacgaaccagggaaatcaccactgcgggctcagatgtactcgtctggttacacttttccttctcaatcccgagcggccgccgcttcttcttcctcaccctctccaaacgggctcggatcgaaaggcccgttcaagtcgtttgcgtcaatattcaatcgattgagcccgaactctgatttcgacgaagaatcgatcgaagagagaaaagaacgtaagtttgcgaaaaaaacagctagactcgaacaagagcgagctcgaaagttggcggaccaagcggagaaagctcgtcggtccaagggcggaggaggtggtcgagtcggtgggctgcacacctcgatgatccgacgagtcgagggggaggagccgatgctggtcaactcggcgggactcagaggaggcatggctgtagatcgaacggacttcgaactcaacaacatcgccagatccgaagccagcgcagatgaacacaaccaggcagaggtcgaaacgccaatagagacaaatccacgagcacggcaaggggaagcggaagaggctgagcaaccaacccaggaagagactgaggataggtacaagggggcagaacatccaagactgaagcatatcgggcaaatgacagagtcacctgcgggatcaggatcagattctctaggattcgttgagccagaagaaatactggcaaggtcgaacgcgggccgtccaagaagagtgtctgagcctgtgctggtggaccacccacctcagccgcctcaaccggttcacggtatgccctctgttctctttatttctctaagtctctctctctctgttagagtttgagtatcgtgctggacattctcttatcttgcctgaatcttaaaaaataaaaacgaaatagatacgttccctcgatcgaaaacaattgcattcgatccggaacagatcaatccttcgcatgcagcgcatcatgcctctcataccgggctcaacggcgatcacaattataaccacaactataacaacaacaactacaatcacgggaacgacaaatcaaaaaacttcacgaggacggggacgatcgagttcgttgagggtgatgcagcacgtttgggcagaagaaatggcggaggaaccatgttcgaacgaagtacgtttttccttcaacttttttctccgtgttcacaagaattcggatttcaaagatatagcgaaaatagaagtacaaaggttgatctgagttgaaacataacaatcacgacgaaccggatcagccgcaactcgtcgatccgaaggcgcaggtacaatctatggcccgtccacctcacttttccctcgcaccatgaccaatcgaacagctggcggtcgatcaactaagcattcggggtttggagggttccccatgccacacgagattatttcctctgttgccgcctggcttttcccgaaagcgacagaaaagttgacaagaacgttgacgatgcaacgaacgggaacgttcgccagtgctagaagcgcaggcgctggtacaatctatggaccaggcgggccgaagggagggggaggtgtggtgaagagcgtgccatacatcacgttcgacgcggtcgttggaagaaattctcaattcaaggacttgagctcagatcaactagaggagctgggtggggtggaatacagggctttaaaagttctattatggatcatcccttgtgtaagttctgaaagaagagtcatcgctccttcatcggttcaattttctgggctgacgtcgttcatttatttgctcgtccgcttttggcatcagtactatgtcggagtccaactcctaggttgggtgatcatctggccgtacgtaaacagcaagttccgagatgttttttcggatccgacgatccaaaagcaagatgtcgagattggatggtaagttcattttagttcttcttatacatgtatcgcgaaggacgagtcatagttgactgataaatttaaattggggatggcgatatcaggttttcagcattccaggtggtctcagcgttcagtaacacgggaatgagtctcgttgatacatcgatggtgccttttcaaacagggtacatcatgatcgtcgtaagttactcttcaccggcatattacctctttctacatacactcccaatttgtcgggttttcgtccttttcactgacctcttcttcaacaactgtccgatatggccttgaattggatagtacttaatcttcctgatcctagctggaaacactgcctatgtgagtatcgtctatctgtatgaattgcagaagaaaacaaaatctgacgagggaccgtccaccaatatggggatcgtctatacagcctatcttgtaagttttcgtctgattatgctccaaactcatccggatgatttctgacacttatctgtcgccatgttaactcgtattcctgagttctgcagccttcgtctcacgatgtatgcatcttcccttatgatctggtctcttgtaggccttgtgttgaccttcaagttggttgtttcgtttgggtcaaacttggtattgcagctggaacgtctccaaaattgtcccttcaacctctcggttacacgaaacatgtcgcttcttgctagatcacccacgtcggtgttacatctacctgtttccgtctcgtcagacgttatttttgctgatggtcatcgtcctaatgacgtgagtcatctatccgttttctttattatctgctttcaaattcatttcaactgaccgatgtttgccatttgggatttgaatataatggttgataggatgaccgattggatatcgttccttgtacttgatataggaaccccgtaagcagattattgttaaaatcgaccatggtcagatcctgatgatcaacatctgatctctttacatgttttcatgactggaaatgagcagcgcaatcgaatcgataccggtaggaacacgtatagcgagcgcgttccttcagtcggcagctgtcagagcggctggattcgcaatcgtgccgttatcggctttggctcctgccgtgaaagttctgtatactattatgatgtacgttcttttcttctcttataccttctggtctcttctttcttcgtcatcatatacggagtataattctaagaataaagctaatggcattccttctataggtacatctccgtctacccaatcgccatgtccgttcgagcaacgaatgtgtacgaagagagatctctcggtttgttcggagacgaagatcaggaatcgttggacgaggagagctttgtcaaggtagggggcgagtcaagaatggctggtttcactcgatatgtctctttccatgctaggtatgagctttctcattcccaatacatagttcacatcgtacaccgtccgagattattttgtcttttgttcacaacaggcgtcagttggctttcgatatctggtggctaggtgagctatgtttatctcgttgtcttcggcgtttttttagaaagtatctttattgacaaatgttctctcgtctccaatctgttactatttacaaagcccttgcgttgtggcttgtgtgtatcatcgagcgagggcagatcaacgagtcctcaagcgagagctatttcaatatcttctccatccttttcgagctcgtcagcgcttacggtacggttggactcagtctaggattgtcattcgtaggtgctataccctatatatatcagaataatgtcgtcacattgaagcttaactacgaattctttttctttttgatcatatgcacttggcacatttgaataggataactactcacttagcggaggattcaaagtcctctccaaattggttgtttgcgcggtgatgatccgaggcaggcatcgtggcttgccagtggccattgatcgagcagtaatgctaccgaatgagtttgccgaggaagatgctgaggttgccgaggaggaaagatcgagacagagcagacgaggcaggtaagatcttccaatttagctgaagccaggtagtcattcgcgtttaaattttgttcaatcattttttaactgggtttcctcagtacatactccttccgacaagggcctatggatgtctcgtacggccacgtccataaccgtcgagcttccactttctctgcgcatgttccccgtcctgggccacctcaaccgttcttccttccttcagccacgagtgatctagaatgcgctgttgacgacgacgatgatgatgataacgaatatcaacgaagatccgctgatcaaccggtaggaggttcagctctccctggtgttcattcagttgattggacaaaaccccctgggataggtaggttgggtggaggggcaccggggagtctgacacctgtgaaagagatgatgagcagacgacctagtgtagacacaccttgagtagactccgtctcgccgcctctctcctctcctccctccctttttgcttttacacggtttttatcggtttcaaaccatctcattcgcaaacgctccttctttctcgtccttctctgtacatcacgcctagctttcatcctttctgtctgatttctttttgcttctacatcaaacagtccaatctgagacataacatcatcactggatagaacgaacctcgtctgaatgtcttatcatctcttcctgttctatcttgacatacagctgcaatcttatctttctttctctattcgttcttctggtcataggtattgtactttgttcatcttcaactacccataatcaaagcaatctttgatgtcatttgcatcgagctttactatccggcataagatatccagggttaaatacacacaaattacatcccacgaaacagttatctactggaagagaaacagtccgcatcttctctcattaaattcgatctacacagcacaacagtgagcactcagcaaagtcgaccccccacatcacttatgagactcaaaatctctttccgtttgacccactgagtcttctgctcaatcgtatctttcgcacccagaacttcaaggttcggacccaatgtcgagccatgatagggtgacaagtagagacagagtgccagggcggaaactagtctgtatactatttgattgatgatcggtttgaagttaggaattgaaagaaaagtgaaaaataaatagattaatcatgctttcaagttgagtgcttcctctcgtatcgcgcaacgaaaagaaaagaggaaatcagagcctacaacgtaccaacatcttccgatttgttctctagcttgatggcctcgacaagcacgatgacgatctctaaagtccaatcaccttcctctgccgactctatatccttttcaagctcattcaatgagtttcgtcgatgtctcaatccactgacattgaatgccaaaccagcagctgagcttttcaacgatacatcgtcactgagaagattatccaccatgagcgtcgtaagaatctctcgcggggaagaagcagatgatgaggatgaggacaggttggcgagttgatgtgttgtggagaggacgagcgatgcaagaggaacggtagtgaatgcgttcgctaaaaatcgaagggatgtaagacagaatggtcgggagagggatgagccatgaccggaagaggacgcggagcataagctcaaaagttctaatatgggagggagggatgtgttggcatgatctctggggatagaagaggacgtgacaggtggcatggtactaaacgtcgacactcttcgatctatgatggcgatcctccaaagatcaatgagggggaatgacgcttcatagccgacgtttcgaataacttgtacagttgctttgaggaactcccctaggagatcttccagcttgatcccatctgggacagcctttgtttccaagaatggaacaagctgtctttcgaccaactcgaccaatcgtttacgttcctcttccccaagcgttccatattcactctgcccatccagcaatgatccttttaatctttctatcaaagctggatatttcggcgccgcgccgtagagaatcgggtttactgacacggcctgaacagcaggtaaaggccatgtggaatgagggtggggcgggaacgcctggtaaagaagaagatcgatctttgtctcaagttccgattcatttccacctcggagctcatctattttctcttttccaaggaaaaagacaaacgacggagtcgcacggatccctagttcgacagcaatctcacttccccgacccaatccgatatcaacggtggtgaacgcataagatttagccggaacacctttgtcgtgcatttcttgagatttcgattgagccagacgctcaaatacgggctctatgacacgacaaggagggcatgtacgtggtttggtgacaaacactacggtagctccatgggagttgaggatagagtggagagaagcagacgaagatgcaatctggagaggagaagttagcgtagatgaaccgtttgccgaggaagtcaattgaggtgcggagcccggggttgtagaggaagcttgagcagctacagaattcagaagagtcgaagcaagaccctgatactgggcgggtatgcctgacggtatgttcggccgagcctgagacgatagagggacagattgagttgggacgtttgatgaagatcttcgtgtgggattaaacatggcgtctatttgaggccttagggaggctccaaaaggagtcgagaggaagtccgagggaagatctgagttgaagatggcagaagacaatgataaactttgtacgcaaaacaaggaatggagatgttatacaagcaaaaggtctcgcaaacaaactcactagatatccaacttggtatggtacccccggttaagaagccaattgcatcggcagtaaatgagttgcactggatatgtacgcgcacgagacgatgggagttgaatggttagcgcggatttcaagatcaaacaacggacagcctggcatgcgtacattaaagtctagcaaatgatactacgagagggagtgttaggatacagcagcactcgttagcatgttgtatcgtaatggtatgatcacagtccttcaaaaacgctctcaccttttccgccgtccaatgatctttcaagccgtccaggtattcctcccaagtttcctcatctaaagcggtctcgcccatcgggatgatcttcaagggagctccgtgctgctccacccaatttgacaatgacacatgttagctttacgaagcgagcgcagatcaggaagatgtggatatatgagattttacatgagtggaagcaggctttgatttcagaatcccttgtccgtagtatacttcctggccgaatacaacgaccgaggtatctaatcaaacggtggacaagggtgaatacacacaatggtttgcataaggagacgattcgatgttttcaggctctcacactctacttctccacatgggatagccacttggaggagggagacttgtaaaactcacgccatattccatcgatctgtttgcctgttagtggaagagaaagcgacctggcgagaccattactgagatctgttccacaagcgcccggagcggcaaccaagacagcgatcagaccaaagtcaaaatcagttttcttcatagagatggttgggactatagtggaagagagcgaaccgtaaacgtataggtctactttggacgacatgtttgatgagcgacgaatagaatgaatgttgatggaagtagtagagagaggtcgggtgtatgcgcctcaacaacttcgtcttgacctccatcatcatcgtacatcatcatcgttctgcttctccttttattcggccgatcaccttctcgatgacattctctagtaaaaacctcaatcggttgctttttcaatccttatcgattgctcgtccaacaccttctctcgctctatactcaacaacctcacctatcaacccgtcgacaccttcaccctccgctcggaagagctcagtgaacccctcagaaattgctcatttctccaaactttcctctcaatggtgggatgagtccggagagctctcacttctccatcgaatgaacccccctcgacttgaatttcttcgcgagaagcttcaggagagtatgtggagggaggacgtacgggcaaaggagctcccaaaggcaacttggctcgaagggaagaaggtcctggatgtcggctgtgggggaggtctactttcagaggtttgtctcttacatctgttttgaatctgcccgagagatgatgatgctcactctttttctctctccctttggaactctttttttgttgaccctgacagtccttagctagactaggagcaaatacattaggcatcgacgccacgcctaccaacattcctctcgctcaatcccacgctgctctcgacccgatgttggatgcccggttagagtaccgacatcagacagctgagcagttgttggaagaacagaggggctcattcgacgtggtctgtgctctggaagtcttagaacatgtcgatgagcctcgagctttcttaaacgatctagccggtttggtcaaggtgcgtttgatctatacctatccttccgtttttctttcaatttccatcgatttatatctgacctacgactagtatatacgtatgtttctctctatcagccgggtggccatctcgttctatccactatctcccgaaccgcacttgcccatcttcttactatcaccctagccgaaactgtccttcgtcttgtatcccccggcactcacacatcctctaaattcgtaaaaccgacggagcttgacgaattctttgattcgttaggatggacaggtccagagagagagagtagaggtgtgatttacaatccgttgattgggaaatgggtgttggtcgcgaagaatacaggagagtttggcaaactggcgaactatctgtatttcgtgaggaaaccgttggatggataaaatttagctttccttctttgagaaaacgcagagcaagattgagttactatcatcgatgagcatatgtagatcatgacaatggagaagaagactatgagaggaagaatagaaaggtggacttagaggccaagcgaaatggtttacaagacaattagacacgatgcatatatgatttgtcaatggaaagggagagtcagtgcagaggtgaaacacgcggaaagagcatgcatatgcgcgcaagaagaggaagcaaattcaggtctctgaatgagagatgtctatgatcaaattatcagcagagccgaaggcagagagaagagcccaatgagcagcagagaacccagatcgatgataaaaattagaaaggttacaaaatgatagggagaaaaaacaaaaataaatcgaaaccgaaacgagatatgcacaagcacaagcaggacgatgggagtcaagccacgacgaattgcggaagtcaggaaggacagaaccgaaaacaaaagagataatggaggcagtaaagaaaaggtggggtatctagattataccggaaatgtagacaaaatacgaagacgacacttcataggggatacatgatcaagaatatctgggaatagaggaaggaaacatgaattaaagaacccaaggacaggaagcagttgatggagaaagcaaggaagttgatgtattttggaggaaatgtgagtggtcatatgtgatcttggaagtcactcgaggtctgttcgttcacttctcgtgagaaaaatgaagtgaaccaagaacagaacaaagacgacacttatgactaagtgattctctggcctgccccgccgccaccaccctgtacatttctgacgattgttccttccctcgccagctctcttctcaacacttcttctgctccacttcctcctagactttctacctgaaactcatcatccatcggtggagaatccctctctgaatctgagaagaatgtcggatgtgttaatgcctctctgtaggcgtttgagattgaattcgcgtcctctgttgaaaagggtgacgcgacgaccgatcgttgttgacccggtgaagtcacgagtggtcggaaaggtgtagttgtgattggggaagacaacggaagatgaccctctctgtccatcgattggtttgagtatgtgaacgtaggagacgtaggagcgagcattgagtcatcaccacgatttgagactgtagaaacagttccagcagctagggcacctgcctcggcactagccagttgaagtgatcccaagtcattggaccgagcatcttgttctcgcataatgggcgcgttcgaattcacagaggcccctccttttggcgattgtcttctgtgagtaaatccggccaacattggcgttcgagttcggagtcggcgaacaatcaagtaggctatgatgagagcggctatcaagaccaaggcactgaggacagaaacgaggacgatctggtttgaaacgacaataagaaggatctgcatcaaaaactcttccatcgaaatgtacagattcagtaaagatccactcaccgcccatttaggaatagctagaccactagagcttccttgtaggctccccccaagtccactgccggcaaggatacttgcgcttgagctggggtttgcttgagccaagctgagcaaactgctcacactgagtgttgatagactgcttacgcttgctcttgatacagaagacaacgttgttgatatggatgttgacgtgagtgtcgcaatagacgctacagagagagatgactgagaagcgatagaggcggtcgaggattgagacgccagagattgagaggctacggtgggtatggccgtttgacgtgcaatgaaagttgcctggtgcacctcggctccagtaagttgatctgaacgaatcaatgcacaatatcgccaagtattgagcacagaggataagcgaacagagcttgttgatcctgaagagaaaaggctgaagtgaagaagggagaagaaacctaccgccaccggggacaatcacaaaatatgcttgccaagaccgagtacccgtactgcttggcaggacgcttgcaccgtattgatcttcccaccaagcgtctgatggagaaaatgccagctggccttcctcatttgaaaggctggtccatgaacgaataagggtatccgatgaggcaagaaataaatatacatctactaggttggagcttgcgataaagagtggatagttaaaattccctgaagacatgcatacccgaacacactacgtcagcttcattccgcgaaaaagcagatctgacgaatggtcttgacatacatatcaacttggaccactcgttttgtattacgacagtggaatttgtagggaagcatgtcaactgatcgttccctacgtccgaacaatcaggatctgaggacaagagcaaacgaatatatagaatgagcgatgcgccaatttcaaggcgaaaaagaagcggaacgataaatacaaacatccagctgccacgggtccggtagatgttgctcttcctcctatttcatgctcgactgataaggcatgtacagatgagcgaccacgaaaaaaggtttcattcgatttgagttgtctgagcggtgggtcatgacgtctttgcttaagatcgaacggtagacttcttcctttttgatcggaagaggaagaagaagcggtcggatgccccctactggagagatgcatcggaaccgaggtagttgtcaagatgaacgaagaaacagcagaagtggcaggtgtagaaagaactgtctgatctcctgcagtctcaggctgaacagatattgaggtggatgatggaaaaccaacgacaacaggagctgctggtctgggtgacattcaggatgaggatgatgtaaaaacaagaagattttttgttttgttatttccacagtttgcacctctcatccactctcctttaccaccgtgttatctttgcttacgggctcattccttcgatcttccctaggtcatgtctctcaacaaactggtagagctactgatggtctcctcgatatctttggtccgagccctgccgtcagctcactactcagaaaacatgatggttccccgagcaacgtcggcctacgccgatgctgtctctggcggaggcagcatgcttaccgtgcgtctttccttctcattccctctagtagcgttatgttgcatgcatcgggttgtctagaatttttacctaatctgttgttgtgttgcaaacatcttgcccaatcagatcgttagtggaacgtatccggcggggttgggggaacctcttaatatcatcatttcgggtagttcagatacagacgttttagtagatgctctaacagacggtggctttcagaactacgctcagtttgtcgtctgtttcctctataatcgttctgttgggaaacacctgactaagatttggaatctgggtttctccttgctgtgtatacttacatcaggagcttgaatttcagcacgcaatgcctagacagctcgcttaccaactcgaccggccaacaggccaacctaggtgacggacagaacgtccgtacgtatcagttcttatttggtgtatgggcatcaaacacactatgggggtacaagaagatgactcatgatcttaacgccttgtttcccgccttgcagagactgagattgccacttttcgatataactatggggatacatttcttgggttagttcttatacttggtgtgcatcaaaactgtaatctttgctcatcagtctgtgcttttactctgtttatagagcatgcaaagaatctatcgtcggaggcaatcacttccgatactggaaacaagccaacacggacgcctactttcttgctgcctctgtagagatgaaccttacatgtaaggagacgactgcctccgctttctttgtgcgcatccgcgaagattgctttagaatgctaattatgtttgtttgtttcttctgataacatcgtttgtggaacagtgagacacgatattcagccaaatggttataaccttggccgagattggtttgttggtaatgcgtcgtcacacactgtggtggacacacactctctgaccaatgggtcatatttcgagggaacgagctcctcggatgggtgagtttattcagcactgtgaacaagaatcatctcctctcatccagttatcttggctggggtctgtcacaatcagatacacctatcgaacgaaggttaactacgtgtctggacttcttgcaaactcatctggtaagcaagaattacgtgagctttctcaagtctagtttttttcccacacatgaattcatgtgtacaccttgctgtgaatttggaaagactctataaaccatgccgataccgtttcggtcaatggtttacccgcaatcgacggcctcgtcgccgtcctgaccgtaacgattgatactcggccttctgggtccgatgcgaggtgtgtcccaggaatacattactctatcgtttttctttgtcgaatttttttttcagtacgcgcttaaagaaactgatgttatgtgagggtttattcgatgtttcattggggaatatctagtccgtcaagttcttcgactcagagcggcagcctccgtatgacgtctgtaccaaagatgctcggtacgctgaatggtctgactgctgggttgattgttggaatctactttgggttcacattctcctcttgatagaggaatagatcgccatctttgtcgatgtgctgattagatcatccggtcggatccgttcgaccatttttccattctttatcttctctccttctctccttctctctccgtacttgctgttgttggacaatatgttatctttctatccttaccttatgtcgctgtttatcgctgtatgtcttcctccgctcgttgtaatttctgtacgctcttttcacctgctgatttgatgtcttgtccaatgaatcgattgaattcaagaaatgacgacgatttctggatgatcgagtttctgatcgatcgaagaaattctaattttttcttctcttttattcagctcgagttgtttcagtccagtttcttcctcatcaacaacatccatattcgcacttgcactcacagacctgtaaatcgctactcgcaatatgaccgctcatgatatctcccagaatgatccagagcttttagcgatcgatgttaccaacatgaactttgcgtataaggaagagcaggtcttgaatgatatcacgatggagattcctcagggagaaaggtatgtcctccgagtttacgtttcatatcagtatgatagaatggctcattaaatgtctttgtggtttcatatgttccagagttcttgtcattggagccaacggaggtacgacgttaacttacaagcgtcattctatgccgaggctgatctctatccacttcatctctttcttccattgaatcagccggcaaatccactcttctcaagatccttgctggtaagagactaacccccggaacaaacgcccggatgctgggaaaagacgtctttagagcacctcccaagggaatcacatatctcggcacagaatgggcgctcaaccctgtcgtccgtggaggtatgtgccatctctcattcttacgcatagcgtcttgatttgagacgaaacactacaacatagagttttttttggtcgaactagatattgtggtggagaggttcttggattcagttggtgggtataggcacaaagagcggagagacaggttgctcaacatcttggatgtcgacctcgactggtccgtttcactttgtttatgtttcagggacattcattcacttgaataagagaggcggaaggattagacagtaagcttatcattacattctgttacataggcacatgcatcagatctcggatggagagcgaagacgagttcagcttgtgatgggtctcatggtttggcttcttatttcctactgccttccaccttctttgcattcataaaattccttaccgttatttctgtttttatttatttaaaaatacaggaaccctgggatatccttcttttggatgaggtacacgttcagcagtagtctaagttctggcgttttgtactaattcttttcctctatgatcaggtgactgttgatctggacgttcttgtcagaggagatcttatggatttcttgattcaagagagtaaagagcgcaaggctaccatcgtttgtgcgtctcttcgcctcttctcactcatccgtctcttgcgcttagaattgaaccgactccctgacttctgcaaaaattgctatcataccagactgcactcacatctttgatgggctagacattttccctactcaagtgattcatatgcaactcggttccatccctcaacagcctgtcgcttggcctcctgccagagacgattcttccatcgcgggtcaagacaagagagggtcggatctgttaagcgtcgctttgggttggttaaaagacgacagagcgctcaggagaaggttggaggtggaagctggaggtcccaaacgaggagccaggggcacaaccgatgtgggtctttcaatttttattccttgagccagtgcgcgttcatctgtcctcacaaagttattccttatattacagacaaaggatgccaagacgttctacgaacgatacgagtacaacgcccctgaagttcgatagaaaccctttagacttctggacggtgtctgaccttttctttccatccacatcgctctgatattacctttgattgtaccacttgactctttgcaagacgttcaacacgcatctgtacactttttctttcacattaccgcatcacaaccaacctgtttcgttctaggaatctatcatttttgctcactagacttccctcttagatcatcgcaagaatctttatatcgattatagctctttagatcaatggattttttcaacattttttgtcgatgggcacttgctttgaacagcatagaaaatcgatgtaagagacatttatatggtaacgattggaaacgacagcactagacagaagaaccagaagagaagcctcaagaatacaggtctaagagagaagtgaagggagcaaacaagcaagaaatcctttttgaagaatttttgatgaaagaaagaaaagacaagagaccattcatctaccttttctcctcctctttcttctcatcttcagctccagcccccgcttcaacagcaggtgccttctcatctacatcttcacgtaaatttgatgtttctacaggcagctgttctgggacgaacaacccatcgataaacgtgggcaagaacctctctgtcctttcgactgttgttgcccagaaatctttctggactgccgttctagtatcaggataagtcggttgaagcaatcgattcgaagagtggaggacaaggagcaggtttttgaaagattctggcacggcttcgtactacagaaaggaaagagtatatagatctgcatcagtagtgctaatcttcgacatatgatgtccatgagagtcgagatacgtacaacctgatctggtttttcggagttcataagtctatccaagcattccaggacctctaaccaaagttctttcaaggacttatctctaccctctgctccctccaactccttaaccttatcagcgtcatcgacctcactcaagaatactaagaacactctgcagattaaccccatcagcttcagcctactctcttccattccttgaggatcctgtaagaagacttgaggtttcaaaagctcgtcaagagtagggaacaagatggattggaaagcgagatgaatcgagggaaggtcgtggggtacagcaggggagccgggtagggcccgctggagatacgtgagggcacgcgttcgtagcggtcgagacgggtgagggacaaggtgggaaagagctttcagcggaggaagatagaattgtgtaacagctgatagttttgagaaaaaccacaaatgagtacaatttagcttaattttgtatatgcagaaagagagcaaaattacaacagaccttcttcgaaagaagacttagagttttcaattaagttcatgattggcttcttgagctcgaacagcgtgtccacagcgtgtaaagctcgttcgatagctggttcacttttttccgcgaaaagtgatacccgaacgtgtacaaagggtgagtgatttgcatactcagcatccaaaggaaaagtcaaggtcaacagagcaatatcacatactgaacgtcattttgaaggccccttcgtcctctttgagacttgatgcttactacacccgagtaatttgcgaactcgctcaggattccgacgatgcccgcaaagttatcagacgtcaatccaggtcctaactcgccagcaatgatcttatcgatcagtcctatagatgttttggaagcctcaggatgagagattgaacctctaactaaagcgagaattaatccccattcggtttgagaccttgacaaagctgtgtgtttaacatgtgatgtacctattattcttattgaatgtgcagttatcagacttacttgattaaactagcatcttgctccaaaatcttggcgacgccggccatcagttgctccgagacggagttaagaattggtcccgggagactacgcagcaagtcaagagagacataaagctgatcccgaagtgagggctagagatatatgatgaatcaggagtttagcccttagttatcagttgagtgaaaaggaagaattatgatatcacctcgatagagatcacgacgcataatcgaagcaatccaacaacggctcgttcaatcaacaatatactatattggctagcagaactcaaaagaacagaaatgtgctcgaatgcaatcggcctgcaaaaggaaaagatcgtcacccgaatttgtatcagtttattataacaacctttgtatatgatgtgcagaatggaatgaaaagacacaccaaacctcggccacatgagctcttgcctgacttgtcagactgacaagcatctccaacaaaaacaccgatgcaggatcgtatggcaaaggtacttctttctgggtttgagcaggggagtttcttcctgaggtacttccgtcccgggttgaattcattcgtgcgtgagacgacgcacgaagatgatagactcgaggagtcagccgtcgatcagctagatctttaatagctcgaagagcacaaagaagagactccacttcaagatgtcttttgcggaagagtagaaattcccaattcagtgctttttatcagcttataattcacacgggcacagctgaagtgcaatctaacgggtacgtacgtcagttggctgtacaattcctcaaatcgacatgatcctaaacagtcgattgttgataaggtggcctcaatctcgtcctctgtacaggttggtacgcccaggttgtcattactggatccatacgggcttagtaggtatgaagacagagtggataacaatccaacatccgaccgtcgttctcgagcttcgacaggaggagatacttgaagagggatcattgattgacctcctaggaaatcttccataagaagcatgggtgcaggcaagagagagtgaagaaatagcgtttggtacatctcgaagatctatgttaagttcacgaccgatgaatcaatatcaacaatacatttgaagttgattaaaagcaaagcaaaacaaaaatcagaatgcatcgagctcacctgagaccaaccctcacggatggaatctccatttccatttgcaattgtgaacaaaacaacagcggccaattgggctttaaagtttgtaccgaatcggacagaaagcgctgagacagtcagcgattggccttctacatcgatgaccgggttgttgatggacgattgagagagctctcgttcatccaacagtccagtagctgagaaaggttgaatcgcaaagctccatcagtgtgtatttgacattgtatttcttttcagagaaagaaggttgaacaggtgcctactctgagaaagagccatgacaacatgatcgaacatgtcgggcagatggaacgctccagcgatagttgcgcactcgcggaatccagtgatagccttttgaatgatataatcatcattgaacgtggtaaaccttgagcgaaaagaaacagaagggtgaagagcgcgtgagactcggcaacatttgtttcatggtacaaaaatggttgtcagatgatacttacgcataggcgatagcagaaactatctgcttggagaccagctggaacatggttcgatcaaaccgagcggtattgcaagacaggaggggacctgtagaaggagaagatcagtggatgagacctcaacaaagaagtacactctcgtcggtatgatcaaaaaaaatgaaagaacaaaccagctttgggggctcgagacaaaagttctttccatgcataatcgaatccaagctgccctgtgtgttcttctggcatgacaatctctcgcttcttgatcgaatcataaacctcgctctatcgtcatccacagaagggtgaggtgaagatacaacaagtagttcagaggggtttatccatcaaccacaaacaacatcaatgaagagagacacttactaggaacgagtcggagaaatcgaccccgtcgttaacacctctcaaatttcgcttatagtcatcaaacgccatccgttttcggacctgaggtgagaagagatcggtattcagcataatgatggagtaagcgagtacatagactgcatcttgcgacttgatctcagctgttttgaataattcatcacggacgaacagacagaccacacatagtcagatgtcaatgattaatgaattcaccctcgaacgatagaatatacagtcaacatcaacataccgggaccagaggcgaaatatatctcggcgaatgtttctgtgatccgattgatctgttgagactctcccggtaacctgaaagcttcgagcagatctcgcatagcctctgccacgagtttctataggttacataagagacacaaaaaagatagaatcataccagaagattagccgagagtgaattagctgatagtgtaacgatgacgacactttctcgatgtctcctatgagaactagaagaacgtatttgacgtacacctttaaagtcgaacatttctatgaacgccttcagtacctcgatgttctccggccgactgatatattctcccagaaccttcttatctaacctcggactactcttcaacaagctagcaattgcctggtttctcgaaagaccaggctcggtgattaacagaccgtgttcctctaaatatgtcaagccggtcttgggtttggtgttgaatcgagaggcaccgacgagaagaattcgtttgcgctccttcgtctctgccaggaattcaaaggaagggaaagtctgatctcgaggggttatgaaattaattcgcgtggtatcgatgataataaggcgttagaccagaacagagaggaaaagccacagaagaagatgggattgtcacactcacagccggccaagtctccccttgggattcgattctagcagccatactttgtactgccgaaagaagaatttgaagacagattgtttgggagtctgtctgagtatcgggtcctagacctggtgttgtggggtatactccctgtgtttggttgaataccaacaagaagattgtgaggaagaggatggaaattcaacaatcgacacaagaatatcatgagggaaagaactcactctagtcaagaatgcaacagttctttcaaataggtcctctctgtccatatcacaatcataatttatccaaaggtcgactaagaagctttctccttgtctgctcaattgagcgagcgcttccaacaggagtcccctcgtctcctcactaacggtcatgccaaagccagtacctgagggtttagaccccgtagatggtacatcccctgcgaccgatgatgccgatgatccaccggccgctcctggttgagatgatcccgtcaactgtgacggatggagagctgatggaggaggggctagtctatcgatcaagtagctgacgaatagttccaactgaggctttaaatgaacacgcatcgttccaaatagaatgccggtgacgcgcaaactgctagcgaaaagattggacgagtcgcccctggtcaattggaacagatacttgcatccttcgtccgagagcatcgatctcatctctggccaagaaccgacagttgaaccggcggtctcgagtgctgcaccaagaatagaaagtgcagcgagtcgcatcgaatcagtgtgttgtatgtcagccggatttaagagggtgatgagaacacgaatgagttctgtcggcgtggcagagccgtagggaacaaacgggccggttgaagcgggctcgatgggaagtggttcagctgctacctcctgagttgtcaactgatcgactggagtcaacccaacagggtcaatgattggtggtccgtcagtcactggagcgtctgaagacccgttctcctggactgctgccgcttgcggtctctttatcgattcagaaagagaggcgggtccggccgctgaaacagggatcgtcttcaagtaggtaaagacggtttttaccatcgactggacggtcgcttctgctgtgcgccgtagaagttctgtcaacgagaagcaatcgtaacgacaatggttccgcaaatgatatcagatttagtttatcaattccacgcgagctcaatacttagaccgattggtgaaatcgttggaaagaaaggagaccacactcaccagaaagtctcatttgacaacataagcctagtccggtttcgagcatttcacagacctctttgtctcctaaagcgataaagtctcgagatcctccccatttatcgactagcaggccgataacactaagaattttaagcatgacaacctcgtccccctgagaatcggaagcctcaaacttgcagtgagtcacggcatgggagacgtcagagagcgcaaatggaaggtcgtcaggtagagagggtccagaggtagggaacagcgagaggatggatagcagagaggtcagggcatgggaagttattggtcctgtcgtcaatggtgatcggataagagccaagaaaggtgcgaccaaggcgggaagcggagggagatctgtcgaaaccggcaacgaaagaaacggtcgattagctatgtttccgagttcagtacataaatgctaagatagttctcctcggtgtcatgtacgtctatctgtataagggaacagaatgtcgttgtgaagaatattgatataggaagctcggaacaaataacaaacctttcgggttctccaacactgtccttctcagttcgacaaagccagccatgagttcttcttccccttcaaatcctgtctcacccctgtcttctccgataacaggtcgttttgtcctaagatcgcttcgtccgaatgatcggccggagcccgagtaggacgaggcacgggcccaccttgagttctttctcatagctagtttgttgagtcataccgttgtccaacaagagaacatagcagggaaacaaacgattcaacattagttctaaatctttgatattatgagaggtatctgctattagaaagaacaatcgaacccgaggtgacattggtgatgttcgatatgacgagatgggtcggagagagatccatcttgcgaataagtataaaacctcctactgggctgtgacgaggatgagtgaaactttatgactatatagggtctgtataaagagacccaaggagtgaggaggagagatagaaaggaaagaaggtgaggagagaccgagaggaagatggaaacgagagggaattgacgatggaaagtgaaacgctgtaagatgttgaaccagcgggaggacgtccgttgatgtgtttgaagtcagttttcgaatagagcgactacaaactcatgtactccatgtttttggtgggtattttactgacacaatctttacatggtgcatatttttctcaatacttgatcaacacacatgaaactcaaatacagatgaccgttcagtcacagtcgaggtgactacatattgaccattgtctgaacaagccttggtgataggtaagactatgaaggacaacatggtcgtttcgtctaataggaaaagggtgaaagcctgatatagagaacaagagaaacaaacatttgtctcgtcaaggaacgaggtattgcttgcttcatgtagcatgggtcgacttctcctctcttcctgatgattgaagtatagctaggaagaagaaagattaggtaacctaagaacgaagtaaaagatgagactagaatggctatagaggaagactgaacagactacgaaatcaggttacatcatcaaacctctcccgcgaggaaagaagaacaggaaacacttaagaatgtttgtccaacttgccagctcatccggatccatcatcgctcctctttgtttgagctcatctattttctcctttttctctcgacctcacctctccgttctctcttttctcactctgtttttgtattgacccattttaatcagaaaagagccatgctcatatcaccaacatatctcattctcaatctatccttaaccgctctcgcttcggcttcatccttctctaccgcctctaccccttattcgaacccactcgcaggagtggattccaaaccacgatcaggcgtagtcaagaacgtcctagagactaagccagatgtcaaagggtactgcagtgtgagtttgcaaattaggttgatctcaccgctctccaggttcattctctatagaccatcgaagctgacgaagcacatgttcatgcagccatcgggtcgaatagaaaataccttgtgcgagtacgagacgctcgaagcggttaactcggaactctatccatggctgcatcgtttggtccagacccctttcttcaaatactacaaggtacgcctcggacctgtatagattgctttagtgttgcgtacacaccattgactgacgagttggcccccctttttgaaaatcatatttatggtctcgatcatagatcgacttatacaaggagtgcccattctggtacgagaacgttttctgcatgaacagagactgcagtgtagagactgctaacgaagtgagtcataaaggaggctatgtcgttcttcttgattgcatgcacatcagcgctcatctccattacttttatgaatttttccgctatcttagtcagacattccagagaaatggagggtagcagcattgagctctatcactcattccagtgaatctgcctctcacgttagtccgatcatgttcttttgctctatcaaacatctcgaggatgaacccacaaccaacattccaaggctttcttctgaatcggctcaatcagagaggagaggaaccaggatcttgtcattaccgagaccaggatttctgccagatagacgacgaatctcaaaacggtgaataaagaagccttctgttatcatccttgatgcttttcactgtacgcgcgcacgccctgacttgatcttgcttaatatacttctggtttctctatactagagggccagtttgttgacctgacactcaaccctgagcggtttactggatacgctggtctctcagctgctaaagtttggacagcaatctaccaagagaactgtttcggtctctctgagctctctagcacattactatcgcaaagctccactagcggcactctgtcttcaaagccaagtctcggattgggtggcctgagtgaaggtgttggaacggagatgagatctggtacggggtcggaggaagaggaatgcatagagaagagagtatactatcggattatttctggtgagttttcttacactgtcaaaaagccctctctgtctatcttgagcacacaggtagcttaattgaatgagagccggctcctgaatacaaacaaacctaggtcttcatgcttcgatttccacccatatctgtcacgaattccttgatcaagaaactggtctctggcatccaaacctctcgtgtttcatcaatcgaattgcctctcacccagaacgtcttcaaaacatgtacttcaacatgatcctcattcttcgagctgtttctcgagcgggaaagtatctcgaggcttacgatgtatgcactgggatctcttttcccgagggactcgtgccgttggaaggtgcggccaagtgtcggccggaagagactgtacaagaggagaaatatggagatgcctggacaaagattggcttgagcaaggtcgtcgagctcagtagaggtggtggaaatggagaaggtagacaagaggtatttgatgaaggcgagcttttccagggaggagatgccagagtccgttttttctcttccttgaaagtctgaggaacatcctgcgctaactacttgcgcatgtttatggacaagtgtagattctgaaggaagaattcaaagagcgtttccgaaacgtttcgagaatcatggattgcgttggatgtgataaatgtagactatggggtaaacttcaagtcgccggtgtaggaacggctttgaagatccttttcgagttggacgaatcttcattagagcaagtcttccagtactgaacctcgctttcaagtttctctctctgttctgctgacctcgaatcctactttttctttactttgtttcgaaataacagtccggctgtcaatccgaacttgctatctaggtcagagatcgtagcgttgatgaatacgttacatcgatttagcgagtcccttcaagcggtggagacattccgtcagatgtatgcaaaggaaaaggaaactgctgtcgagaagagttcaaaattcaaagaagagagcagtaattcggtgcgtcgttttctgatttttgtctggccttcacaggattgatatcaacttcaattgcccaaatccttttcgcgattcagttgacaaatcaatcgaatttaccccgctacccaatccccacatcatctttctcaacactattggccactcttcgccaacgcatctttgcgggtatcgaggtgatctctcgacatcttcaatcatggctagagttgttgagaaggacgagcgtgggaagactgggcagattgacggcattctgggaaaaacttagaggggagctctgaaccaacttattttcaatatagattgatgaatattcttcctttcgtatgattcgcatgcatttagtgatgccttgataaaaaattgttctcagacgggttgttaagttgccttttgaagataaattttatgtttttttttttttggctatctctcgaaatctctcctattggcatattctctagcaaagatgggagcagaaaatcacgccggctttgaccgtcagaaattcgatttttgattgtgacccatcaacaacaccatcacagttgtgattgcaagtcataaccgacagatgccccctacctctcccatcccactgttcatcaatcgaacccactcttcacagataaacgctctctctttttctcctagatataaccgatttctgtattccggcgacgcagatggctgggttacaatcatggacaccaggtctagacggacgatcgtcagttggaaagctcatgaggatggtatccttggactagaagaatgggttgaagcgagttgtctactgacgtttgttccgcttcctgatctacttcttcggcctctacttgatccttcagaagaaagacaagccagtgctgaacttggttctttccgatatcttgtctccaggtcaggaagggacaataaattgaacctgtttgagcttccggaaacgcttcctattctcgggaatgcctcgtcaacctcatccttaccatctaagagctctccacctaagttattgtacactatggatatcaacgccttaaactactgccggttttcattactggatattgaagcggaagatgagagtatgaaagggaaagcaagggagaagagagaagcttgggttgcggtgcctaatttgactaattcagaaacggttcgtcttttttcgttttgagtccttcttcttatctcattctgagaggatccttctttgcgagctctttcatgttgctttgttttgggttggtcaactttcagatagatattttccatttaccatctcaaacaagaccacatgctgctataggcttcgtttcgtctgatcctgatacgtctctgggtcgaggagcgcttgatcctgacaaaacaggtgttgttttacttcttgtctcgctttacataaactaatttagatcaacggattctcacagtttgttcttctttatgttgatctttttgcaaatcaccacaggactcgttatgttcgttcatttgttaacacctacaactatactggtcggtacagaatcaggccacgtcttatttttcgagtatgaaggtagggctggagatgtaacggatgccagacttgatgcgcatgccgtcaaatcaagttctttgggaagaaaggaaaagagcagatgggtgcgtaggtggaaggagaaaatacacagagaggccggtcagtggcatctcgtcagcttgagattctctatcgtctgagctgacatcaggttaggaacatgacagtgatgggtttggcagtgtctccttcaaaagacttcgcgttgtccgtatccgcagatcatcaggtcgttaagtattacctagacgttcgtattcatatttcatcccttcctgtaagaacgacatatgttgctattaaggattggacatctcaaatctgtgtatgtatctactcacgatagccctactgcccagagggttcatcgaggttcgagattttcaagattaatcagctcggaaattcctcaattcatatcaacggtacaggcagggtatgcgctgttgctggctgggacggaaagtaagttctcgccctcctctgttctcagaacatcataacgattgcttcaaacgacagcttgtagtccattgttgttcatttttttcttgttctttttttcttgcgtacatagcgtccgactgttttccacgaagtcattcaaatcgctaggcacgctatcatatcacagagacacttgccatatcctctctttcgcccataggtcgtcaattcctacgaatttcaacgcaactggagtacatgcgaatcttgagatagattcaggaactgaaaatggttcctcggacgaagaggaggacactgatgagtccaatgaagggggaatgagaaaaatgaacaggcaggctcttagtagagaccactggttagccaccggtggtgtcgacaaaagggtggctgtttgggagctcatggactttgagaagcgttctgtcaacaagaaatccacgagatagatgaatcttaaaggcattatgatggaaaaaggttagcgcaggagatgcatcagaaggtgccggttggttgattacagaacggaataaaagatgcttgtagtctgagatttgcacagccttgcttctgacgagatgcttaaatggcttgtggcgtctggcggctccccactcttctgggtgtctcttgctttgttactttccatcatctcccaccatcaacagttgactatatttgacgaggatccccctttcttgaaagagatgataggcttatctgtctacgagatcgttctcgccttttgtatgtatcaatctgttctgcctgatgttgctatgttagcctcgtttattcaaggcaaagacgaacttattttgatatgaatgatacctacgtaacgtaacccaatatccctcagggcgattcgttgttgacctcttctttagagagatcaagcctcgaggagcttacaacatccctcgagaagggccagtcttgttcgttgttgcgcctcacaataaccaggtgagctcttccaggtgataataaactcaatgtgaaggattttggcttatggtgtttccggtctatgtttttttgtcgatgtaatgcttctcagtttttggatcccattttagtcttctcggaaatttatagagagacaaggcggaaagtcggtactttgatcgctgccaaggtttgttccggttctcataagacagtctttaaattatatagtccaaatatgacgggttgagtgatggaaggcgtgaggtcgattatatgtccaatacttacctctttgcttgcttcctttggcgtgggtttatgcgatgggaacatagagtttagatagagccatcatcggtcaagctgcacgagcaatggatagtagttcgttcttacctctataatttttctccttactttgtatcgatcactaagcttcttttcaacttcacgcgcctctatacaattccagtccctgttgctcgagcgtccgattatgcttatgctggttcaggaaagatcagcctttcatctaccgaccctctcctcatccttggcgaaggtactaaattcatcaccgacatcaaaccgaaatcgactcttgccctaagcaaatccctcggaagtgcatctgccgagattgaggaagtcatctctgataccgaagtcaggctcaagcgagagttttctattcctgcaaaggagggtggcgctggcttgagggccacagaaagagttaggaaagaaggagagaacggtccactgagttacaaggtattgcctcatgtggaccaacatggcatgtacggagcggtctataaacggctgaaggagggaaaggcgatctgtatcttcccagaaggtgtgtgttgggtcttaacaacctaaatgaggaggtatgcgcatgttttcgagtactaaaacacatttctctttccttcctgaatcggatcataccaggtggttctcacgatcgaacagatctcttacctttgaaggctggtgtgacattgatgactcttggcgcgatggccgctgatcctactgtcaaagtcaagatcgttccagttgggttgtcttattttcatgcgcacaagttccgatctcgtgcagtcatcgagtttggtactccaatggatgtcccgcctgaacttgttttggagtttggaaaaggaggaaaggaaaagagagaagcgtgcggcaagctattagaaatgatttatgatggattaaagacagtgacgctccgagcacctgattgggaaactctcatggttcgtgttcttcctccctcttaaactcctgacactgtcgttttccttataccgatgtcgacgttgatctgtatacaatacacctctaggtcatccaagccgcccgacgactctacaaaacgcctggtcaaaacctgaccttgggtcgtattgtcgagcttaataaacgttttgttgaaggctatatgcattatgaacacgagccccgtgttcaggcgctccgaacacatattatccagtacaaccgacttcttcgagatttagggcttagagatcatcaagtcgagagagcgacgagagctggtttgagatctttggggctgttggcttatcgggtggggctattgggagcgtggagtgttttggcgctgccgggagtgatcctccatgcgcccatcttcttaacagcgaagtacatcagtcaccaaaaggcaaaaggtaactttgaaacccctccgattcgagctctagaaaatcatagtaattgactcttgcttaaccttctaccaaaaacgatgaactacgttctattagtggctctggctgaatcgaccgtcaaattagcgggccgagacgtcctcgctacgtggaaagtaattgtttcactcgtcctgactcctatcacttacgctttctgggccgctctagcgacgtatttggcttataggcgggatgcaccatcgcgatgggtttggtggatgcctgtttgggtcgtgcttggtctcccctttactggaatgagttcgttgaagttcggagaggccgccatggacgtcatgaagtcagtctgaatttgactttcctttgaatgttctttactgcgtgactgcaattaaccttcagaggatcaggactaatgtgaactgactcgctgtctcttttcctgatgttggaatggattaggtctctgcgtccactggtgatcaatttgattccaggaaacgatgttgtcatcagaaaaactcgagatatgagggttgctcttactgaagagcttactgaggttatcaacgtacgattttctcttacattcgtcaaagaccacaaatcagtgaatgtatgttaaccaaggtaaagactgcatttctcataaaatagcactttggtcctttaatgtacgaagacttcgatgaaggtcgaattcaacctgcagcgaccgttcagcccgtttcggctgatcgaagtcgatcaagtactgcgcaaaacatcttctctcacgtatgtatgtttgtctcatctagtcatcgtagagtggatctgaaagtgggctctatatcctctatattctcgaatcactacagcccatgagttggatcgacgagaaactttttggttggtctgccgcttcttccgctgaagaccgagctgcccgtcaacgaagacgatcgaagagtcaaggaagctcccgagcggaaagtagagtcgaaagtacgcaaggaagtgatgtggagaaagagactgtcgagcaagacgatggtgatgctgattacgaccaggtgagtagaccttactatcatcactttttgtggttcgtttatctctgataccttttccttacaaatctcaacgattttggaacacaattatgaacgagaaggtgattggaattctccatcatcatgcctcgtccttcaacaatactgccgcgccaaggtcttcatttaatgctgggctcgaatcatctgatcaacctagtcagatccgagctaggcgaaacggacagacttacgccgaattacaaagtgcaaagaaggcagctgcagctgctgttgctgctagcggcgtggaaacgaagtcgaaacaagaattgaaggaggatgcatagagagtgaaaatgaagggtaccagatgataatgctggggaagtgggagtaagacggtgtacatatctttccctggtctttgattggtgcttcttctctctctctcctttgaactccgcatctggtcgtctaaatcttaaatatctaatgtttattgttttaaaatgtgcgtttttttcatataatcaacctggtttggtagaaagaacgatcagataatcgaagccgcaaaaacaaactctcaaagctaggagaaagaatgaggaccattggttcacacaagagaggatcagtccttctcctcttcttcctcgccatcatcctcagctccacctctacgattccttcgtttccgagcttcacgatgccttctcttgtactctctcgtcagttcgagatgctcggtctcccatctttgttgggcttgctctctgaattgatgatggacgaacagccaaatcaacgtggatcaataaaccggctgcaatcaaaagtgtcaaatgaacaaaagaaagaaaagatagcagtgaaagaacgaactcggtatccaccctccagaacccgggaacaggtcttggtttcccactctctacttccaagacgctctttgcctgaacttttggtccttttgctctttctgtctgttcgagatgaaggaacgggaaaaagtaggggacctcggtgtctggtctaaaagacgcggttgaaggtgcatggcttgaggtttgattgttgacaaaagtcgccaatcgatgatggctagtggacaaggaaggggcaagaggagcgggtgttggtaatgaagcggtcagagtgggatcctcagcttccgcatcaatgtcaagatccaaacctagagagaaagatgtagctgtagaaagcaaaaaaaaaacaaaaaaaaacaaagagtatcagtcaatcgcaaaactcttatctagctgcctttctaagagtcttgaaatgaagaacaagagatatgatgaaaggaggagggacttactctcctcagcagaaggagcaaacaagcccttcaactgattcaccttgactttgacttttctctcttcttcatcttccatatcaacatcatcacctgctcctccccgcagtctcatcacaccttcgccttgtaccacttgttctcctggttcttctaaatcatcccagcctctgagctctctcatggccaactcaattgggtccaactcctcctcctccccctcttcttcttcctcctctctaatgtcatcctcagatgacgaagatccgacaaaagagacattcttctcgatcttgtcactttcttttcctctaggtaatgtaggaagtgggatcgtgtcctggttagagaccggattggcattatgtttgaactgtttgttaaccggaggaacaataatattgctttgctcctcttcagtatcgtcctcatcatcatcgtcatcatcccaaggaaggatgaccttcttcggcactaaaccggtatcttcctcaccatccgactcaaaggacagtgttcctcctccactcgtactctcttgacccttctgcttgatatctatgtcttcgtcttcgtcgttgaacgaaaacccgagagaggaaagaacgttgagtccttgtttcttctcctgagcgatctggtggtatagaggatctgccttgtcgatcatgagtggaagtccaacaggctgcttggggttggatccggaattagtatcaggagtagatttggaagccggcgcagaagtaggaggggaaaccacaacaggtttggaagtcgagatggttggatgagtaaggttggatggttttccatcggcatcgtcgacgatgtcctcatcgtcagatggttgactattgtcagacatcaaagattccatagtaggttcgggcgaaaacgaatctcgaaggagagatcccttctgttcgtgtatatccgcatcttctcctagtgggatccaatcatcttcttcttcgtcttcgtcatcatctccgccctgtccttcaccgttggaaagatcttcatagacttgagcgggtttgatagactgagacggtgtgatagaatcccacctagaaggctctcttccatccggtcctgattcatccaagatcatactcaacaccaacctcaaccgctcctgtctgcccactaccaccttctcctcgtgatcttgattctgatcatggcctatgttgatccacctgacaacaccgtcctcgccttcgatctcctcacatacccactgggaacgtttgtcgaaacattcatctagctcgggatcgcctagcatatgttcacctaagtgggttctattgtatcgtctaggatcaatgactacggttcgcgcgcgtttcggaggatcagctgactttctgccagaactcgattttcgtttgagcggcgtcgtgcttgacgtagggagttgatcagatggaaggtcggatgaaggtcgaggtagagtaggtcgagggatgggatgggatggtttaagaacgacaggatgaatcaagtgtccgaggggagtgatatgccaatgctgttttttaatcccgttttttatgcaatcacatcagctactctttctgccctacaatcaagagaatcaaggaaagaacaggcaagaaacgctgaaagaaagcgaaaaagatgatgattagagacgaactttcttaatctttgctttttcaacatcaaccacttccatatccttcctttctatcccctgaacgcctctcgatagttttattggcacaatccctcctttttcctttctcgcctttctccttttcctttccttctccttctttttctctctctctttatctgtcagtccatcggtcaagccttggatgacagcacgctcggtattcattctagagacatatgactgcttggcttcttgaattcgaagaaccatccccttccaggtcgagccggtgagaatggaagtaactctttgtagttgaccggatgttatacttaagttcatatagacgaaagatcgtggaaatcctgtatttccgtccgttcgttcgttcgttcgttgatgtattcagttttaaatgtattttttctggtgagcaagttgaatattaataaaaacaaccccctaatgaaagcatacgaaccattcccatcggtcccaacaccttccaacccatgtacgacaccaaatgaagagaatctattggtaagatcctgatgggtcaatgaggggtttgtcaggcctgcgatatgaagtctcctgacactcggtgtttccttctctgttgatgacatccttttctgcgttctgctcttttgctttctatctcgattttcttgctcctgaatcgttcagaaacggtgtgcgtcgtgtagttgcaagaaagaaggaagaggtagagcggaagggtggatgagagaaagagtaagggttgaaaggaatcgaaatttgaggtaactctcttaacacgtgaaacgcggccaaatttcttttctgcattacatggctagactattctcaaagattttcaggcaaatctgtttttttcctttgcattctttatgattcagatttacaaccacatcgtcatatgttgtttcatgcgaagcgtgtcccaagaggaaaagaaacggtgtgatgagtgagggtgggaacgatagatgtgaggagttcatcaaagagaaagagaaagcgtgacataagagcaaaaaagaacagtcgatcatagggggagtgtttttgtgaaaagaaaaccttctcaggaaaaaaaagacaacaaagagaccgagaaggaaagaataagggacagtgcttctaacgtaaacgagaggctttttacaaatggatctaaactaaggacaaagaaaaaagaaaaagacgagcagagaaggtcaaagtgtactccctcggagtttacttctcctgatcaggtcggagctgtcggacggtctttccggcgatccagatctcctggttgttgatgacgtcgagctccttctggagatcctctcggtaagtctttcggccgttgaactcgagcgatcgtcgggtctccgatccgtccttaacggcggcgtagaggtccttgaacacgggcttgttagcctcgtagaacttgggggcccagtcgagagctcctcgtcgggcggtggtggagcaggcctgagagaagcgtaggcagatgagatgagtctattgaagaggaagagaaggatgaaaactaaagacgctagagaaaagatagctcacgttgtacatgtagtccataccgtacttgccgatcaacgggaacaaggactgggtagcctcctcgacggtctcgttgaaagcctcagagggggtgtgtccgttctctcggaggacctcgtactgggcaaggaacattccctggatacctcccataaggacacctcgctctccgtaaagatcagagatgacctctcgctcgaaggtggtctcgtaaaggtaaccagatccgacggcaataccgatggcgacggccttctccttggccttaccggtgacgtctgtggattagagaatgaaacaagggcagcatagtcaggtcattgaaagcttaatagaaagagagggaggcacacgtaccctggaagacggcaacggaggagttgattcctcgaccctccttgaaaagggttcggacggttcggccagatcccttaggggcaacaaggatgacatcgacgtcggtggggggaacaacgtgggtctaaaggtgaaaggaagaaattagctgctattccgaaagatcatagattgagagctggagtacgcaaagagactcacatcatccttgtagacgacggagaaaccgtgggagaagtagagag

SEQ ID NO: 163 - DNA, 13169 bp, Xanthophyllomyces dendrorhous
cttggtaatgaggggagcaatctggggccaggtctgggactgggcagcgtcagaaaggaggttcatgatgacggttcctcggttgatagcctcctcaatggagaaaaggttctctccagggacccagccgtcctcctgagcctgcttccaactgtgttgtcgagcgggaaagcacaaagggcgaggcgagggaggttaggatttaagctcatttttattttattttaggatgaagattgatctagccacgtacgattctccgttctctcggacaccgacaatgacgttgataccgttatctcgggcgttcaatccctgcccgtgaccctgggatccgtaaccgatgagggcgagggtatcatccttgaggtacctatcaaattgagataatgcagaagaaagtggggaaaggtcagaattcaagctccccaaaggaaaaaaattcggccgcggtttgggaaagaaaaaaaaggcaagagaaaaaaaacgtactcctggagcttgggcaaaggccaatcggctcgctcgtaaacggtctccttagttccagcaaagtcaagggtcttgactcctcgctgatgtgtggtcgatagagatgacagataaagacgtccaggaatgggtaaggaaggggaagaaaacaggagaaaaaaaagtaagctccacgagaaactaggctgaaatctcctgctatttccttcggcttgacctcccaacctcctagcaacctctcctgctaccccacagtgaaactccgggcgtctagagacatcctcgaatgattctggaggtagcgattgcaagaaagaaagaaagaaagaaagaatagaaaggaggaatagaaaggaggaacgaacggtcatggtaggagcagcggcggcggcgtttcggatggcaggtctggtaccagcgagaacggtggagaatcctcggatggcaggagcaggcctgacggcggcggcaagagcctttcgggcgatagatctggggatggccattgtgatcaagatgattaagatactttgttaggaaagatgtgagtgcgtttgggagtgatggaagaaaagaggaagaaaggaaaaaaattggaaaatggcctaataagcctcgcgctacaggccgagtcacccatatttttttttctttcctccttcgggcgttaccttttgccttctgcttcggccgaaagagacgattaattcttccatcgtatgttgggataaagaatgtgcttgttggtcatagatatggctgtcgcaatagatataacacacacgtaggatacacaatgttctatctgcagagcgttgaggcaagacagagaatgaatgagtatacgatgaacgttttttatttatttaaattcacctttcccacccgaaatcgttagtcgtctgaacgccagtgcaaggagaacgagaaggtccatccgatataaagtaaagaactactagacacacacacacaccgaaacagagatggaacaaacaagaaaggaagaacggagaagggagagatgagagatggacattggtcgagagaacttctttcgttagaaaggaggaccgggaataaactgccaacacacacaggcacacacacatacagaaagctacacgagtgaagaagaaagggaagagaatcaaacaaacagaaaccctcgaatctctatccccgctcgacattgcccgtcttcaactctggcgaactggcgacctttgggtttccaacgctgctcactccatcggttgagagtgtagactgtgtcggcctaccggcaaacgacaacccagagggcgtgatcgtgttgctcgacgtcggctccgactcatcctcccgctcggacgccgagccaggtgagttgacgatttctgggtggctcagtcctttcccatgtccaccttcttttggctcattcgaaccggtcgatgacgaaacctgctctccctcctctttctcctcctcctcctcctcctcttcttcctcctcatcatcctcctcatccgccgctctgccacccagaactaggccgccggatggagagaacgagatgccgctgcctttgagaacctcctgaagactcattccacccaacacccggttgccggcctggccaaccatctgctgcagtgacgcagaagccgcgttcgggtttgtcccactcgacggcgtcgacgctcccgggtgtcgatcgaccggagcagtgttgaacacatgggggacagagagcggggtatcatgtccgaccttgttgttcacccggctagttatccattctctccactcggcttccgaccggtcacccagaatggccacaatgcagaccgtcatgttatcgcacccgatcccgccgatttctgaactcggggcaagacacttctccatcatatcctcacaaatcttgacgagtgaatctccattagcaatagcccgtcgggtaaagtcaacaacctgctgagaggtcaggcaatcccaaattcctataaatcgagggaagtaagcacgaagagatcgatcagcaaccacagaacgagctagctcacagagcaaacgcataatataaggagtggcctcagagacgaaccatcacaagcaaccacaaggaactcttcctcgccggtccaggcgtgggagatgatatctggatcgacggtaacaacctggtgttcggcgtccaatgaatggttctgcttgaattcaaaatcccccacggctcgagacaacgcaaggttcccattcactcggttgtagtcgacaaatcctccagcagcgacgattcgcgcggtctctttctcatttgtaggcttgtgatcatggcttagcggctcctcctttccaccaaccgagaggacagaccgtgagtctccggcgttcgcctaatgataggtaggatcgggccgcagaagaacaatgtcagaaaggtgtactttccgagttcttggggtaagcttgtgagaggaaaagaaagaaaatccacttacacagataaatctattatcgggtgtaatcaacacggcaacggccgtgcagcctgaagggtcgttcacaaactttggatctgatgattgagcatatggaagagatgaaaaatcggtttatcagcatgttgattgtttgcagcatgtggatgagtttccttgtccccacaacattctagacgagataaattgaagaagacgaaccggctcgaagggcgtcatctgtgcccaggaaagccttcttgaaggcgacctcgtaattcccctctgcatattcgggcaactcgctcagtcgagtgtgtaaagtggagccggtatattttgccacggtcgaaccaccgtgtccgtcatagacggcgaaaaaggcggggtgtttagcatctgtagaagacgacgacgaggggggcggaagggaaaggatggtggcgtgggcatcctccatggctgtttgaatagagccgtcgagtttagaaagagaaatagagcaaagagagaaaggatctagatgagcaacgatccattgggagagcaggcaggcagatgaaggccgaggaaggagaaagggaaggaagaattatgagcgaggtgaaaagggattttttttgttgttgtttattcatcgacggtttgaaacgtatcggctgagccgagtcgcccgagctagattcgtaggcgatactggatgctacctcaactccaagattgagggaaagcgatggattgttggctgacgcgacacgaacacaaccgatcaagtatataaactcccatgactggaatgaaaaggggccaaggcgatggttctctctctatcttccgcatcctggccagttgtataggtgtgaaaacaccgacgagggaagaaggagaggagggaagacgccaggaacgtacatatacgccagccttgcatctcactgatagcataagcaaatcggttggacgaccccttgtcggtatgtttttcgacgactgaaacaagagatacaaagaaggaagaagaaatacgaaggaaggggagccagtgaagtatagacacgataattggatgaagcagggttaaacaaattcaaccgaatcagtgaaccattaactatgactacgtggaggaagaagaggggagaaaagatagggggaaaaggaagaaaaaaaaaagaaaaaggaagaacaagaacgggacgaacctggctctgaaagagtttgaccctgtagtgaccgagaggagaaaatattcgaacataagcgagcgatacaggtgtatgattccaaaggcaagacgacaagaggaaagggtgaacgaagaggaaacacaagaggtcaggatcagatgcacgtgagcgagtgatactatcgatccatctttccttcaaacgcccgtcgattggtaacagagagtagataaagaaacgagacagttctcaccataatgtatgtatgcgtgtgtatgtgtacgtgtgagtgagtgtaggcgattctaaaaaagaaggaattctaaaagagagacgagatggagaagaaagggaaagagaaaaaagacgagatgaaagtttcgactgttcatggcacaggtggagaaggagacgatcattacaaaagctgtaatcgcgttattagacagagttgtagtctgtgcttttgggcatgatactacatatcctcatagttgtcctactacggaagattgtatatgtctctgaatttgctccatattagagaacatttgaagtatgcattacgaaaccgccgcctatttctataatcaaaaacataaatcgcaaattatccctagtatttatcacggaacttgtacgattgtctaatacaaatttcacccttcggctacgtcatcagttctaattcctttccagagtcactgctctctctcttatccttctctgttcatatctatcactcaatcatcgtacactcgttctactgcatttctctcttctatcatcgtccatgccctttcaaaagacattccagctcgctcgaaaggcaaagggagctcatttagtaacggatgaagtcgttcgagcactcggagatggtctcaaagacgttaaggttagtgttgctagtcttcgtccaaccctccctctggttcgtatagtcattcaccgtttcttcaccttttgtatcttcttctcctccttttttttcctcactctctgcagattggaatgttgttcttattcatgtaagataccccgtctcttgtttggctgatgaccggtccgtctctgtctgacttttctctcgtgtctcttcacttttattcagtaagcacacctcggcaggactcacccgtttgtctatatcttgcattcatctgtctatgttgcttgacaacatcgaactcattctttatgattgtttctcctagttaacgagaactatgacccagatgttcggtcggacatgacgatggcgctcgataagctcgtcccagaatctttaccttggcaacgttcgtctctggtgctcttctctcttcgccatacaatttcctcgattcaggaggagaaagactagacctgtttgagacctgacggagcattgacttatctaattcagatgttgacgagggaccggacgattcggttagtcatacaaagaccacgctcgtgggtaacacgatctccatccctgttagtttttttctttccttaccttaactcgctgtttgtgtcttccctgtctcgtgaggattctattgttgagacagaccacctgctttacagatctcgaacgggaaacttcaactaggaacatggcaaggaatttatctgatggaattcagacatctctcccatgtccgaactgtagtcgctactgtattgtgagcttcttcgttatcgcgcaagatctcttgctcctgtatcgctctttctttctttttccttatatcactcttcttgcggctttccgacgcgccatcgtctttcgtcatctctcacaggggtgaatagaacagtcttctcttcttcaaattaaagagcaagacaatagacatgatttcgtatctatcaatcgttaattccatctgaagtgcaagtcaagaggatgatgaggagaatgagagaaatcgttcaagaaaaaggaggagggacagagaaaccatgaaagattgcgctacttgaccggatggtattatattcggtggtcttgcctcctgcttccaactcgcgccgtttctccatccttctcgtcgtcatcgtcgtcatcgtcgtcgtcgtcgtcgtcgtcgtcgtcgtcgtctttgaaggttgactggacaggttgataccctctttgtctcttcaaaccttccatctccatcgcctcatcctcttcaatctgttcccctgggtgagtgtgtctcccgttcatgactcccctctcaacagattcagaatcagaatcgaagatcacttcggaattagatgaagagttgagtgaagaagatgatgaagcagaaagaaacggtccgccgaacgtatgggatagatagacgttgatgagcgaggtaatcactaaatagatcacgaatgatagtgagaagatcactaaatacatacacatgtatatgagagaaacatttaaagagttagttttcattgggagtcgtgagaaaatcaaagtaaagaacacttgagaaggagcaacgaacagagcatgtatgtaacagcgtcgacattttgagagtcaatcaacttgagttcttcgtccgttgcgcttaaaaagacacatctgtttgtttcgttttcgtatggttttggtgtcatgaaatttagttgggtgtctcgctggaagtctcagaagagacaagagaagaaaatggcgcaccctatgagaacaaggagatatggctgcattccatcgtgagaaaaatacggctgtcaatctccaatttcgatcggcaaagaaagagaaggacagagacaaacgtatagatgttgccagcccctgacaccccgtccgccaggtccttctccactcgctctgtctttcaacacgaaacagatctctacaatcctgacgacacctgccgctcccagggaaaggccgagcacctggtgtaccatcgtggctgtcatcgtccgttggacgtggcccgaaaaggcatagccagtcatgatgaaccttgatattcgattttgtatttacacaatattcagagtgagcttgaactataagttcagcagagacggatatagaggacagaattggacaaacaccatggccggtacaaaattccgttttcgaccgagcgacattaacacgcccaacgacccaccagcccaccaaagcactcccagtgccgtatgctggaggtctgatcgagagaaaagaagaaaaaagacgaaagacgaaagacatgacaaaattccatgtaagcaaagataacaagagaagacggaaacacaacaatcgaacaaagtttacctttatgagaccatccatccgagtgtctcatcgagaaagtctgaagagaataaacattgacccggtaagattgaatcagtcggggcataagtcgactgaccgcaaaaagaagagatggacatacattgatgattcccttcatggtcaaacccagcaagtaaagccttagaatgatcgtcagttcatcgcgcttctcagcttatagccggacgaaagagcagcagaacaaaagtagggcggaacgtacgaaagtcgtgatcatcaatgagtcctatggcaacacaaatcttagaaaaaaattaactaacttgacacagacaagggaaacatgagatatgataaagatgaacgtacgtagagctcttggctgtgacccactcgtttcatccaacttgttccacaagacatcgcgatctatgcgagtcaacgcacacagaaaccctcttcagtcaacaattcatcttgatcctctccaacgagcaacctttctgttcaaaaagcaaaagcgagaaagaagccgccaggctagcctaagagtgaaatgaatgggaaaaacttaccgctaaaagggtgccatataaaataaagctgaccccgaacgtctgttacatatgtgcgttccattcaccccgtgatatagaaagaagcagaaaatatatcatcaaggcgcgagtttctaagatgagggcttgagtcaaaaacatacatgatgcgcataacattgtaacttctcctctcctctgcagaaccccatgtaagtttgtattccaagaagaatttgtgtccagccgatcaaagggtaaagccttccgacgacagcatggatccaatgtggaatattccgaaagcgagcaatatgaagcttgagatatactccggacgacgtttgctgtggtttcctcaggtagaaggatgtatagagacagtgtgagaatggagctcaagaagaatgggctggaagaaactgagagatagacggaccagaagtagaagcaggatgatgatatttgctaagactccgtcttgtgaatcctcaaagaaaccattgcgaacgcgtcagtctcatcagcttattcttctttttgatgttgattcaattccagatacagcaaagaagaaaagattgcgtacggaactgtgttgggtcaacgaaccaagagaaaataatcagctcttcactccgaacaaggaattcgataacgctcgagtggcaaggatgattcaggcccgtcctgcccttctaaaggagaaagtaaagagagacacactgaagccggatattgtctccctccatgatgatgacctgctctctcaaagaatgacagaaatagattccacacacgagtatacctttgaattagtcgaccgtttcctcaaaacagatagaaaagcgttcttcacgtttggagaagtctttttgttagaacgaacagaagactgatcaggatgggactcgcctagaatgtagccagcgctcgtcaagaccatcgatgttgtctgcgaagtgaccccggaacgacccaaaagaaaggatgatcagtcatttcggtctaagactcaaagagaaagataaatcggcctttcagtagaaacaaggagatttagacaaacctgaactggaatatgaaaccttgactttctagaaacgacccaatcaagccgcacgttatatacacacaaatgtcagtcatagcatcaatttactttggataatacacgccccgctcatcccaaccaaacggaagaggaaagaaaatgactagaagtcacgagagaaaggaacagaaacctacttgatcccgagcaccattcccagaggaaataatactccccaaacactcgcctggaggaccgcatgtagttttatcccggtcgagtgcggctcagaaagatcgaccgccgatgctgccggatgagagtgtcgttgggagagatgatcgttcagcaaaagatccatcgttcgtctctttcgttcgtcctattgttgtctcgtttggctgagttttgtgagatgagacaaatggaatgaagagaaacgatttagaggatgaagtgaatcaatgaacgaacgagcgagcgaacgagcaagcattctctaattcccggcgcgtcatctgtttgaaatgcgcatttgatttcctcggtcaaaagagcaacaacctggggaagcacaaagaaagattttttctcctctccgttcctaggaccagtatgaacaatccattcaccaaacgcacagaagaactaaatagattttacaataagcaaaatgataagatagagaagaagaaaggcatgtgcatcgtagacgagtaggaatgtggaaagtgaataagagatcttgcaagatctgtgtagttgtatgatgtttcaagatagagtaaaaagattgaacgaaagaatagatgatgggatcagaaaagaagagacagcgagaaagaaatcgaaaaagtgttgcttgaagggtgtaagcgaaaaaagacgtgagtcaagaaactcgacccgggcggacgaaagatgaagaaaaacaacaagtggcatagcgagccctatgatttttaaatgaaataacaaagaaactgataaaagaatattatgtcgaataagattaagaagcaggaaaagggaagagtcaagatacagataaaggatgttatggaaatacaaaaaggagaaaggaacaagaaggaaagaagaaggaaaagtggaaaagagcgagatgagaatggacaggatacactctgattcactcatcagtctcaccgccctcgaaatctaatccctctcccaagattttctcttcgttctttctcttgcccggcccccgacgtctgataacggaatcatacgtacaactcagaccgcgtttgacgcagtgggcgcatgttggccgagttgcatcgcatctaaaaacgtaaacaatgtcagggaacacccggggaaggcaaatcaaaccgaagcgagatgacaacacaggacaaaggaagatgatgcccacctaagtttgcgacctcgacagaaatgacaagccaagctgactttctttgttccctgtgctagtgatctgtccggccgaccatcaacctgctcgctagcctcaggttccttcagatcattcccactttctgcgacagacgtcgccgacgacctactaatcgtcttttttttggaacactttcgatcgatcgaagttgaacctcctttagttgagtggttcgtctcctttctctttgcagtcagccccttttcggagccactcccaatctcatgaagttcgacttttgtcgccctaaccacggcccacgttggatccttttcgttgtacgtcatagagctgctaccgctactgctcgtcgctgtccagttgaaggcttgatgagagtcttctccagtttgctcgaacgaactggatcgggatagttcgttagggagatcggtaggtaacgaagcgttcatcatagataggtttgtcagcccgacacttgtcgtgggtgggtaagatcccacctggaatgatcgaggttcgatcgtcgccgctgctaacgctgccgtcgtcatcagtggtaagccatgggtttctgacgaacggcgatgatccgatgcaaacggggaaccaaccgcagtcaaagaagacgccgaggccgaagaggatgatgactctggtgcttctggagtgaaacacttctgctgggcttgtagccgctgttgtccgagtagtaataacctgctttgctcttgtgtgatttgaagaccgatcggatgggacgcgtaatcgttgctcgacctgaacggcgcagtgttggcggagtacggagaggatgaggacgacgaagagggaccaagaaacgactgagccgggatggatgaagacgaagatgaagacgaagacgaatgggtaaccccgaggggtgtttgttggtgagcaggagatccagatggcagaggtgcgtacatcagagacggattgttcatccaatatcccgattgggctgattggatggatttgaggtgattattgctgtcagtattgagatcagaggagggcactaatgaactttctgtcgtccaagagcccgagatgtcctgaacaggcaagcagcctttatatcgataaaattgatattgggaaagacaaaaagtagtacgttgattaactaaacgttcgtgcggtcaaggtgataaatatagagaacctatggacttaccttcctggactgtcgacaaggttgagcttgttttcggcgtcaaacctaatgatgatggcaaggatgaagtggacggggaggacgaaagagtcgacgaaaatcccgacgcaggcggattgtgaccgtaaggaaaccgagacacatccgatccagaagtctcagatgggccggtagggaagtgatgagaaaacaaggcagaactagcctggtgtggccagagtttgacgtccgtgatagatagtcttctctgatgattttgctgttgctgctgctgctgctgctgctgctgcggataatgatggaaagaagctctgcgttctgagtggacggcaggcgtggaggatgatggcgaaaacaccgatggggcgatactcaggtccaccgaggggcctgttgtcacatagtccttcggcgcccctgtagacggcacagcgcttgacgaagaggcgatattaaagcgacgttcggatgcttgtttttcgttaaacatttgctggtatcggttgaatgtcgtttcctcaaaagggcctgtagcgacgaacggcgcgctcatagcttgttggtcgtgcgcagaagagttaagctgattgttgaccgaggatgtagaggaagatgaggtcgaagagattggtgtggggatgagatttgagttgacaaaggaactagtgttgtgagactgtctcctaaacgggaatcggtaggctgaagacgacgatgacgatgacgatgatgatggggtgaacacatggaatagatggacgggtcgggaaggtccgacagccgggttttcatatctgttttcagtaaactcctctccccaaatagatatcccatcaagagcttcgccttgatcgaccaagaacgtgctgtctaccgaaggttgttgagccaacagagccgactcgatcgatccagactgatccgcccaagccgttgaggcgatcagaggtgaccaatccttcgatcgaatatatgtcgggccagagttgggctgttgccggccggtatagtctgttcgccctgacgaaggaattgctttgttttctgattggttatcctgatataaagggtagtaatggtgagcatgatacgtatgtggttgatcgtgtgatttccagcctaatgacatgtcgttgatattgttgctgttactgctgctgctgctgctgctgctgctgctgctgctagtagtattggggttgggatcatggttgtacaacggaacgccgtgtgtcggaggaaacccgttcatagagcaaggagcagagggctgtttgaaagggtgagctggatgtggagaacactgaaaggcagttgctctcggagggaggtaagaatttgcgtgaaaagattgtggaaaggctgagagttcaaattgagagacctccgaagagccgcaaaaactggagtgaagtgcggttgaacaggtttgcatagacagaacgaagccgtctaccattctttccgagggaaatagatagtagaacagaggcaaggaaattagaataacgagaagcacgagtgttgtgagtaagagatctctgtgtatgtatatata

SEQ ID NO: 164 - DNA, 15949 bp, Xanthophyllomyces dendrorhous
gtatatatatatgtatatggggaatagaaaagaaggaagaaaggacaggtgccaaagatctgagaagaacgaccgatgggttaagtaaaagaagggagggaccaagaactcacggagaaaacaccgctacgatgattgatgtttacgtcaaccgcagatcttcgagatcgaaaagagtcagctatgtcgaacaacgtgccgcagtgatatcgagtctggagaagaaagaaggacagagaagacccgaggaaaggaggggaggtatcgttgcaaaagagggtatagactttagccggtagaaacaacgtcggtggttaagaataaatgcatagttaaagaccgaaattgattgtacgtacaagaagaaagaaaagagagggcgtaacgtcgaagagcgtgtggtttaaaagagaaagggatgcaggactgattgatcgaatggggcgtttcgaagaagacttctcaatggatgagaacgtgcttccttcgataagggatatcaaaaatcagcgagatgggaacaggactcttttgagggatgcatccaggaataggttatgtgttctgtttagttaaagtttctcttaaggagagatgaccctcgacgaggggcttctattatttcggccaaagagcttgaaccactagactgaacggccaatgaacagggacaggttcagaaagaggtaagaacaagagccaaaggatgtaacccagcggcgaggaggacaaggatacaagaaaatgatgaatggggtgaagataacgaaaaagagggaaagaaagaaagatgggatcgatcagtcgagagctcctcccaccacgtgtttttgtatctgaccacaaaaaaaagacggacaagaaaagcgaaaaagaaatgtttgaaagctctgaaaggaaaggttttgcccttttcgtttgccattctcccttccctcgccattgtcttgcgcctgtcgccttcatgttgatccattgcccagcccaagttggatcctgcccgttgcatgtgtcctctccgtcggcgggctcctgccgtcctgccaatttgtgaagaaatatttgatcgacagacttagtcgaaaacaccgaaccgtgtttatcctatttttgctttctcctctgcccttgcttgtctgggtcttggagaaagcagaaggaaaagaaaaaaagacattatattgatgcttattcctccatcctcttacccagtaggagaagccttgtgttcccaaacaaaacatacacagacccaagcacgttcataccccctcagttagacgccacaagagaccaacaaaacccgaagaagagaaagagaaaagaaagaagaaacaaaaatggggagctccaacaaggaaggacttcgtatggagtgaaagaagtcgatagagaaatatatctaaagaggaagggagacagagaataacgagaacatacctgattattattaattttcgtccagattcgatcggttgatgccgcaggattttgaagagaccgactgcggaaaattcagaagaagagatttacagacttgcccgtacccgcccgcttaactccgtacccgcccggtccgctaaatgcgctaaatgcgcctaaagccaagggaagatcctttagtgtaacttcgagaagaataatttgaataggtaactgaccccgctgggctcaggagaaagaagagaaggaacaactcataagacagctgagggtaggacggcaagcccggttacgacctgctatgaccgtgatcgcccacgtcggctatttactgattgggcccggagttatttatcatctgttcttctcccctctcctcgttttctgctcttccagtcacacaatcagcatcgacttccttccttactgccgccagcagtcagacattctgaatgagaacaaagaagacgaaaagagaataaagaagaagaatagaaagaaaaagaaggaaataaagaaacaaagtaaacaacaaatcgagaaggagccgaacgcttaaattgaagtacaggaaagaccaaacgtggaaagaaataaggggggaaatcattttcagccgatcagaagacgactcccactgtgggaaagagagagaagtaagggtgatcgatcgatcgatcgatcgaaggatgtaaacatccgaaagtactaaagaacaggtcgcgacgaccttaacatattcaaacaaataaatcaatcaacaaacaaacccactcgcttcgcctacatcctccctcgcgttatgtgccatcatggtcagcttccatttaccttccttctcatttttctgatgatgctttcttctttataacgatcatcatcagcatcatcatcgccgtcgtcatcatcgtcgtttcacactcttttcgttttgttacgttacgttacgttactctctcctctcatctttctgcctgaatcgagatctgcaggtttgtttgatcttccttgtacatatacaacaatccacgtgggtcaggaaatgaacgcaaaagggttaagaaccaacccatcttttacgttcaatttagataaacaaatagaaacaaattcaaccgacaattacacgaatacacatgcatatgcatagaagacgaacagatatgcgtgattcaaacgaagaaggaaggcacgtggagtttgtttggatctgagtttgctggaatgccactccactcttctttctctgggttttacgctagggagagacgaaagagagatacagatccacaagaggcaggaattgaggagtatagaagggaagaaaggaggacagagcgcaaaaaaaaaatctcgcctccctagaaggaattaaaatagagataagatcgctgtggacacgattgaggatatgtgtgatgccagaacaggcggatgatcctttctttccctacctgaacgtcctatagttctatctcttcatgttgtctctttgcttacttgtttctggtttgttcattttttttaaaaaatctccgtagatttatcgagaccaacaaatctcggaatgcaatttgttgaactcggctcatccttctcttcttttcgttcttcctttttgcttccgactctcacacttggatagatttcattttatggaaaaaaatcatccctagtcttcgtatatataccaaaaaaaatcctactctttttgaacccacaagatgataatgttgtttttttgatcgaaaacttgcaagcaatgcggcgcaaacaatcctacaaaagctcatcaaatgaggtttgttcagtccgcgctactgtcagccctaagctccccacaattagaccctttcgatttcctgtgggaggatcaatcccccctgccgcttgatttcgtccagaatagtcatcacccggatggacgtttggtggttgttccgaggtgattccaccgagcccgcgaagatctgtcgaccaacttcgtcctgttcgaaacacttcagaagagaaattaaacgaagaaacaaagaataatgagcgtcgaagcgcacgtatgcgtgtctcctttgttcatcctgatggacctacgaaaccgaaagcgttgtccgtgttggggtcagaacactcgaccgtttcctctctttcatcgttgtatttgattttgtatcctgtaggtcttgagttcgtttatttttccatccgttacaaagcagaaagagcacgcatatttgaaatcgatacgttccggaataaacaacagcggttccgactccgacagttatgaaaatgagaagaaagaaactaaactcacgctaccatcacaccagacactgtcaaagttccttccgaaccttgaactactacttggttgactgttccagcggccatacttccactaattacagcctgtgcgctaggtagctcatcaaatgataatactgccgtggtgtgtaagtcgactgaacgactgatcgtcatctggccgacgatctttgggatcgacgatatctcggcaggatgaggaaataaactgcggaaggtcaataatgataggtcaatgaatcacctgcagaattgagtttactttggatggtggagaaatagagaaacgattgatcaaaaatgacaaacgttaaaagcgcccaatgaagcgtatatggcatgaggtccaggcttagatgacatgttcacatgtttgtgtgtgagtgttaatgtgtctattatcatttacctttggacgatactgatagatatcaagagcaaatgtaacgcttacagagctcctccaccgagagaaggtgcgatcaatcgatgaccatcgtccatatctgtggaaatacccggaataatacactatcattagatcaggtctctagatcaaccaagagaggaatcagggcaaggaagacactctacaaaccaaaggtcttgaaatcttgtgcaaggtctgcaaacacccgacgcacagtcccaatctttcctccggcaatcacctgcaggaaaaaaaaaggtagaagaaattgggaaacgagaaaagacgttgagaagcccacgcgtcagcattgaacattttgccaacattctgtgtcgcgatgtctccaatcaaccttcgatcggacgaacttcctggatagctatcgtagcaggaaaaaatcttgaccacatggcttccatgaggaacaaccttttctcctcagaaattcgaacgagctcttctgcctgcttggcattgatagtgaaacctttctcgcacagaacgtgtttgctgcgttggagatatgtagtttgtgtcaacatgatatcgacaagagaataagcagatatgaagaacccgcaccctgctagaagggctgctttagaagctggataatgattcgagttgggagtcccaacgtacactacatcaacgttctgttgaagagagattcgatcgttagtgatcttcaactctttctatctatttgattcttaacaaaaacaaaaaacaaaaaaaaaccaaggggtacgaacagggtcgttgaatagatcaacggcagatccgtatcctttagcaatgtcaagtccgagttctctgataaacgcgtccgctctgtcctttgaacgcgatcctacagcgaccacagcgtgcttatcgaggccagaggaatgttcatacatgtacgattagtttagtctgcgctcatatacatatgtttaccataagtttctactgaccttaaagtcttgtcctcgggtggatgcatcgatcaagagatccttagtaaagttggtgctgatacctaaagagaacatgaaagaacattggtcttgactgatcaatagaaagaaatctatcactgagaacgaacgaaagaaacgaaccaccggtcgcgagaataccccatcttagtacctttgtttgaggttgttcggtcataatcagagcctgaagatctgcagaaaaatgaggaaaagttaggtaagatggaagttcggagagaagaggatatgatctctcagttgacgtcaccaatccgcacgggaagggaggtcaggatcccggttagggttatttgagctcgaggggatcttgtgtcctgctctacatgcattacaggatgagtccactcgattcaacctgctctctatcttgtgcagttgttaagttattcattttgttcttgttctgacttcagacaatgatcaggagatctcgatcaggctctctttatccctgtcgcctaggtgttttcacggcggggcgaattatatattctcgaaacgattgcacatctatttgacaatgcttccatgtccggatcaaccgatgagttccccaagatggaaacacaattcataactcaagtgttcgagatacgatcggattgatggatgctgaatgaacgattgttcaagaaaagaggacgaatgcaaaatataatgaccaagcactcccggagcggttcaccttattcaaaccttctacacaccggtatccatcgaaccacagctcatgaccgcatcttgtctgaaaaggtccactaagctaacaggaagtgatgctccgctccgcaagccaatctggtctgctgactgtgatcctagtaagaggatagatagagaaagaaaagaaaaacaagaggccactttgcaaaaagaatacacgtttcaacatctcacggacaaatcagtatatctcaaccagccagcaccatgaaatataaggccacttgcgacccaagtgcgcgctttgtgaacgtgagcgtccctctgcagcaagagccggctggagagcgaaagccaacgaagaaaagtcagatggaaaagtcaggcaagtcgataattatcgcgggtgactaaccaaatatcgttcgtgggccgccgaatacgcagcgagtgcttgcccgtggtgtcttgggaagaaaaaccttttccctctcggtcgtcttactctacgtctccttagaaaatggtgagaataacggaccttacagagctctccttcgccggctgcacacctagacgacattccagtatctctcttcccagaagttaccgacaaaccgacagaccgatacgactcgatgttcattgacaaaggatgggggcgagaatgcgtggtggtaatcaggtggcggtggcgagttttcgattcaaagaaaaaaccttgagcgtttcaatagaaatcgagtggttgggcgtttcgaggtatcgacacagtgtcagggagatgagattagtttggtacccaagtcaactctagcatcaatccggtccattcatcagaactcagaatccctatccttctccccaaaaatcgtgcagccggccgggatctcgatctatgtttcccccttcatatgggggagaaaaaagtactcatgcaaaactcttttccttttcttgggcgtgatgattatctttctagactctcgctgttgatctcctcaacccttccatcgagtctgaggcccgacaacacaagctcaagaggcttgtgcagagccccaactctttcttcatggtcagtgtcgcaattttttttaccttacaatcgttcgcgtgaccataggtcgaatggcgtaaatctgaatcgagttattggttatcttttctcttaatatccttgggccatccaacaacaggacgtcaagtgccctggttgcttccagatcaccaccgtgttctcgcacgcttccactgccgttcaggttcgttctcttttttcgatcttgtaaacagagaccataacttgtcagctgacctgttgatccaacaaccgccacgatcagtgtggatcgtgccagaccatcctctgccagccccggggaggaaaggctcgacttaccgagggtatgtcccatgatttcttcatcataaaaacagtataactcacgatgtattttttttgcctttcctcattgtcgaccactcataggatgctctttccgacgaaagaactaagtttctgttatcggatgatgcattcaaataaaagtcatgttctattctcgaaatctgcttcgctcggatcgatctcttttcgcttgctacaacaccccttgagattcactcccatgatcttctcgtaccttttggcttgatccaggggtgctagtcttcaggatggtgaacaggatgtgaaagactgatgttggcttattgacgatctacgactatttgctgtttccttccctctgcttgccaacaacaaagagacatgcgttctcaaagtcacagttcggctagggattgactaatcaaataggcttcgagattttggatcaactcatagtacatcggctcttcgtttcttagttctaatgcgtgtgcctcactgaccccgactgcttgcaaaagcgtccttgaaataagatgactatcgtaaccatgagtgtacatcacagctttcatttctctttcatttctagcgcaagatccttcatatctcggggacatcttgtccgaaacgactcgcatcgttttggtttcctatctagtcttcttgaccggaggttgtcttgcctctttctctggtttatctgacatagtagcgaaatcctgcaaatctctagatgatgcagtcttggtaggatctcccaaaaacaaactactttcgcacaagcgatggaaacctgaagagtatgtccattttgtatgaagaaaacgtcctagacatacgatctgcatacacaaaaacggtgaacgaaggcgagaagatatggcagtagatgttcatccatttattctagatgacgacacaaggaacaggaacaggaaaggaagatcactccaaagcgagagccactagtttgagaatctcctcggttgatcttccttggttcgatagatccttggcaatagattgccatactggtgagtgtttcggactcgcagcggtgcagagatcgatgacgtgttgtcgacgttcctgttcaacgtgagagaatagagaagaacattgtcagtacagtggcaagtgataaagaggatgaaacccgagagagatgaatcacaggcagagaaagatgaatcacaagcagaggcagagaacaagagatcgaatacataccatctctccgtgttccatctcgaatttgtaccaccaaccccaagaatcacccagatccttgttcgcctcgaccgctcggccaaaccaatgtctcgccctctcgatcttcctatcagtccagaacaaacgagcgacaagagtgatgatgactgggtcatcgtttgtctttttgagggcgtcggccgctcgggtctttcgttgctgtcgaggttcattccagatattgattgcccataatcgaccagatgtcggacattcttgaatacctatgcaaatcaaatggttgtcgttgttgaatgatcagcaaatcttcttcatggaagaaaccaaaagagaaggtagagtttgaaatgtaaaagaaaataatgaagagaagacgaacctcttgaaagaacgacttttgattgagctatacttcccgctcgttcctccactcttacactctcctcccataattctggattctttgggttcagcagccttgccttttccaacaaactacgagctttaatgaccacgcctgcatgttcttctaaacgcgaagaaagcaaccaaagtggaatcgagtttgggcaagccttgacacctttcgagtatgtttctcgggctagaggtaattgttgagtagccgtgtagatctgacctttgatcatgtaaagcttgtcgaacgtggggaacttctcaataccttgtccaagagtggaaagcgcttcgtcgagcgcgccttgttgacgctcgagcaccgcggacttcatccaaatctatcagggccgaaaagagcaaaattaaaggaaagatgtccacacaagacaagcggcgaatcagttgactgcttgataaagaagagaagaaagaaggagagaaacacatccaagagttcctaccttgtccgtaccagcctcctgtcgagcgtttgccaacaactcttttgccctgttcaacgctccattctcggcttccaactttgcggccgctagccagatctgttcagattcggggttcgcctggaaagcgttggcgaggatgtttctggcgccgggtacatctccgtgcaaccatttctccttagcggccatcagccagagtacttctgctcgtggacaatgctgaaccgatttggccagaagcgcttgtaggtcgtcactaaagcgggagatttgtataagaagaacgaaggacatcagcgtcctcctgacaagtaaaagagaagagtgatggtcgaggtataagtcatcagaacacgcactaggtaccatgagccttttcaaactgagcggccgtccaccagacctgcctcctatcgggaaagacgttgatgaggtatgctctgaccgctctgctggtttcgatgtgacccctagcggccgaagaatcggcgtcatccatccaaatcttcatacgttggtcttcctcgacatcgatgtgtaatgtcgctttaacgatcgctctggcggtgatgggcgaaccttcggattcacatctttcggcctccctcagccaggcttctctatccatcatgacctgttggtctgccaactttgccacaccggaagccatgataccttctaccttagaaacgtcacccgtctgttctgtcaatctggcagcggcgatccaaatctcatgagacgttggaatcgtctttcgggctttgttgagaaccttctgagcggcctgaggagtctcgagtcgcgcaagcgtaagccaaagatcgacagaggtcggaacaaattcgaccgctcgagcaaggaggatccgagcatcggcagggtcggtctcaaggttgacagtctctttccataaagtaaccgagttcggaatagtctccacagctgttcaataaagtcgaaagaagggaatgaagtgttctcttgaagtatcagaaagcgttgcttatgctcatgagtacagacgagagggaagtctaaacgaagatgagcgaaccttttcttaagacgttcttacgtctgttgacatcagtctccaaaacggctgctttcagccaaattttcaccgactgggggagctctcgaacggcattggctaagatccgcttcgcattttcaggaatctgatctccaataaatacacaggaagggagaaaaatgaaggcaaagtggtaagatcgagacatacgcgctgcaaaggctcggcttgtgaagatcccgagacaaaaggagtccacgtacattaagctctgccgcctgtaaccacacgtcttcgctctttggacacatctcacaacctttagcaataattttcctggctgccaccatctttttggcatgaacctctaacgcggcagctgcgatccaccctggagcgtgcttggggttagtcttgataactgaatcaagtagggcccgggctctcttgatgtctctgtacgatgaatgtatagatgaaacgagacacataacgcgtgatacagaccagataacgaaaagttttcgaaaagataatcagtctcgctggtgtgtcaatgatggagaaaggaatcatgaacctgaaaggacgaaccctatctgagcatcggactggacgaccatgctgttaagatccgtaaggtagcctttaggatcgaccgtagtggatgatccatttgacgtgtctgccgacatctgagatgcacacgcacaatcggatggttgatttttagtttctcctgcggacattgatcaaatcatgagaggcccgacaaagcagagaatctattgctgacctgatcgagtttgagagacaataccttgtctcgagcgttaccgatctctaccaaatttgtcatcgccccgctctctgatgctccggcctgtaaaacgtttggttaacggcaaaataagagtagagggaaaggcgcatcaattgggtagcgattgacaaaaagattggaggaaagaagggtagaaactaaccatctgctcttcgcttaattggccttctgtcgcgttcgatgccatgtttgtcagtgtcacactgtccggtacggcgtactccctatcgaatctcgggtttcgcttttgttttttacccgtcatattggcaacttctggtaggttttcccattcggagtccgtgacagcggtgagtcctcgttttaaatcagcgaacctgttttaaagtatgagtgtgagtgtgaagaagtatgtttgaggcgtgtaacagaagaaaagagaaagaagaatcacaagagccactaagatttattataataaaaaaggagaagagaaacctttcaaacagagaatagacggactgactgggtttgaatctttggttgggccaaccgatgagccttcagttgttcctcctccgccgcctctctcctcgcctttctcctctggtcgatcctctcgtccacactttcccagattcgatctgcttcttcatcatcctgttcatacacggtaccagcaaagatgtttgtctcctcatctggatctttgaattggtccggatcggcggtgatctcttcacctcggcctgaggcagccgcgtcctctgaaggaccctgatctcgagcaggaccgatatcggatcgagtggtgaagccggaagctctatgaagaggaaagagaaacaaagaagcgattgagagggcgaaatatgaatagaacagaacagaacagaaaattaacagctcaagcatgggtccgaaagagatagaggccagaaagagaaaggaacgaaccctcgaccgagacctccgacgtaggaaggcggagctgtcatcgtcaaaaaggctagcttgttgacatttccacccctggaggtcgagttgatgacctggaatgagttggactgcatcctgtagagtgtgtcttccctgaagggactgaagaggtggagagagagtgaaggttaatggacaggttgatcaattgtgcttgccaggccttacaatctttacgaaggactttctatgatatcgtactagaagcattcatagtatatatagataacaaccctaacacacgctctttgttagggaaacaagctaggctggtcgcggagaaggttacgagctgtgtaaccgcagtggttttcgaaatgagcggtggggagttcaggctctgagactggaattgatgaggacaggggtgcaaatagacaagatcgttatatcaaaaggatgagacacaaggacggggcacgagagtaagacagaatagaatatcaatagaacatccgcgacatgaggttttcgacgggagagaacaggggaacgtggattaacaaaggatccaggcttgggagcctatgttatgaatgacaaaggaagccggtctcatatgtgaccctcaaactcaaacaactaagcacaaaaataaacaagcatagaacgtgctagaagaacctgcgctagaagactatatacttatatgtcagtgaattggaagaacagaataaatggagaaggagtagatgaagcgaagcaacctaaacagtcgtggattacagacatgtaacactcaggccacattcctgacgctttaacgcggatgattcagactccattcgagcagacaacagatctcttgccagcataattctctgatctcatcctttgataccttctccatcaagttgacccgtccttccaaagactgaataacattgaccctcttttttgcttcggttcgagccgtccggacatctccccttgaattagggtaggctttgacgagcacaggatgattgatccgatcgaaccaccatttggcgttccaatattctgaatgaccctccgtccgatgaactagcgcgtgatagtaatcaaatgtgccatacagctctccctcgtgagcttgagcgattagatgggcggaagagtagtcagagttgagtagatgaagcgcagggagcgcagagaggggtagggtggtgcctaagataagaccaaaagagagtaataaaagtgaaagtgaaagaaggaaatacgtcaacggtattctttcaaattcaattttctaaggaatatttgttcacagggacaactaggaaagaggcacgcgcacaggcatctatcctagaggttaacgatttgtcgaaagggttcttgggattgaggggcccgggtgcccgatcgagtaacaaatggaattcggttgggatcttggacgagagcgattgaagaattgctcttgaggaaatttctataggctccatctgagtgagcagagaaagagagtggcaacctctactatgtgcaacagaaaaccaaacaggatggcaagaaggataatgaaggtgatgatgatgacgatcatgtgaagagctgcttagtcattcaaaaccctaacaagtgccttcgtcggtccgcacaccttcctaggcaaacctggacagaaacaggacaatgcaggttgaacttgaggcgcacagacagtgggctctctctttctgagtctcattagagtatacatggatatatgtagtttctgtctttacttttgatcgtctaattactattcccaagttctcttggcacgatctcgcttggcctagaggaacgaggagtagagtataggagaatagagtgaagggagtagagtgatcagttaaccatagtaaagaaagagacaagataaacaagtcgttagcctacctttctatcctcgaacgcttgatccttgattttcagcttttccgcaaactgctctgctttctccatctgctgaattgaccgcttcttctgcttagagctcgcttttgccttgacggttccctgtccacctaccgtctttggagactgattttttttcagtcggacctcatcagcaggtgagacagagtgcttccctttattcactggtggtggaggaatatgagggttcgatgaggttgacggcaagtgagcgaccgatcggtgagcaagttcttgaagagtgctgtcaactcggtgtttcggtgtagggactgttaataggagagcaagtgagtatttgaacagggtgatggtcaggatgttgtttataatatggctagacacatgtgtatatatcagataaagggaaacctaaaccaaccggacatcaagaagcaagaaggcgagagaaaggaaaggagagagaaggtataggacgaaggcgaggcgggagaaatgaacgttgctagtcggggcgaacgtttgttcgatttacactataaagcatcctattcgacttgacagatgtatcataaaagtttcatattcaatataatcgatctttaccaggatactttatactacaacaattttgtgtcccacaagattagttcattagagaattttgtatcatcgtctatctatcgccatacgaaggctgtgcatatgattcgactgtggaccttttataaacactaatagagcgaatcattgtcaagactagaaagtcggataatacaaccttttgcacatatcactacaactcttgtagtcagatttcctaataggatacagccagcgcatacatccgtgtgcttctcccgtcagagtcatatgtttcgattcctcctccttcttctttcctcttgaccacgactttatccaaagccagaacctctttcaggtttcccaacctccccccccctttgttcccttcttcttttgaagactttgccttctgcgtccatagaagcaagccttagaagtagtcgaaactttctccccctccttcaggttcccccagcagttctttcagcaggccttcagtggttgttgcacttttctcagtaaaagaaaaggaaaaaaaaaacatcgagcttgccaccctttcgatcccgtcgtcctctttcaaaagaccccatccgttccctctcctttcgtccccctcctgcttctcctccagacgaatcagtgctcgtcttctcttgatccgaatcaggtctcttttgcctttttttctcaagaaatccgggtttcttcggatcgtcaagaggtgcgcatatagtcatcctcccccttttttccatttattcgtctttcccttccttctggccacccaatcgccacgcttcactctatcttccctctgatctccgttctcaatcactgataacgtctattttactcataccatacagtctttagtgtcgtagtcgagcgttttttccctcctccctgaaagaaaacaatcctccctcaagtctctacaaacccgtccaccttctctgccacccgaaacaaactcttctaaacctctcctctccttgggtccccttcgaatttcctcttgctttctctcaccgaaagcgaatcgaagagaactctgtccgtctttccctttctctttcccagaaaggaattcggatcctccaactcttttctcgaccagtatatgaacgccccttctactacctacggctactcgtcccagaagatggctccctcgatgtcgtccccgtaccgagcgcccttccagatcttccatcagcaggaccagcagctttccgcttccacccacccagccgcct

SEQ ID NO: 165 - DNA, 2009 bp, Xanthophyllomyces dendrorhous
tcaatccctaccaccaggtctgtcagcagcaggagcagcacgccttccgtcctgccccacccgctgcccatacgttgcctcacccaagcttctccttccaagctcaggtccagaagcagcagcaggcccaacaggagcgtgcgctggctacggctgctgccgctgccgctcaagaggcgagtagagtcaccgcccctccttctggtgaatctagtcggccggctttagctccccaggtggcgtcgtcccttccgttggctccgttcctggccgatgcggtctggtcgctactgaagagctcgatcaagtccgagaccgtggagaacgctggattcgaaggtggacgagagagatctcgaggtcggaagcgatccgaacgaggtgctagagattactggaatgatgaatcgtattcaacgttcgtcccctttccttctttctctatcttttcctcttattcaggagtgctcatttcccatttccttatatcaacctctccacctatgctcagtgatgccaatggatactggatccagacctctttgaacactcctcctcagatgactttggacgactttgaggcttccccgatcccactctcttatcgaacgaacccttacaacctcggtttgagcgcgcctgattcatttgtccggttcattcaccaaaccctcgcccagaccttgatctctccgaccggtgtcatccttgccctctggtatctcaccaaggcccctcttcacgagggcggcggtgaggaaggtcatttgtttagacaagagctccagacgttctcggattacaacggtgaggaggtcgccaagcgagtgtttaccctcggtctccactgggccaacatgtgtctcgatgacgagacgttcaccgctcgatcttggtcggacgtcactcggatccctatccaagagatcaaccgactcggtctccttgcactctccaccatgggtttcaatattcacatcgatgttcctgagtgggccacttggatcgagactgtgtacctctcggcgaatgacgagatcgctagaaaagccctgttcgacatctcggacgccttggccaagagcgaggcagccagggagagcgaatcccagcgggagcagtggcagattgcccaattgcagcagcagcagcaacaggctgccgaggagcagaggcaacgagatatccaggaacaaatggatcgagagagagagtgcaacgagcaattacgcttggaagctcttcgagtctcgcaggccgctgccatttcgatcaactgggcccactcttcatccacctccggtcccgccccagttgctcccaagcaggatgcctggaacatgttcgactcaaacacataccaccaggaccgacagaccatgcagtatcagcagcagcagcagcagcagcagcagcatcttccaacctcgtcgacctcccagattatcggccgagctcaacaacatgagcttcgccaggtccgtcgacatgagccttacgctcggtcccagggtcctgctaccggtcaccaagccgagcaggcctacccggtctcatttactagacacaccgcctcggccccagtgctgggagccggctgtgcgcctttgcagcaccaggctacctttgggaacgttggcaatggctcgttcggtttcggtacgggcatgcctcagttgatgcgaatgcctaccgcgacttgttggtagagaactggtgtaccggatattctttctcatcacttccattccatcttttctttttcttcacttcttcttttcaaaaagagaaaataccaaaaatatttccttcttttcctcttcttccttttccgttacattctagctgcctatccgtagctatctcttttcttccatttatgctcctaccccttttataattgttgtctctcaaatctccttttgcgcaaccgttcaaatatttcatattcgtcttctctttttgcatttggcaatacttcatctgtcatttgcgctcttcttttaatc

SEQ ID NO: 166 - DNA, 17373 bp, Xanthophyllomyces dendrorhous
  misc_feature (15833)..(15842): n is a, c, g, or t
caaaatcctttttacccattacccaaaaaaagttatggtttttttcccctttctgtcgtcgccgtcgttttcattggcaaatcttttctccttttcgagaggtgggaggtgggctttcttaaggagtcaaactctttcttctttatgatccctcctctttctctcttccttccccctttctatgttcccatcgttgttttttttgctccttggcctttttttgtttccccttatccgggtcatgttcgaacccttgtgcccgatcctcggccggttccttttgtcctctataacatcctttgcattggtctcctacgtatatttctgatatccttgaaggattcatcagtttagtttcagctttgacgtagactagctcagttccttagtctctgttcttttctcctttgctgtaaacattcctaacgtagttttatctttgggtgctgattgtggaggacgagaacccttattgagatgtgttccgaaccccagaaagcgatcgcacgagaacaatggaggctactgaagagacaacgaaaagttgtgcatgacttacgctcgtttatggtccgagcgctataccgatgttgataggtctcaacggtgatcaatggctgccggtgaaaaatcacactcagcatcaccgaatgaaatcaggtttgttaagaaagaaagttcggcaagcttggaggaaccaaggagagtttgtttgagcgttagatgggttcgtatagtttgtagtgaagtcagatggtctctacatgattggatgtcttgtgccacgatagcacgtctgtctgctcttatccaaccgagagatgaacgggtataagcacatatctggtgtccatttctttcatgtttccatctcgttcttatcgacgaatacaaacaaacgaatcaagagagaagaataggaagtataacaggaaacagaaagaaagaaagttcaaagctagatccgtcgaagaagtttctgataggaaaaaggaacaccttgatcgtgtgagagagaatgtgattctgatagttggaatataacttgaatttttttaaagagcagaaaaaaaggctcgaacgagaaggaagagtcagacgaaaaacgaaaggggtcgaagacaatgacagtgtaaagaaaaagaaagaagagaaagcaggatgggagtgtccagattgatgaatagatgaggaaaaaatcaagataaaaaagagacagaaaagaaggaggaccggaggaagagaacatatgttttctacgggtatatctgttgatgagctacaaggcggcgaatcgtgttcctttccccatcaagggagtaaagaaagtgagaatcaaggtttgaacgtagccgcttacgattcaactgagagagataaacaattaagagcaagaaaaaaaaaggggttgactccctcttcctcacaagcgatatggagagaactacgagagataggacaagatggagaattgagtgcatcggaagtaaagtaaagaaagaaagaagagaaggacccaaatagttaaaaagacaaaggtagagaaaaagaaagaaagagaaggagcaactagaatccggtactggactctctgaggacaggcccagagatgtccgtagcgtttactggtcttctctgaactcttcctacccctctcatccctggactggcgaacctatctaggaatgggttttcatttctcccctgctgctgctgctgtcctatgattccatgaaagtcagcatcagccatgtacgttagggtatcaacgaatggattcccacgttgttccatcactggctgctgctgttgttgctgaaggatcgatgggtgagctcgctgctgagcctcgaatgaggtaggactcgtaggcgaatgagagccgatcccagcaagcgcccggtataagctcgagaaccttgaagaagcagggccgatagaatgagagtcagcagatgaagacatggcgtctgggtgggtatgtcgctcattgcttggtggaccgaaagcgtagaatgaagagggccgagcatcagcgtcgaaagagccagatcggccgtgaccatccgcatgatgagctcgctcagacatcaacgttaccgcggccaaatttcgaccagtcaatgtagggttcatgctcattctccggtgaatatccgctttggcgttccttcgcattttcttgtaaatgtaaaatacgagcaacaaccagagactgcctccgacggagacggtaactccaatgatgatatctcgcttggttgtgttgctggaggatgaatcagtcgagctagatccactgctggacgcggctgcagcagaaacgagcgggtaggcggtattggctaagtcagcgatttgactaaggatcccagtctggttgtagaacgcagagttggacgccttcatctgagactgaagatgcccagaagaagaaggaaggaaacgaaaacgaagtagacacgtcagcacaagtctctgactgatctgagcacttcatctgcaaaagtcacaacagtagaactcttactgaaagatcgtcgaccatgtcggaaggaatcgttccctgccagagcgtcaacgcttcactggccgttccactcacactggctggttggcttgtttgttgtaaagaaaatgacgagtaagaagaaggttattatgaaaagcaagcataaaccaagacatgctcaaacagagaggagtacagactcactaggctttcaaagcgaatgtagagactgcagtgtcgttcagacctaaactgtcttgaacgaggacagggacataatagatcaactgagcaatcaggtccgtgttgttcgctacatccacccaggtcagacttcctccaaacaagatctcaacaagggtttggtcggctgagatgtcactactagaaaaagtggtctcatccccagatgtcgtcgattgggatgttgtagaggcaggcagaatgacggacggcaggtcggttggcaaaggcgagacggtgactgccttggatgtactagatgcactcagagagctcgagtccattagagcggacgagctagacttgatgatcgagctcgcttgaatcgacgtggtcttgacggtaggaacggcgagtccagtttgactgggaaggaagatgtcgttggttgtggatgagctggcagaggatgaaacagccatggaactaaaattaatgctgtcgctggcactagcactggcgctggtggacggagtgtgtgagtttgccgttgaactcgattgggaagactcttttgaggaatgagacccagaaagggatgcactcgatggctgggcagaggcataactgctgaaggatccgctagaatggtaaaccgaggatgtagtatcattcccaacactggcagtcaacgtagcagtcgcaaaaggatcggacgctgtgctggtgaccgagacatttaggccggcaacagatgtgctggaaacaacattggacgtatatatatttgacgcgacagaggaggaaacggaggctgcgctgtatctagagtctgtggtggtagaaactgaagtggagcttgagacggaagacacggcagagtcggaagaggagggagcggagaaagtcatcgaagcagttgaagaagaccaagatgctgaagccgtggcagtggacgaggtcgccgaggtgatgacagaggacgaagttgccaaaccggtggatgaggtggagtcggatccaagctttgctgttgacgtcgacgttgacgtcggcgtaaagatggaggtagagaccgagatactggacacactacctgcagagacagtcgccttagaagtttctgctagtgctacagatgctgaactagaggagacaggggtagccgaactaaaggtcacatgctgtgtggacgaagagtccgccacagtcatagaagtcgtagccgtcgaagtgacggacaatgatggtgacagtgatgaagctgaagttgacagcgacgaggacgagaacaaagcagccacagaggcttctgattcgctggacgtggctggggttggagcagaagtctggatggaagacgacacgctggacacactaggcgcgaaagacgacccgacgtacacagaggtcgtagtggaggcctggagagttgcctgtacggcggttgatacactagacacagaggactgctcaacaggcacagacgtcggcgaggcgagagtgacaggtatagatgagtctaccccaatggacgaaatggtcgagacaacggccgacgaggtagatatgatcgattcagatactgctgtcgaggaagctgaagcgagagaagaaggactttcgatcgtgctcgtaggaatatcactcgaagtcatagtgaccgtatcggcatacgctgatgtagaggttgaatctatgggggatgatgaggctagggccgcagtacttctagaggaagtaatccagacggacgagcttaagagtacttggctagaagtgggggtgagcgtggcagttgcggtggtcgttgctggttcggtactagtgccggtataggggatgatggtgacagtggtgacgtctgtagaagcgatcgagctgacatcggaagtggtggtcgcaacgatggatgagctggatgacaaaaacgacgtataggcagactctgttgtagtggtgggagagggggtgtatgctgaggcgctgccggttgagaaggtcgatgcaacgttcacagacgatacgctcgcgaccgaagcgacactatagtcactcacactcgctacagatgcagtgctataggtgctcacgctagcgacggactcgatgctgtaagatcgtgcgacggtttctataatctcagctgtgtgagagatggaaataagggaaagccaaaaatggcaacgcaagaattaacaccgcgccggggttattttgattagcatttgaggatacattctgaagtataattggtcgaaaacatgatacgaagaagggaaagggcacgaaaaacaaggaagaacactaaccgaggtcgatttcactcgatatctcggtagcctcgctgaaggaggattgcctcttcgctaaacgggcatgtttttgggtgcccgctcggtgggagaggtgagagagcgcagcgctttctgccgagacgagtgttgacgtattggcgagccatgaggctagaacgatgagccatggaagcggtcttgtcaggtttaagcgcatcatagagtggcgaggaggaacagagaaggaagagaaagagtataaaaagaaagaaaggaccggccagcggaggaggaagacaggaaagaaagaaacgtcagaggaacttgactgtgggtgtgtaggagatactgcgatggagggagagaagaagagaagggagttgaagatggaggaagaagagaaagaaagagaggaaggagaggatccagagaaagatcaagagggaagggacaggaaggaaaggagaagatgctctctatcggattgaccgtcttgagaaaagaacgagagtgagggaatgaaggccagaaggtgaacgagagtaggaagagggacaaccgacaacaattacgacagttacgcgtcagttacacttgagtttcacgctacccccctagaagtttcagggaacatcgtctgttatccgcagcaaagaaagtctagaacctatggaaagaggctcagggcgccgagcccagaacgtctgccgaaagaaatcgaccagaacagtaagctagtgaggttagagtacaatgggtgactgggtgggtgtacgagtgtgttgagtgattctacgagtcattcaatcaccccagttgacgaacgagcaagcttgtacactcaaatcagatggaataagttgcagcagatcaagaagatcttctcaagctcatggcagagaactgctataggcagaaagcatgtgcgatcaatttcagtgtgaacacatacgcacacacatattaagcagatccattcacatctcaaaaactctcttctgtttccttgttccattatccataccttcaaaccctccctcccgtcgttccactgcgtacttttttttttacgactctactcctttaccatacctaccctgagccactgtttatcgcttctgcatcttcatctgctgctttcgttgctgcttcttcttctccttctcctccaactgaaggtcgaggaaagcaaagcgagcatgtcagcaatatacctttctttttcttccaaacacccatcagtcagggaacctacctttgctttctccttcgggctaagcttttccctctcctccttctttttctttcgcctatcctcctcctccttttccttcttgctcagcccgccgtttgcgtccttctcctcttcctcccgctcctttgcccacacgccctccaaccctttccacgcgtctactcgcgtccgcttgaactttcggctgatttccggctgaatcttcaacacgttcggcccggatcccaccaacgagtctgccaggttgcataatacgtgtaagtaagacgccgccaaggcttcattcacaggcaaccgtaacgtcaacgtaattgtcagaggcgccgggtggttcagcgcgtattttggccacttcaatggaaggtcagagatctgaagagaatatagtttcccaatatcagtctcggtcgaccgttctatacctctatatacacatatacatccagaacagagagatacatacaatcaaactcttgaacacctttcgagcctccgaatcgatcaatagctcgaccaaaccagatcccgcattctgcccgagaggagacagaagttgagccgtcacgtccgggtgctcgctcatgatcgccaggtcggaaggcacaaatgatgaatccgaagcaagtcgaggaaacgtctggttgccaccgattcattgtttagttccttagttcagaacatctatgtctttcttttctctctcttcacatttccaagatttacaaccagatgaagagaagggggaggagaaaggggaaggtactcacaagatcccatcggccggttctagcccaattgagcccgtacttttccaacaccgcccaagtcccacttttcaacccgttaccattcgatgcatcatctcctttgacaaagacacccttctcaacttctttctttgccgctgcaagcttacttccagggggtaacagcgttagcatcagacggacttcgtcttccgggaccgggcactgaacctcccactgtctgaacaggaagaacttccagagcaatcggaacggatctggtcgaggaatcaaagagagtgtagtgtgaagagaaagtacgtttcgccggccggatgcgtacgtcaaaaacgttgaggtcccgtcggcgatcagcggatcggctgcatttggagcaggagagagtagagtgaactgagattgaatcgtcgagagactagtttgatacctatgagcatgtacattttcgtatgtatatatgaaaggagacagacgaggcataagtgacgagcgcgaggcataggattgagacgatttgcagaagaacgaaatagacgaaccatctcttggcgattgttctgttagtatttcgtccgacaatgtaccatacgaaatatccaaatacggctagcaacaaatacggctcataagggaacagagaaggtctgcacggatttaggcagagaaccagaagacagatgtcagctcaaggaagaaagccaggcaagaaaaagcggaaaagagatgtagatcgtgcgatctctacaggtgagatatccagagatggaagaatgaaaaaaaaagcattcgaacctaaaaacaagattcttccagatgacaaactgagtaccggagaaattgtctgattcccttggctggcgtagctgaccgggagcaatggcatgacccaacgaagaaaaaaactggctcatcacgaatgatgaacttaatggagtagtgggggtggatcgttgttgatatccaagaatcggcaatggaaaagctactatcaaaaagtaacaagtcgattacacaaattcttcccaaaattcatgattgtataaaaattaagccgactctcttacattctttcttccttccctcattacaacccaatccacactttcattccgaccgatatgcctccctcttcagaagcttcaggctcaagatctgacagcgtctctggatcagaaatcggctctcagcgagggtcctcctcgtccccccaaccggaggatgagatccccgccacctttgcctccctaggcgtcaactcactcttgtgcgaggcctgtgatactctcaacttcaaagcaccaacctcgattcagaaagaagccatcccgtacgctctccaaggaagggacgtcatcggacttgctcaaactggttccggaaaaacagcggcgttcactatcccaattttgcaaaaattatgggaagagaacgcgggtacaccgtactttgcctgtatcattgcgcccactcggtgagtttctgttcgatgttatgtatcagtacgatcgtagtccgacgattccaagcaagacaagactgactgttttgaccattgctacatatgtacctctttgcttacttcatcagtgagttggcgtatcagatttctcagcaggttcaggcacttggcgcgcccatgcaggtccgctcccaggtcctcgtcggagggatggacagcattgaacaagctcgggcgttgaagggagagacaggaggtggtaagccccatgtgattgtatgtactcctggaagattggtcgatcacttggagaacaccaatgggttctcgttgaagaacttgcagttcttggtaagctaccatccctactttccttgccttggctacaccgagacgttcgattgactaatcgcttcttaaataggttttggatgaagccgatagattgttggatctggattttggaccgatcttggataagatcctaaagatcattcctaaagagcgcaacacctatctattctcggccactatgacatctaaagtcgccaagctacaacgtgcatcattgaataacccggtgcgcgtggaggtctctaccaagtaagtttcaacctttgtttttttttctgtattggcttttgtgcaaaacgttttcttgtttctctcagaggtatagaaaccttgtcgttcaagttctaacgttgtcttcaaaccaggtattctactgtgtcaaccctccttcagcactatgttctctgtccttacccaaaaaaggacgcccacctaatttatcttgccaatgaactatctgccaattcgattatcattttcacctcaacagtccatgacgcccagcggttatcgattgttcttcgattgcttggtttccctgctattccccttcacggacaactcagccagagtgctcgattgggcgcgctcaacaagttcaagagtggaggaaggagtattcttgtagcaactgatgtggcttcgcgtggtctcgatataccttgtacgttccgtttggttctgtcactacatgcaccttctcattcaatctcagctatccgttactcatcgaactcttctttggtcaatcttgtcattcaattccctctctatagcggttgatatagttattaattactcgatgccttcgaattcaaaggactatatccaccgggttggtcgaaccgctcgagctggtcgatctgggaaatctatttcgataattacacaatatgatgtggaaattcttcagcgaatcgaaggtgttattgccaagaagatgaccgagtttcccatggatgccgaagctgtcggtctacttgaggagcgagttggtgaggctaccagggtggcgacgcttgaaatgaaagatctaggaggaagcaagaggaaacgaatcggggaggatgaagggggcaatggagggggcgagggcagaggagacaatggaggaaagagaggtcgtggtggcggaagaggtcggggcggtggaagaggcagaggtggcggtagaggccggggcagcagcagatagaaatgttctttcatcatctagctattcttttcatgtctacatcgagaattaggcatgacatacagatttgaaaatatatcgcatatacgcttcaaaggccagtacaaagaaagggtagcatctcttactctaattcttcgatctcatcaactcgaacatcatagactcatccctattgtacatcccatgttttaaatgaacacaactcaacgtcacgattcaatcgctcgaaggtagtataagttagaaggaagacatttgaaggtagataaagacagcctaaaataatttagctgcctatttgcagtgagattgattacgtgttgatggtcgtttattcacttcccccacacttttcttcccgctcgctctacgatcatcgacgttcttccaccatcaatcgtctccgcactttactcaacatacctacaacttctttctctccatctaattggtctgtgatcagcttctactgttgatggaccctcatgatcagcccataactggtagacgaattcgtccgcgtgctcaatcgtcgaccatgatgtcagcacatgataacccttgccaatcgtcaatcgtcaccaccctggaggatcgcgatagtaaaagaaggaaggtcgaagatctgggttctcgatcagttgagtctggtttgactaaaagcctgtcaaacgaagatacaagcatggtctcgtcgctcgcgactcaagatgaacaggcagaggtatcgggtagtcacaacgaaacacagatagacttgaacatcccctcatcgtcgagtgtacctcagtcgacattttccacatcggcctcttcccttgatgtgagttctcagcgaccgttccttcgcctgtcatgttcgaatcctactacagctgctgatgtataatatatctttaggtcaattcatcaccatctgccgacactgttgcctcgtcgtcaggaacaaatacttcctctcccactcatgtctctccttccgaggacccactattctctcctagagcccgagcacaggagctcatatcgagagtctctttggaactggagcgagataatgcccatttccctcggatggactatgtcgatccttctcccatctcatcactcttccacgatatgccttccacgacaccacgcgcagaacttccatctgaaccttcaagggatcaacaggaagcctccatcgaagtctctccatcagcaccgctatcatccgaagaaccccaacgaccctctgtccaaaatcctcagccttcaccgtcacccattcagcgtatacctactggaaccagtctgatagtaagccaaattcatatctgtactcaaccacaggtattcttgagaagagcatactcactttcagcttaattttccctctggcttggccatcaggttcaaggactcgttcaaacagtcgcccgtcctcggctgaatgattcttctcaccgtcgcgcacgtccctttgcgagtacacatggtagtcgttcgtttcacaaccgttcgacgggtcatgggtctggacaagttccagttttcgggactcgcagatttgctgatgggaacgccgctggcgttgctcaacaaaacgaagtcatcgaagacgatgatgatggtatgcctagtttcgaagaacaagcttcattgatagggggtcttttgagtatggctaccacagccacggctcgtgtaagtctatacatttttctactctttgatatactttataagtcattgagttgtcgagttgacaaccgatatggaacttgaatgcgaactgaactaccaatcactttgacagtcacttctgtccacaacttcagaccttaacgccattccctctactaccatatcgtcttctgtctccgacccagtcagaacagacacacccgacgaaccatctcatcaacctcttgctcagcctttcaacagactaccttctcgctttgcctccattgttgacggtattcaacggagactcaatgctcttcggaatgttacctccaatatttcatctccaagacctcacattgtaactccacagtcttccaatacggacacgcctcaaacatcgagcagtgtttctcctcaagaggaaggtatcgaaagggtccttcggcgattcatgactgaagcctttgagcgtcgagacagaaccagagagtcgggttcggctcgtgctcaatctccttcgttggacgggagatcagaagcagtcgaaggacacgataccaacgcagcttccgttgaatcagaccagagattgttagaaaccttcctgtcaggtctgcaaccaagcctaatggaagctttgatggagttcaataacagttcgtctgaggaagagactgtagaaaacagaatggaagcgaccgaaggtgaaatgagtacacttgcagctgaggaacacatggatataggaggaatcgagtctactacaagcagctcttcaaatcgagcagatgctcctgaatcggaatcgcaggtaaatgggggacggagaatgaattggatgagagttcatcggttttcggtcggtctttcttgagacaacttctgcttatcatctgtcatactcactctagtgtcttcatgacttcctttatacgatatcagcctcgattagcacctgcttcgcgcggcaacggaccttcgccagatggtgcaagcaattcttctacctctgtgccaaatcccatccctatggatgaaagagtcaatgtaacggaaccttcacacgtatctgggtccagtccaaccaaccagggcagcaacgtctctggcaggagcagtgtgttgaatgttccgggagaaagaactgttgttcctcttatcatgggtaggtgtatcgccatctccctgatcttcgtatatgttgtgttactgatacatctctattcaaattttgaaatgagcagttggtgtccgctccgttcgagcacaagatattccaggtatcttcgcttccactaccgctaatgaagaccagctctcagctactgccgctgtcagtcgaaggactacagccctaaattccaactctgattcagttcgaccaaatcgtcaagaacttcgttccgatcgttcaagaagttcaattgatacatcagccaacccaactagaaatcggcccagcccttatgcctcgtctctgcccgctcgcttgcttcgtggtagaagttcacaaacaacgtctgtctctagaacactcgagagtgatgaggatgctgttatgagtggtggatcctcggactctcggtctgcccactcccacacaaggtcaagtggatttggtttacttaggcgggctttaagtggcattattggaaatggacctgcttctccactcagttcgcctcaaagcattgttacatcgactgaatcattaccgagagcaactctagccaggacgtcagctactacgagcgactcctctgcagatacgaccgactccgccgacgaaacggaaatcaggagaagtaacagcttcatcttgtgggtaattggaggcttgtatgctcctgatcaccctatcttgactgcacctggattatttacagggcacttggatcatgatgatttgtggtatgcctgtcaattaaaataagctatatgagtgcccactatcgaggtgtccttcaagaggctaatccagagttttactattgtggtggcaaaactttccaaatcgatgttgctaattaggactcttgccgaacttttaggccaggcgaaacctcccaccgcaacggcgaccgagatcaatagctcaggccttactatcgtccatggctcagaaattgctggtctagtcaaacggggccatatacatttgaataccagcgatcgatgcgccgtctgtcttgaggactatgatgatgagattgagtgtcgaattatgggttgcagtgagtctagagacatcgtctaacaagcttcaagcactggtacttaacattgatgatctactgttgcactagaacacgtgtttcataaagtcggtcgattctttagtttcttttttgcgtagattgtcgagcctcatagtgcatcttgttgttgcttttgttcaggaatgtatcgacagatggcttaatatcggtagaaatgcctgcccagcttgtcggactaaggttagctccgtgtttattcttgttgttgcttgtcatcattcctcctgatgatgtttttatattgacctctttctaatttattgcaacgtgtagggagtgaaggtgaaggctgacgagcaagaatcgtcggtcataaattcgtctgctccggaagacacgatctcactcaatgctcaagcagatacaaattcatgaatcttgatagatttattcacctttgttgcgaagaacttcatttgctccaggctcaaggatgtaagttttagaactggtcatatacacagtttacgatctctctgaacttcgtcttgattagccttctgcaattcctttctcgtttcgtctcgatatttgatgctgtatcttcctccagttgcactgagctttccagcacatcattccccctcacagttgatttcaaaaatgttccccttagtctgggcatttctcaatattccatttcttatcagtctaatcctcggtttttgttgattatttattagtttgatgcatgtactttcatgcaagtcatgatcgacagtgtgatttagcacccttctttacgccagcgcatccagcattcaagtgcttgccaggcagagtcgagcactccatcgttaaaagcagtagaagaaggcgacaaccacagataaaatacagcgccgtcctgactctgatcaacaggccagatcgtgtccggctgagagtatacgatacagatcaagagtgaagatcattcgttgtcgatcagcaaaagctcgctgaagaacagaggtagtaagaggaacaaagctgagtctctcagcacagccggctagccacacagtcaaccacaaagcgggtcaatcgtcaggaccactgcccgatggcggcgatgatgtgaacaagaagcaaccactgcgatcatggcgagagccagacggcccgacaagtggagcgccgtcgacctgaacgaatcccctcagctcaggtgggtggccgagaaagagcggcagaacagaggagcatggtctcagcgcgcgttgcgcgatcaagtgggagaaggaacgtgatgatagtgttctgaatggcggtttggcttgacggttgaagctctggagccagcgtgctgtatgacaagccgcggctttgatgagctgtttcttacttttctggatgaccgagtgagataagaaaacacggagaaggacattgtgtgacgagcgagatctcatactcaagagaagaaggggaagggggccggtagactagggaagcctatatgcgtttcgccgtgtccatcctcgaaagcttcaatgaagtatgatccatcgttgattctggatgatgctatggttgtttatcaccgctttcttctgcctcacacgcaggcaaccaagcatcagttccggtgtcggttgacgactctgctttcctttctgcttgttcttttctttcctctttgcttctactctctagcatatatcatggtccgttggttgctgggagctggacgcttttctaccaagcggagcaggtaagatcaaggcgcagacgtctttattacactcaaactcccaggagggagcaaatcattggatgtagcgtaagggcagcgagaaaggactgtggacgtaagattgaaaaataagaggggcttcatacggtgagagtagaagaaaggatggctcgttannnnnnnnnntcttctgcctcacacgcaggcaaccaagcatcagttccggtgtcggttgacgactctgctttcctttctgcttgttcttttctttcctctttgcttctactctctagcatatatcatggtccgttggttgctgggagctggacgcttttctaccaagcggagcaggtaagatcaaggcgcagacgtctttattacactcaaactcccaggagggagcaaatcattggatgtagcgtaagggcagcgagaaaggactgtggacgtaagattgaaaaataagaggggcttcatacggtgagagtagaagaaaggatggctcgttacaaaaagggtggaatgaatgtcgagaaaggcaggtggagagagtgatacatagaggataagccttatgaaggaggaggaggaggaagaggaatcggaagaagaagaagacaaaacaaggaggacaacagcgaggagagtacaagatgagaggagatgcgtctggaaacaagtcggaacaaagtcacaaacaactttcaagagattcatgatttacctgcgggatagaacgaatttgttctaattgcagaacacaagttagtcatcgatgaacagaaacagaagtagaaagaaggaacacaggaaagatagatgtagaccaacctcagcaaataaacagtttatgtgaatgctaaggaaaggaaaagaaaagaagagaaaagataagaaaagaagagaaaagaaagtgtcgagcgcagatatatgagtacgaacgcagagcaaaacacaaagcagaacacaaatgccaagatgagaagaaagataaacgggaagacgtgaaaatggatgatgagaaggaaggtaaagagagtgaggccaaaaggacaccaagactaacagccacgatggaaagagatgtctgccaagatgtcggctggaacagaccgagtcaaacatgaagcagcatgattccaacataaagaatcatccttcgcttttttcctggcaaacactgttcgttccaacccctacagaaccaatcatctctgtttctttcagcaaatattggagtcactcgagtgatcagatgaaacccgttcctggcgctgcagtcctttgtaaagacttattaaaatacttcaaacactcgttgttcacgtacttctggctagacaatcaggacagcggaacgatcatgcaattctgcaagtaagaatgatgaggatgattgtaggaaactatgagagttgaagagattccaagcttgagggagaaaagagaatgttagctagtgcactatcaagtatatatacctttcgagatatcaagccaaggaaacacaaggaaacacaagcaagagtgaagagataccaggaaagagcaaagatgtaccaagggagagttaagcaataccaagagagagtaaggaaggccaacgagctacatggtctcgatgctgagtctgttgcaagaatcggtctacgttgcgcaaggtcaccctgcgggttaaaccgggtcaactcatgacattatcatctatgtacctaag

SEQ ID NO: 167 - DNA, 464 bp, Xanthophyllomyces dendrorhous
acatactcgagtgtcattgccatcgctttgccctgtgtgtctttcggtgcgtttgcgatgatgcttcttctgagatgtttgccttctgcagatctgggaagggcccgaagaagagtaaagctccacgactggtcactcgtgttgcattcacatttgtatttgcatgtgcgttcgcattcgcatccgcatctgattctgagatgtctgatgtcattcacaatgtccacaaactgatccagctgtgcacgaaggtcatgagtataatcaatctctatcgagtccaagcgctcatacaatagaaactcgcccgagaccccttccagtcgatgaacagacctcagaacgtccaggcactcggccgatgtccggcatggcttcagcctcttagcctccgcgatgtcgatcttggtgtgtatccagcccatgactgtgtcgtcgtcttggtcccatgcatcctgcgctct

SEQ ID NO: 168 - DNA, 1166 bp, Xanthophyllomyces dendrorhous
ccagaccgagctgtccgaacagaacagagtcaatcggtccagtagtcaagggtgtcccatccacagttgttgctaaccgcggggacgaaaggatgtcaatcttggcagggaggctggaggctagcttatggttgatgatgttcagttgagagccggagtcgaggagtacacgaacggaggtctgagtgttgcctgtctgaagtgtacctaagaggatgattcgcttctcagagtttggctcggatgaacggagtggcagagatgttagttcgacatgcttgtctcgcatgccgtcagggcaagaataatcagacacatgtataggaatcaactgttgaaagtgatctgctgaacgggtcacaggagaagtagagatggaggctaagagaggagatacaggggatatagatgtgatggaagactcaacgcgagatttgcttgagaaaacggagtcagtcggattgttccgagagcgagaagtgtccgtatgagaagaaacatgagaaggagaacaaaaggaagtaaacttaggagactgtgcctgagcgattggctcggaccggttgaacgatacgtggacgctagagtgaggatgacccagcagaggacgacctactgagtcctgactttttccgagtcctcatccatctcatccgtatcgaggtagatggttagttctgccatctgagacggttgatcgttctgccggaggagagggcaggcgttgcgatggtgggtggcatcgccacagtataggcataggttctcccgtcgtcgtcgttgcttttcagctgcagaaagagggactttgatgatgttgggtcgacttacccctgcagctgttctggaaacaggatggaatgtgggagctcttccgtaagtgttctgtttggcggccggtgtctcgacgacatcaatgtccatcgaagatggcccatcatctacaggtctagcaacaaatccacaagacgcaggaacaaacggacgagagtaagaagtaggctgtcgaggcatactgtttgtgtaataaggatatcaatccttctgttggtatctggtcttttcggacagtagattgtccactttgattgcacttgctcgcaactcttccagagtggtcgactcctcgaatctagatagttcggccttccccgcattcttcaggc

SEQ ID NO: 169 - DNA, 713 bp, Xanthophyllomyces dendrorhous
ctcgacagaacttataatctcaatgacatgcatgcaagtttgagggcggaagggcccggcaaccgtttgttgcgacttggttggttgtagagttttcagatgaggatgtatgtggaaagctcaggctctcgaggatttaggaagatgccaaagtcataggcataggtgtaatgatagataggacgaagatgacagaatccaaacttgagagaaaagagaaaagagggaaagaactatggggaaagggaaagcgacgaagtacttgtatctccccgtcgctcggcatgtatgcaagccagaagggatgcaagacggaagggatgcaagacggaagggatgcaagacggaagggatgcaagacggaaaggatgcatgcaggtatcgaagtgtgaaaaatacagagggtaataaatacgtattgttgagatggtatgcagatacatacaagcatatactactcggtctgatccctgacagtaagatatactactcggtcagacccctgacattcttggtttacttatgtttatttttctgtttgtgttttgggtgatgccgttgtttccgtcgtatcttttacttcttttgttggtttcgtgaattctgatggctttatttattttgcttgtgttgtttgttttgcttccagtacttcttcgatctccggtgatccttctcgttctagcgcaaccgcatacatctggtgttccttc

SEQ ID NO: 170 - DNA, 42880 bp, Xanthophyllomyces dendrorhous
tggtctgagtattggtctgatcatctgggtgagatactcacccatgtatccatctatccgcccatctgtctatctatcttcatctgacagcatcctccttccgctcttctgtctctctctactcctctttctgctgcctctgctttatctatgtcctctgcgtgctctatctcctctctccgctcgttgattcatcttccctatcgctcgtccaaccgatgatcgcttgccatgtcattcctttctgcaagagttgtggcatacttggggtcagaaacggacacatcatcacgattgactatggagacagtgtgtggagccagagaaagcagaacaacccaaaagaaataaactacaagtatcagactacaggaaacaaactacacgagacaggagaagacatccctaggcaaaggaaaggcaaagaagaaggggaacagaaagaaggagaggaagcgaaggaaagcaaaggaaagcaaagggcacaagagggatcacaacgaaaaaagatagagaaagacaaagagaagactggaatgacaaacggcagcacacaaggaccgatcgtcccgtccattctgtttgccgtgtttgtcctgcccgatcatctccagacatggccgcttagcgatcgctagcttggctcgcccgcagaaagctgctcgtcgtcgatgaacgccactccttgtctccggccgatctgacatccacacaggtcgagcctgtcgaacggaagcagaaagctctgcagagaggaaacgctctgaccggacgaccttggctgcatccttgatccggggagacgccagtttggcaagagaaggagcagaccggtctaggtcatcgacaagctcgaccttgatcgttggtatcgtcggccgtcgagtctgtttgccaaacagaggcgagctagcaggtgaggagtcagaacgctcgacaggtggagcagacagaacggacggagcaggcgggctagacagagcagatccagaaagcttggctgaagataggtcaaagcggcgcttcgcaggacgaacgtccgaccgcctcttctcctcgtcactaccatcatcgtcattgtcgtctttgtcatcatctatcactcttcgtcgcttaggtgactcgaagggaggccggggcacttggagtcgctctcgatcgaccatctccgtccagctcgctgatcagacaaaaaatcaccagaaaaacatcagtcacaggcacaacaagggcgagcaagaagcccgggtgagaagacaggagaaaggctcgacagaagagagacacccacaagaagccgcctgaggcaaaggcttcggtatcgccgatgggttcagaaacgcatccatctcggcatccgtcatcggctccatcccccgcagctcgaagcgctgtatgggcgtgaggctcttgagatacgacctctctcgacactctgtcgtcgtcgtcggtagtctgtgcgaacaacagaaggatggaagaacagaaggatggaagaacggaagaacggaagaaccataccacgtcagtctagaaacaaacatctgacaaactgaaggcgtaagcagccaaatgcatcactgacctcatagcctcggcctttctgacccttccagccctcttgacgggctgaggccggtcgccctgcctggctcgactggccacgttggcccgttcattctgcgatgcagcgataagaaagtcagtcgacacgaccgagacaagccatgacaaacaaggacggcaggcgaaagaagagacgaactatgggcaagccctcgacaggatatctcttcgccggccggagcggcttagcggcgggagcagttcggctaacgggtgtaggcgatgcgggcatgggctgcgtgtccgaggaaaagtgcggagcatccaatgaggcgtaagaggggctgaacgcgtgtaaagcatatgatggggaagacgcataggagatgctggaagtgtcagaagtgctggaagcgtcggaggcgccggacgtatcagaggtgtcgagaacgttggagacggaagaggcaggagggagggaaagactgtaacgagaggacgcaaggctgaggctcatcgcggtttgtatgtaatgctagtatccggactgcgtcgaacggtagtgggacaggaaatgagacaagtgcaccaggtggtgtgcgagcagggtgcaggtgagtgtgagtgtgcaaggggggtgtgggcgggtgggcgtaggtggatgacgcgtagcgggttgtaatcggtcgatggagtgttcgtggttgatggtcggaagagtgttgcaacacaaaacagcgcagtaccttttgtactctggacggacaagtgtccagacagataagcgggctgacaaacaggtatgcggctcggtatataggtcgatgtgcaagtagagcacttacagaacacccggcctgatcacttcatcgacgcgacaagataggcagacagatcaataggtcgaaaggtcggcaggtcattcgctaggtaaaggactggcttggtacaagaagaagtcgagacatctgacatgaacagagcgaaagatcacaagagcgggaccagctagcgcgtcctgagggcgagcgactgtccggacggccagctagccaccagactaggcatgaccaccctggccatcggtcgtctatcactgagaagcaagtcaaagaacagagtggaagatggcatgacacacagagatcaaacagagaacagagaaaagagaacagagaggacaggggaaacggggaaagaaaagaaatggagtaatcgaggaaaacaaaggggaaaagggactgcgttctgtacgaccaggaatggcaaacctgcgtatcgtacctggccaagctcacaccacacagctcggcggccgacgtccgggtacaagacactcgatcgcttgctcgtccgttcgctcactcggtctgtgtctgagctctcttcgtcaggcagactggtagatggacatgtgtggttgttggcagcagcgggagcaggaacagaacgaacgagcagtcggatcgagacatggtcagcttgtgcacaagagaaagcagaggcaaggcagtagaacacatgaacatccagaggagaaagccatcagagtgtcagagtatcagagcaccagagtgtcagagtgctagagcatcaaggtatcagaccgtcgggaggtcaaggtggacagggatgtcagtccagtcagcgacgctgcactctggaacaaccgaatgagccgccgacaagagatacagccgacaagatctttgcccatccgtcgcaagcgagtcagttactagccatggtcggtacatgcagaatcacaggtactatcacaggagcctctacgggcactgatgctggtattgacaccagcacgggcactgggtaagtgaaacggagatggaggcttgccggactcgacgaccggatgtagtccagctagtgaccgcgactagggatgcgatcgtagttacgacgactgtgcctttcaactgtaaccctaatcatagtccggtcgtacatcgagtatcaggccatccacaccacgagacgacgactcatctagagaactatcaaatggcatgccatctcgcgaaggcaacctcgcttgaccttgaaaaaccttgtctgttaggtcttgtctttaccctggcatatattatatgtctcttttagatgaatgcgcaattgatataagaaagaaattcacccggcgatatacatttagacaaaagttcagcatttgaaaatgttgtcaggagcagcaaattaaatgatacagaacacgtagatgtacaggctgtaggccttgtgaaagattacactgtatggtgacaatttgcgtgaggagagagattctacggacacgatgggaagaaagcgaaatgataggaacggcgcagaaagccttgaacgcgcgaccaactagttcgtcttggcaataaggagagatggccaaaagaaaacttattcgtgaatttgtatacaacaatgataccacaggatcagcatgagagtagaaaatacatgtcaaagcgcagcacgagcccaaaaagcagaatgaaaggctggaaaaatccaaaagagggatgaacacggtgtagaaagaagatcgccgtcttattcgatgcgaaccattgctacacctagctcaacatcacctatctcacgcaagcctccctcatcctcatcctcattcaattcgctttcctgctctacggctcgagctgaaatcaattgagtatcctccggcattttgatgaaaaccgacaagtatatagttcgcgaaggtaggtctgctaatactcgatcctgaacggacaagacacttattgatgaatccactggtgccgctacacccgtaggattggtgagttcgggtgtcggatgtattgagaacagattctgaagaacagatggcatttgtgagggaatcagaacaggtactggccgtttaaaaggaggtttgattggctctataggaataaagagagaaataggctgaagagagtccccaactaaggtcaggactgataagattatcggtataggatattaagacaacctcgatgattaaagacgtacacataagtgtttccagtcgaaagcggctgtattgatcctcatgttcagctggtcttctccggtggtgacctcccataagtcaggtgttctgcccaatgatatctcttttgttgcccttcgcctttgattaggtacgaagagtgtgttgggcatgccaagaaagctccgactatcgagtccatcggatgtgaggccagaactgttcagtaggtttgctatcgctcgaagctgagcactattggcacgttgaatctcttcacgatcctctgtagagatgttaagagataacagatggctcctaagacggcgccgatacatataatttctggtcaagaaacctgttgagatcaggagggacgcaagcgaggagatttaggagccggtcgaatgatgaggcgacatcgcaagagaggggctgtgtaaagacccggaactacacggagtacaaaccagcacataataaaagaaggatggccacggtggccacgaaagtctattgacaaccacaggaactgggggtcagtcactgctacaattggtctatggcccggatatgaacaaatcgaggagttgggataagataagagatggagggtcagcaagggcagggttgaaacctacgaaaacatagagggtggctgaaggcctgctcgggctacttgaaacagtagtagctattggagataaggtagaagtagacatgcttcgttctccaaaaagttgaagagtgtcgaaggtcaaagacggaaggaggagagacgaagttgatggtagggcataactggaaagcatcgctcgggatccttgtaggattcttaaaacgatgtaatgcgggtcttattcgcctttccttgttttccaagccctaaatagcaaaattgatcttcgcacttccctcatccatcatctaacaatgtctagatcttttggtcagaagactcttatttcgttatgaccatacgatatagaaacgacctgaccatcatatattaatttatctgatcacaatagtctttgttaccggaaacgccaacaaactaaaggaggttcaagtgggtgtgtttgttgccggatgttcactcttctttgtctaggcgtttctgaccacccaggcatgagcggttcgttgtattcctaggcgatcctttcggtggatgccaatgggattcaggtatcctccgaagctctagatgatcttccagagattcaaggcacaaccgttcaggttgccacagcaaaatgcactgcggccgctcttcaggtcagtttatcggactcaacccaatatttcccagcatactttttcgtttgtctcttgagattgagatttctatgacgactgatatatctgatttctgtagattgaaaaagcttgtgtgaccgaggacacagcgttagccttcactgctctcaatgggctccctggcccatatatcaaagacttcatggaagctgtcggtcatgaaggtaagtatctggacacaacgtattttctgggttacagatgactatagattatgatgatgaatgtgctggttaattacttgcaggactgaacgcgattctcgctggatttgaggataagtctgcgactgcaatctgcacatttgcctactgccctgggcctggacaagcgccactcatctttgagggaaggactgaaggaaagattgtgcctgctcggggtgcaaaggtctttgggtaagcaattagcaattttgaatactctttgtggtcatacaggaagttgcatctctccggatgtttgttgtttataaaacgaaaggaaacgaccacctggcttgagttctgactatagcattctggttgcttcatttccttcgtatattcagatgggacgcagtctttcagccggacggattttttgagacgtacgttcaacatcttactcgtcctttctctctcgacgccgtaaaggtatcgattcctgctcgtttttcgtttgacatttgcgcgagggatatttctacaaaacaaagtattaacgacacactgttccaaatctctgtattctcacacttttgaaccctcttcgtacaatagatacgctgagatggatcccaagaccaagaacactatctctcatcgataccgagcattggcgaaactaaaggatcatcttaacagcctaccagagagctcatagatctagatcatgtatggaatcgagagaacctgacagattgtgtttgaacattcttaatacaaaatgcccgatgtgcatttaatagatttctcatattcacgttctcctcttggctatcgcttgcattggatgtgatatatgatcctttctcaagcctatcaacagttctctctttgttgcatgacctctcaaacgaccctcataagaatggttgagccgagatatgtactttgtatttctttcaaagaaattccccaataatgttgaagaggccgtacatcttcattgatatatccttgatctcttcaacactattaacgtacccaccactccgactgtgatcccacctaaaacaggtaatgtccctcctaaccaacttgtcagtcgtttcccggttttccagctcttggctctcaacttgccccatgttgagtcgccatacgccacgtcttcccaagctcttatttccccagactcccagccacctagtacagcgcgcatcatcggctcatccatctctgccagctcgtccagactccaagtatcacacacgtcaatcatccagctcattcgacgtgctcccagcggaccacccacaccaggcgcaatctttcttaattccgctcgaagctggccggtcttcaagattgcattctcgatgttgtcaggtaaagataactcgattcgttgccgaatagcggcagctaaccggggtcctcgaccggatgtagagaccataatttgaaggggacctttccgaatctgagagccaaagtaaaaatcacacttttggttgacgaaggaaagagaatttgagatcgattaacaattgcaaatattgattcatgagaggaaatcggaaagaagagacttacctgagggggaacatcggccacatttaccggtattcgaagctttctagataacgaacagatccttgttgataatgggttatcgtcgatggctgtcaagatcatgtcgaaccctatcaatcgggttcgcaatcaatagttttggatagaatatacagaactaattaacatcatgaccatcgttcctacatctgccgaggaagctctcagaaacaaaaagatatattacctgttaagaactcttcctgctcatcctcttctgcccattctctctcaagataacagtcaactaaaccttcgacgtctactcgatgtttgacttcgtccgttaaaccttccctaggtgcaatcaatgtcaccttagctcctgcctctaggaggtagtataaacgaccggtggcgactaccccacctccaacaaggagaactcttcgaccatttagtctccaagctgaaagaattgggtaaatatgatgtcagtattgagcaatccatccacatatcaaagatgaactgaatgatgaacctagcatgaaggaagtgcccggcacgatcggaggaatctcagttttactatcagacatactcaggtcagtcgggtacaaaagtttcaagattcttatgtgacttgtatggcgagccttttaagatgttgaaaagggtgaaagagaaacgactgaggatcaaagattagggatgaatgacgaaataagatatggctctgaaagaaaagatgatcgatcgatatatttcgttaaccctaacaattgcaactgaaacattctaatcagtatcgatgtatggatgtatttcaaccaaatttaacctcaatcaaaaggtagataaaactagatttatgaacaaatagatgacatatgtatatcaggaatctatcctgtgttctttatatctttggcactctgcctttcagcctggccttctcctcctttcgttcctttttttcctccttcttctcggagtttctcttcagcaaacccatcatcgtcgtgttcttcctcgctagatctctcttaccaatccgatctctatccatagaagcagcgcctaccgtcaagcttgtctgtccaccggacgaagggttcagatcgaatccgtcataccgactaggatccccccattctttcggttgacccatcacagccatcgtcggaatcgcaggaggctgccaatcgtcttgttttgaagtgttggtcgaagtgtgtgcagtgacctcaggcatggagtcctgcgaaggcctgtatggcctctcggtcgactcggtcgatggccgataagactgagatgtaggcagtgattggtaggttcgaggcggggaagaagtttgaggtgcatacaggcgctgcagggtggctttgctctgtgtctcgatataagatatatcttctgccaccgcctatagatttagtcaagacagaaccgccattatatgagtactatgaaacggtcgaccaagttcaagaagaaataagattacaaacgaacgttcagctggatcttgtagccgaggattctgccatccgtctgatctagatgaagaatgacttgatcgatggcctccatcaccttgctgaccccatcgtccgcttcaagcaaggaatgaatgctggcctatagatgtggaaaatggagtatatcaacggacgtgaagaaaaagaagagaaggaaagcggacaaagatctttaaacctctccagagtagttgcttacctcttctaaagcttgcagttctgctcctagtcgtttctccatctccccttttccatctcttcctatcctgccactgtccgccctctcgcccgccgattcccactcccagccgtccaacaactcttctacattagcgagaattacatcttcctcctcgtcattttcctcttcttgttctccgatcagacccccacctgtaagcggcgtgagaggatcgttggacagaagtagcgcacgcgagaacgatgtctcggtcttgagcttgaaaggttgcggcggctttgctcgcgcagagccgttcggtatagaggccatgtttgttgagacagagagagcagcaggcgaggctggtcgtagggacgtctggggtggtcgaagaagagagggtggataatttggctccaaaacagaagatccatttgatgtgatgacggatgccggtgagacttgtggctgactcaggctaatgatcggaggggccacgaaggtttcgacaggcggaacacttgaagatttgaccgaagctggaatttgggtgacaggaacaggtgatagattggtggtctcggcagaggttggcaaatgcgtggatgcagggtggtcaggcctggaggcgaaatgagagctcgaggacagttgatctgcctggtgtgataatacagctaattcgaattgagcagaatctgctcttagagtagttccttcgccaggcttctttcggatctgccgcgctctggaagagtccgtgttggcggattcaatatcgtcgctgggggagagaataatctcccgaccaagccccgaaggctgccgagcaaggtcttcacggactgagggttgcgaagaggtagacgtccgatgtggtagttgtgaggaggatgaggaggttgaacgagagggtgtgggccggactggatgattagcagaagaaggaaaaggcacgtttatactggctggttctacttatcgcaaatcgcgtactttatcaagtcgagctctgagatgggtgtttccaactaggccaagagcacgtaccttgttctccttctttaagcattttcaaatctatgcctatcaacctgggcattcgaccattcatgtattggcggaagatcttgatgctggcctcgatgaaagcagcctgttcagcctcccgctcggttgcgtaccggtaggtcttggacatcgtcaatgaaaagtgtaagggctagaaggatgggccatggagatgagcgagtcagcttacatccgcatctgtatcagagaggcagagaagaagagaagggccaagagagaacgaccgacatctacaacttcaattgtccgtaaagattctagaccccaagttttccccttcgagaatgttccgttggaatttctttttgctttgtgaatgaagcatttttcggactgagtagaagctgttttaacgtcgaggttgctgtcaatagacggtctcgccttcatgtggatgtacagttcactagaggttatactagcagatactcttgaggtagagctggagacgaaaagaaacatactggataagatcagatacctggacttgacacctccttcatctgtctcaaatatctttacgtgtgacacatatgtttcattcaagttatcgcctgagagtcctgacgtggttgaggttgatgatgatgcgtgggaagagaaaagggaggcgatgatatctgtcttcgtggacgggcgagagtcgtgagggattggttgaggtcgtgacatcggctcctgaaaggggtgagtaaaagctgatgcagctgctgaatgagagcttgagagcacagggagacgaaggtaactctcaagggggtctgtctgataaaatcaatgtagacggtatatccgtcgagcgagaacatggacgagatgagagggaggcgagagatgatcatagttacgtaatgatcgcgttagagaacgagcctgatgaatttgagcgcgtacagacttcaggcctcaaagttgatagataactcatcaaactattatgctgctttacgtgtccaactacacatctcggaggcgctgtgtcggtggcgtcagcaagctgtcaacatgatgctagatacagagcacctttaaggagagtaatcataaatcggccgtacatccgcgcgtgcgtcgacgttcggtcgcaagctcattgccgtctcccgagtcggcctggtgtgatacacgatcggatatgcggagccgatcgatacggcgaacatggagaaagagaaggagaaggagatgcattactcagaacggaaatcggagacttcagacggaatattgtggtcatcagccccatcaacggtgtatcaaggccgaaggcccggagtacgaagaaggtgaaaacggcaagattgataatgtcaatcaaaactcaatgagcgaaatatattggagtaagagcggttgattggaaaacgcggaagcttcctcaacagtgggactatagaacaagatagcttagtgacctactacgttgacgaatataactactagggctttttttttttcgggggtccaggtcgatcggcagtttggcagataccaactgacctgggtcaactgattggtcggcatctactgcgcacggcgttaccacacgttcggcatagatgatcaaaattcattacatcaaacggatcacggcggccgtaggggttctctgtatgttccccctcaaaccgtactgcgcgtcggcacacataactaggctcagaactgagcctgacagagccttgccgagactgacagagaaaacatgaccgatcagacggcctgcgcgtggggagaagacaaaacagacagacgaaagaggaaagcagacgacagaggacaaaaaaagacagataggacaggcaagaaaaaaaaaagccagtcgggacagtcccagaccaataaatataccccccttcttttcctctttggttccatttcttttcccccttttcttttcctcacgacttcccttcctcccctctctccatcatcctccctagtcaaaaaagccgtgtgtggagtcgctctctcatacttagcagacagctattgctttttaggacctttctttctctttcctttccgtccctccgaccacctatctctttccgtttttttactctcgagtcttgttaaacaagttttctggctatccgcataccctccaaaatatattaaacacaaccccttaatcacataattcatcatggacgagaagaagcacacccctgatgctgtccctagtaagtattttatagttacagaaagcagcatcgttcccttgagcgcatctcttttgcgttgaaggatttttcttcgtccctctcagaattctgccgagctaaattctatttttaccacttgttttttttttctctcaaagctgaggctcccgtcgaggagaagaagaagcgagagtacaaggatatggagcacaagagcgatggagacaagcacgctctcgttgatctcaacaccgttcgtcctttgtttttttcttcttggctctatcggatctaaacggcctgtcgtcattggctattgaggggggctccacgtactaaacccgagtctgttttccgtacacgtttacagattcaattcactgctgacgatctttacgacaaggataaggtcgatattgagcatgtcgttatggaggaggtcttccagcttcttcagtacgttttcttctcgtcccgattgctcttctaccgtcttaacgccttttcgtctcgttctgttttcacttcaggtgcgatgagaacggtttaacttcggccgaagctgctcgacgaattgagatcttcggtcctaacaagttggctgagaccagcgagaagtacgttacgtctttccaacatatcactcgttccattgcatcggtgattaatcccatctattctacctaattttttgtagtgccttcctccagttcctttctttcatgtggaaccccttgtcctgggtcatggaaggagccgcgcttgtcgctattgccctgtccaacggaggaggacgacctccggattggcaggatttcgtcggtattgttttgttgctcctcgtaagtttcatctttttcttgaaagccttcaatttaaaagagcgagaaactcacgttgtcttacacagatcaactcgactatcggtttcgtcgaggagaggaatgctggtaacgctgttaaagctctcatggaatctcttgctcccaaggccaaggccaagcgagatggcacgtgggccgagattgaggttagtctttcccttattttgtcagtgaccacgatcacaaggctgatctcttgaacccttatctttcacagtcttctgagttggttcctggagatcttgtttcgttcaagcatggagacgtctgcccctctgattgccgattggtcgacgctgtggatgtttccatggatcaggctgccttgaccggagagtctctccctgtcgggaagaacctcggtgatgagtgcttctctggatctacctgtaagcagggagaggccgagggtatcgttatttccactggacccaacaccttcttcggtcgagctgccactcttgtcggagctgagaacgattccactggtcacttgcaagccgtccttgccaagatcggactcttctgcatggtttccatcggtatctttgtcctcctcgagatccttatcctgtacgccgatttccgatactcttaccgagatggtctcgacaacatccttgtgctcttgatcggaggtatccccattgccatgcccaccgtgttgtccgttaccatggccgttggagctcagcagctcgccaagcacaaggctatcgtcacccgaatcaccgccatcgaagagttggccggagttactatcctctgctctgacaagaccggaacgcttaccaccaacaagctcacgatcgatatgaacgaagtcaagacttacggacctttcaacgctgaggaggttatgatgcttgccgcttacgcttcccgagtcgagaacatggacgctatcgatggatgtgttgtcggatgcaacggaggacctgaggcttcccgaaagggtatggagcttttggacttcattcctttcaaccctgttgacaagcgaactgctgccacttacgtcgagaccgccaccggaaacatccgacgagctactaagggaatgaccggtattatcattgatatttgctcccgaaacaagacttccgagatggaggatcagctcgagaaagacgtcgaggagttcgcccgacgaggtctccgagctcttgccgtcgcccacgaggatgttcttgacaactcccgagagaagggtgctcctggaaacggattcgagcttattggacttcttgctatcttcgatccccctcgagacgacaccaagcagaccatcgatgacgctcaggctcttggtgtcaaggtaaagatggttaccggtgatcagctcgccattgctaaggagaccggtcgacgacttggtcttggagaccacatgtaccctgccaaaatcctcaaggatggaccacccgctggtggcaagtacgccacccttgatgagatgatcatggatgccgatggattcgccggagtgttccctgagcacaagttcgacatcgtcaagcgaatccagggccttggacacctctgtgccatgactggagatggagccaacgacgcacctgctctttctcgagctaacgtcggaatcgccgtcgagggagctaccgatgccgcccgaggagctgctgatatcgtcttgaccgagcctggactctccaccattgttcacgctatccgaggatcccgaattattttccagcgaatgcgaaactacgccatctacgcctgtgctgtaacgatccgaatcgttgttggatttgccgtgcttgccttcgcctggaagttcaacttccctcccttcatggttcttatcattgccatcctgaacgacggaacgatcatgaccctttccctggaccgagtgttgccctccatgactcccgatcactgggacttggccgaaatcttctcctacgccgttgcctacggactctaccttaccctttccaccgttgttctcttcatcgttatgcacgacaccaacttcttcgaagacaggttcggtgttgaggccatcaaggaggtcaacgataagaggggtcacatggttatctacttgcaggttgccatcatctctcaggctttgatctttgtcactcgatctcatggatggtctttcatggagcgaccctcggttgccctcatgcttgccttctgcctcgcccagctcatctcttccatcatcgccgccttcggagattggggtttcaccaacgttcagtcgatctctggcggttgggtcggaatcgtttgggtttggaacatcgtttggtacttccctatggaccttgtcaagttcgccatgaagtacaccgtcatcgcttggttgcgaaagcgatctgctgccaaggccgaggccattgctcagctggagaacggagctcctatgcagcgaaccgtctcccgacacgagtctttgtactccaaccgaacgtcgttccttaacaagaccgctcgacgagtcggactcggaaactccaaggtttctatgtctgctgccgagcagcagcgattcggatcggctcaggccgctcagactggtgccactttggcccgaaacccttccagggtttaaagctttggtttctccgttcctcttacctctgcttttcattcccaatcctattagactttgtttcaatcccttcgtctgtttcgtcaaccataatttgtcactattcaacctatctcgttgtatattgacttttcttcttccgctatcccttgttcctctgcccccctgcatttcccgtttgtttctactttcgtgatgatagacggcaacttattttcgagctttgttcctgttctttctctttttctttttataacaactcaagcgtcacataaggctaccccccatcgcccccttctgtcttcagaacccaaagcttgcactcgccatgtacactgagggatccgacccacgctcctttataaactcgttctatttaaacctcgctgtgcacaacaaattaaaaagggaaacattttggtgcctcttttgaacatataggagaaaaactgctcgagcagaccgactgagtagggctaggtaactacttgtagaaagcgctctttacatacacacatgatgtcaggtatactgaatcgactagagttttgcggacgcaatactccagattgatcaatccgaccgtccatcaaaactgagccgcagagaactactaagcagttcgatcatcttcattcaaagctgcccatccggggtcaaaacactttgcctatcatcggcactcacggtccggaaggctgacgaataatccatgcttaataattctcttgtcaatttgttgtaaccttcatcttatctatatttccttcccgcgtggatcagttctccgaagtaagagaatcattcgacgtggttgtgaagagaacatgattgcacataagcaaaggcagtaatctcattctgttcaagcattcttttcttcctcttcttcttcttcttcttcttgatcctttgaagttttcaacatctctcgtgagaagaacacgcgtccttaagtcactcgtaggtctctttacttcatgtctttgtgaccggaacgcgtctccaagctcagagagatgttatcattgacaaaacatatcaatctcatacaatcaatctttcgtcccgatagatatagttggaaacgttcaatcgaaacacgagagctcaaccaatatcttctacagaaaacaagacatctcgtgaagagattgtgatctctgttcttgaaccagaagattacctcaaaacaagtgccgctctgctctcggcgtacaccgatccggacggagcagaaaatccgcatggcttgttccctacacatctcagactggaaccagaaacttttattcgttcgatatctcttctcttcctctcttcattcttgcattggcttcacccagactcaataaatttgttaccaaatatgatcatatactgtcgatattcacaggtcttttagccaatttatacgcccagcggatcccctcatcagtaacccggtacaaggcttgtctggcttccgacccaactgtgcctgtcggtttggcaatctggcaggccgtcaaggatcggacgagtacagctggtgaaccgacggctgaagaacaacaagaggaggccttggtcgaggcgtggaataaagaaagacggacagaattagatgccgaatttgagcgtgctgtggaccgcgtgttctacaagaatatgaaagaagcttatcattcagtcaaaaaagacgttctccaaggaagaaggtgttactacttggttcgtcctggggcatttcctgtagattttttttaaaaaagaaaaaaacctagacagggtcgtggcttggtagcgacagcaatctcaacgcggactgagattgttgtctgagatcaaacacattctgttttcttgactctgacgctattttgttcgacctggtcataggaacatttgtatgtacatcgggaccatcaacgcaagggaattggcaaagcacttttagagattggaatgcgcaaagcggatgaggaaggggtcgagtgttatctggaggcatctctcacggtccattcttgttttggcctcctctttcaacgacgacaacaacagatggaataattaaggctggcgttttctctttttggatcgtacaggggcaaccactatacgaacgtaatggatttgaaatcaaggagtgggtggagattaaggagggagatgactatgtgacaaggctgccagctatgatgcgcgctccgtccaaaatgtcttgagctagcgtagttaagagacaatgaacaatgactttccttatcgacatatctaaacattgaacagcactattgtccaaccaaacctccctatcgctcaagagtacttcgaatcagcaaggccaaagtagagaaattcgaaataaaattctttcaagtttctatggtcgttagaaaagttcctttggaagacctctctgacaagcttctaagcaatacccaactcgtaccgtttccagcccaacaccgttcgacctgtccatctccatcgaacttccacttcgcttcctgaccctctttcaaattggactgatcgtcttttatgctctggtcgcttttaatgctctggtcgtaactaaaaccgctggatgatgcaggccacacaagtattggcgtaggccggtcttcggtgtgcccatcacctagattgccgtgctcgttccagccccaaccccatatctcggcccgtccggtttgggaagatctatgtaaactgagaagatgggctgaaccggcatacaaagactccacaggtggactcgatggcgggaagacaatgatagtagacatctcactcgctggccctaattgtccgtttcgagattgaccccatccatgaatctcggaacaaggacgcgcttcgatagattccgaggtgataggagaaggacgatcaacaaggatgaagatagcggaccatgtggattgaacttgcttgacacggcctagcatcgagatgctgggaggtggttgaagggtcggccctccctgaaacacaagctctgaacgatcggaagcagtgagatagattgtatgactcataccggaagatacagcttggatttcaagttgagtaggcagacagagaggcgttggatgatcgacggtgttggacaggaggttgtctgatgacaaggctgatttcactcgatgtcgtcctttagatatcttggaagagggagtgacaggagcattggctggacgggagattggtcctagttggccctgtcgagcgcctccccatccaagaactctttgtgttcgcattccggaccgtcggtcgacgaggacaagaacgacacttcgtgggctcgaagaaatcatttggatgtcttcgtccggaaaaatgtgccacgcatgactcccacatgcagaggaatctgttccgttgcccaacacggaaacatcattggagcccatcgctaggagaagtgctcgaggtgctgaattaggggctgatactgaagaacaagagagaacagtaaacgcgatgaatgttgtattgaatgatgaggcgatcaaggtgggtttgtatcgacctaggtcaaccgaagcgtccgaacaactgtaggtaggaagattgagcttccgaaacccctggcttgggatcaatgtaggcacagggagaccaagttggccttggtctgaactgccagttccccaaacttcattagtcagttgaccagttgcatctcggatagacagaagcgcaacagtatgattggctccgagggctaagtctagaacatgctctgtgcctcgtggtgggaacacagacagtaaagaagaggcatcgtgacaagctcgaaaaacatgagtatcatgaggaaacgagtggcctagctgaccgccggcgttagaccctgtggatatcaaagtgagcaccctaaaagatgttagtaagataagattaaagaaaggcaaaaaaataaagtcagctgaataaaagaagaaacacttcatgatgggttcatgatgggttcacatttgatttcttacatgaagtgtatgagctgaaaaaaaaattaagcgctggataaaggacgaccgttgaaggatagctgagaaaagatcaagatggagatggttgatctgaggaaggaaaagagcgataatcaatcggcatcagacctcaacattgactcgatagatatttcggtgagtctcaaaacggttagcgtacccagccataagcggggttgaatggcaacgaaagccgaaacgatgatatcacagatgatatgagaaggtgaatctcacagaatatgataggatgaggctgctagaaaagaaattaaagcagctcttttctcaatcattaggattttggtggcttttgactacaaaagtagaataattcttgaattaaaagtcgacgagggcatcttctgattttctctcttttttcctttctgtctttatcgctcgctcactgctttctttcaaccacactacaagctcacgtacacattatacttcgttagcacagatggctgaatctatcttgcaaaagtctaaagacaacgtcatcaaagctctctctcaggctaccgagtcactcggagtcggaaccagtcagtccagtctttcctatctctctttttggtccctctctccacgagcgggatatcacagaataggcaagaaaaagaaacttcatcactgaaattctttcgactacttttcgaaccctttctcgtttgttcaactagctgtctatgtagatgaaaccttggatgcctcgtccctttcaacgaccccaacaggaaccaaagaggctccttatcctagctcggtcgccgccttcctcgctcacggtctcgaggcctcgatcatcgtcaagaaggccaagcttccctccgcgcccgccgatgagcctgctccggactacgagcccattaccggatctggattgaagaaagccaagaagttgtatgagcaggagaagaagaagttggagaaggctgaggctgggaaagagaaggcggccaaggaggcagctgaaaataggttgagagaggaaaagaagcgagaggaggccaagtccatcgtcttgaaggaggatgagtcgttggaaaaagctatcagggtgagttttctttacgtttgcttcactccttatcgttgtcctaagcaagacgagatctagatctctcgagtataaaaaagatgtcgactattgtaagggaaaatatcgtatctgatttttttccccttttgaatggtgtagagcaaggttttttctttgactgagaagcgagacaagcgcgtccgagttttcggatgggttcatcgattgcgacagcagaaggacctcaccttcatcacccttcgagacgggtctggtctccttcaatgtgtcctctctggagatcttgtcagtcagcttccattttttatgattggggatatggccactaatgagtttatgcgcattctcgcgatcaatttagtgcaaaaccctagatgccttggatctcaacttggaggcttctgtcgagattgtgggtaccgtcagactcgttccagagggagctcatgctcccggtggtcatgagctcatcgccgactggtggcgggttatcggagctgctcctggtggagaggaggccttctccaacaagattaccgccgtacgttatcctctccttatccattttctgtcggtacatcttcatccgccgatatagaactcaaagaccttatgttatacaaaccttcaggacgcgtctcctgatgtgattgctgatcaacgacatctcgctctccgaggagaaactgcatcatccgtgctcaaagttcgagcatccgtcctttcttcgttccgaaaggccttcgaatccaaggatatcctcgaggtcaccccaccatgcatggtgcaaacttctgtcgagggtggttcatcgcttttcgtgatcgattactacggtaccgaggcttacctcactcagtctagccagctctatcttgagacctgcttgccatcgctcggtgatgtttattgtattcaggagtccttccgagctgaaaacaggtcagttctccctcactagcgattggcatcaaatgcaagtgattactgagttgttctggtcgttgaattcctcaagtcatacacgacggcatctttccgagtacacccatttggaggctgagcttgctttcatcacttttgatgatttgatggatcatatcgaggatatggttagtcttttctctctacagaatagttttctttcttcgcacaaggctcattctaacgacttcaaaactttctttattataccgatggcaatgtttgcagatttgcaaggtcatcgaccaggttcttgccgatccgatcacatctcagttaattcagactctcaacccatccttcaaggcacctcagcgacctttcacccgactcgactaccgacaggccatcgcttacctacaggagaacgagattttgtgcgaggatgaggagacccatgagatgcgacctcaccgaattggagatgatatcgccgaggccgccgagcgaaagatgaccgatcagatgggtgtcccggtgttcttgaccaggttcccgaaggagattaaagcattctacatgaagctctgccctggagatgaagcctacaccgaaagttgcgacttgctgatgcccggtgtcggggagattgttggtgagttggctgagacgcactttcctattgctacagttgaaagattcctgttgggactgagctatgatttcacttaccgtccgaaacacatcaggtggttccatgcgtatcaccgagatcgctgagcttctagctggctacaagcgagagggtattgatccttctccttactactggtaagctctctctacattctaaggagaaacagtctgagatagattgaaaatcttacggtgtctacatttgacctcttccaggttcactgatcagcgaaagtacggaacttgcgagcacggaggatatggattgggagttgagcgattcctagcctggatgaccggccgatggaccgtcaggtctgttatgtttcttctctgttgcctttattttcgtctgactgatagtcttgctttgtgtgaatgccggatacatctagggagtgctcgctttatgctcgataccctggtcgatgcaagccttagataaagagtttgataagaaaattcctggagcttccgagtttatctttccatttttccttgtctgatttctgggtaatccttcttgttcttattggagatgagtggatacatggggtttccttttcaatggttcgaggatcaagcaacgatgatgacaagagatgagtggaaaggagcaaagaactccaaacgaaaaagaaaaaatgctttacaaatcaactgtttcataaatcgaactcatcatcactctcgactgtggcctttctggagcctcctttaggcaccctcttggtgccagtcccgatacctcctccgtttctgatttttgatgaagctgcacgactcgagccaaacccttcatcttcgtcttcttcgtcctcgtcttcgtccgacctggcgcttgaccgaggcgggtttgatgagttggcttcggaagggatgtgagtggagagaatgccgtgcatcgaaattaacaggttctgaatatctgtcggataaagtatgagaaagaaatgagaagagaatgatggatgagatacaagagcgagtcggtaacttctttgagtaagaagatacaaaacggaacaacgaacctcgttcattgcctttccccaaaatgccctctcctcccacaatctgccctgtaacctctccttttcgatagacaatcaacgtcggaagaagtctatcaggatagttctcgatacacttgtttccgattatcgagataaattttgtccgagggtatctaggagcgagattttgtaggactttggagagtctctcgcacacaggctcgctatttgtacatcgtgggccgtcacgccgttttgagaaagtcagaaatcataccaccaggtgatgcaaacagagggaagaaacggaatagagctttggacagaaaactaaaaggaaggagccgtgcacgtacccgtccttgtaaagcaagcataccactcccgttcctacgccttttccttctccctcgtcgtcctcgtcgtcaccaaattcttcatcgaccttgcttccttcggtgacctctttgctccagctctcgcgaccgattggataaaccctaccgtaccgagcctttttctcctccttgcgcatctccccaagtcgtttccggcggtaggattcgaacagtcgttcttcgtccgaatccggtgtctcctcggccatcgtctgcaacgttgcgggatttgcgagcgagagcgttgtgtgaagaagttcggcatctgtcggcatgaactccgagggcgacctttgaaaagagaggcagggagacagaggaccaagaggaaaggagatcaagaaacgtgtatacagtttgagaagcagatcaattttctagttgacatggagaattctattcaaggaagaagagtgcacacttacggaggatcgggagcaggaccatcgatgataccctgtgcgatcaaagcatctcgactaagaggggtatgggacatcaacaaaaaacggcgatagaggagcagattacgagtgagcttctgaagcggctaacataaacccagaataaagaaaacaacatctcaatagacctacaattcggagtcttcgttgagattgaccatctttgtttgctggttgctgtttgtatgttacttatctgctggaacgctggacgagctgatgttgaagaggtcacaggctgcgagtcccgtgatcgggctgtgcgtcttcgaggtaacactctgtctacacccatcctctaaatctagattcactcgtttgatactcgagtggatcatcgtcttgagatcagacatcatgtaaggggagaccattgaagcgcaagagatactgctctgttttctaaacagatcaatcgaaactaagcacgaagaggcagatgaacaaggacactgccgggtcttaaatcgtaaccaggtggtttatcgaatttgaactttctactaatctccacatttcttcccttcaaacttatcctttagcttctacagcttctgtgtcttctttctttcttctcatctttccactaccgatctacttgttcattcacgctcgtgtataaccggcactcggaccgacaatgcagtatttactctccagatctttcaggccatcggtgccgctgtctggccgaacgttccattctacgccgaccgtgctcagagctcggtacattcccaataacaaccagaccactcgaacgaccgcttcggctcgtagacaatacattgccaagatgcgtcgatcggatcaagatggaaacctctacccaggctcgaatcttcaagagaaaccttctcgcttcctcaatgcgggtcctcaaacttggcctccgccaaaatcgtattcatccaaccgtgcccggacgaccgctcccctcgctctgaaaggcgtccattcaaccagggacgtttcttctgcagatgatctttctcgcctcacctctgcgccgtccgcccgtaaacatcaacctggaaagtgggaacgtactctgtttgacgaaaagtctggtatggctgtcaagcctgggcagccgtatgcccagagcctacaagacaacggtttcaagaagaagaggaactttcaggggggtaagtctggaggtgcacccccctggatgaaggaccggacgatcgagggtggcccaaagtccagacgaacagtggacgatcgggagaccagagcaaaccggactagagtgtttgataaagatctcgaacagggtgcatacgacagtccgaagacactgtctcagtatctggtctctcctgagaacacgatcacggccgaagaagctgtcaacaaggttgccatggcaccggggtcaattggaaaaaatacggtggtgtggaattccttattaacacttatgttcaagcgcagggtggcttggcccagagtaaaccaaatatactcgatggtcagtagatgtatacgaaaatccgcgttgtctctttaccttttcttaatacctaaaaccatcttccagaatgactaaaacgtacactgttctaaaacagatgctcgccaagggagttcaaccgtcagatcgaacgtacacaattctcctctcaaacctgcccgaagcgccgaatcagtctacgctggtactccgggccgcgaacgatattcatcaatcatttatcacggcgagcacaaaagaccctgatggtttccctccctcgcctgctccgacgaatgcgcttctcaagttctacagatcttccaagcgatttgatctgatgcagcttacattcgaccgaatgccacatagggggccagcttcacccaatgctattacttgggtcataatgttttcctctctgtcatttcagcccgcaaagattgaactcgctcgagggctatggtgtatgctagtcagccgggtgattgaacctgcgcagactcgggctcgggtcgaggctgaagggacgtttgatgcggaggagaataccgggcgagggactgaactgaacgcgaccggtatggatgctaagctacttgctaccatttgtcaggtattcaccgaaagcaagagcgatccggatattcgacttgcgtatgctatctatcgtgcatactctcatttcccggggacgctctcagaattggatgatgggcttgcgcctccatcagagattccagtacctatgcttcattcacctagagaccgagtccctctgtcggagagcacattagaagctggtttcaacctgctttcaaagctcggcaaacccaagatgatcctcgatgcgtacctcaagctatctcgaacagagtcaatcaagtccagaacgatgttgaatgcgacacatcttcactatgcccttcaagcagccggtcaggttgactcgatagataagctgtgggactctgtaaaggcccaccgaggatggctgccaagtgtgatccctacaatattgacgtgggtgcactggatggaggcatgcgcggctaagaagttctttgatggcgcagctcgaggcctcaaagagatgacgggtttgaggatcgatttagatacccccatgtccgttcttgaatccacaaagtcgttcgcagctttgtcggtgattgatccgtcagtgggaaagaagccattcggagaccaggcaaattccaggttgttgaatgctttcctgagcactgctttagacgttcatgccgataaggacttgcctatggaagagagagaggatactctccgacgggcgcttcggatgacattatcccttcaccaagtgacatcgttggaagtcgtcgattttactccaacccctctcgagaccaagacgccttcattctcgcactccgactttctgaataaaggcctagtcgacgggacctctcttacgatcaaggcgaaggagacggccaaaagccgaatgaggctgtcgaaggcaaacgcagcacaaataactttccatcaacagtttctcgcccgactcatggttgcgcttgatcagggtctctcatccgactgggcatctcagcgagaaagagaggattatggttggatgaagaaacaggttgaggctcgatggcgatcgcagccagtgttggtcttagggatacctattcaaaaaggacagatacttccgaccagcctgcctaagggattgggagacgacgaagggaacctaacgaaggatgaatcgaatggcgtggaaggagcggaaggagtggaaggaatagaaaaggtgttgacggaggtatcagatttggaagaccactccgttgactctgatagggtcaacaatcaagcgctgtaaaggcaaaagattgatcgatcagattaaaatagtagttatctggccggatcaaggagacatcaagaactgtccagtgcagttgtatcataaataagatgaataataagaaattagtacgacacgttgtaaggcaaagaacagcaaacagaaatatctgatgctgaaattcctggccatatcgtcgagactttctagattcgaattcgattacatcgagataaaatgagatctgagaccgtttctgcgggcctctgtaaggaatactctgatatcggaatggttcccgctatttctgaacgtttgatccattggatggacatgctgtgtacgatgatcattcttctattcataatacttgatgagcacatccactcactcccattacaaatttttacagaaattacggttttagttcagcccttttcataatttgactaaacaccggcagagcggcggaacatataagacaattcatccaaaccatcaaacttttgggtaatcttccctcttctctttcaccctcctaccctggatacaaaacatctgtgcttcttagatatgtccgttgccccaccagaattggcgatcccagaggcgactggtcatgctcaacctggtagctcgtggaagaaagtccccttcttccgaagtgttcagtttgcggtaagttgaacttgacttagctcttcatccattgtggttctttctcttgactttctccctggccaatactgataatcgactagaacggattggtgtctatccgtttatcaggtcctcatcgcaggtctcgtcactttttccgcaccaggaatgtttgatgcgttcgtcatcgattccgtcaactgcactttgctatttcaaatataggcagctaattgaatattgacaatttcattaattttctactacagcatgggaaatgtacgccgctatgacaattctcgttacccacaatccttgaagacgacatggatagtaaacttacttatttgtgttttgtgcggttcatcctttcaatcagcttggagcaggtggagcggctgaaccctacgctgttaatgccgccaatgcactcgtctacggactcatggttatcttctgtatcactgctggaggcttgatcaacgtcattggtctcaaggtgagtcagattgtcttttcttattcagccctaccgccggcatttactgatgggaagtcatcatgcactcttcattagtgggcgctcgtcctgggaaccgtcggatatcctttgtattcggctgggctctacaccaactcgtactcgtccaacacctggttcttgctctttggaagcgctttctgtggaatttctgttcgttctcagttttgtcttctcatatccccatccttcgcgctcaattcgtctctcttcgtcctaccgcacatccataggccggtttcttctgggcagcggaagccacagtgtatatcggttatcctgagcctggagagaagggtagataccttgctcagtgggcattctggaaaaacttggcccccgcgattggtggagccgtcaaccttggcgtaaacgtatccacaaaccagacaggcgcaatcagtcggcccacgtacatcgtgttcattgtcattatgtgcctcggatttccaatttccagtatgttctctcctttcatgctctacgccagactccccacgcgtgccgtattcacatctgaactgaaccaaacgctcgaatgttatagtgttcctgccttcaccgcaacgtgtgatgcgcaaggatggcactaacgttcccagtcttgccggcaagggtgtcgttcacgagatctgggccgttctccggttgctcaaagaaaagaagattctcttcctcctcccagccttcatttcttcctacttttacctagcctatcagagcaactaccttggacttcacttcacggttcgaacgagagcgctttcctcactagtcgctccattcgctggaatcatatcgtcgtatgcgatgggatacttcctcgatcagcgacagattcctgtcaggaccagaggagctattgtgctcggcattttgttcgtgatggagatgggtgtctggatttgggctacagtgatgcagcacgaatttgataccaaaaatatgaccatcgactggtgcgttcttgttcatattacaattggatcaattttttcaaaaaagaaactatcttactagcgagtccctgtctatcaatttacgacgataacatcaggtcaagcaaagatttcggtagggcttggactcttgttttcttctggaccttcatcggacaagctcttcagaattatgtttgtctcgcctctattcgtcttcctttacctttgtcgcgctcagcccgcttgaacaccttgttcacctcatttaccttaattcaactctctttcactagctctactgggtcatttctcactttgccaccgacatcaatgctctgtcccgttacgccggtctcttccgttccatggaggctcttggtcaaacgattggatgggcaatcgcctcgaatgcaagcatcagtccttacgccttgatcggtctcaactttggaggactgttcgtggctttcatctcagcgacaccaatcgtgttgagtctggtagagtccgatatcgattctgcgggcgcgtttggagtggattctcgtggcaaggtcgatggcgacggcgaagcatcggtcgatcctgccatcgcccgagcttaaaaaattgaaaactgtctgttgtagatacatcttataaattcatagaaagatgaggatcagattcattctagtcatcaagtctcgcttctgctctttctgcgatcactattcctatcaaccgaaaagattttcttcccgtctgctcctttagatacgttaggctcaaggcttagacatgtagtttagattttttctgtaatatataaacaattaatataacccttatttggttttgatcattcaaatgcccaacctgcatgcacatatattgctgacgatttcatgtgatgatatggagtcgtcgggccatctacctaggcgtccgtgggtgtctcgccaacctttttccgtggtaagacgatatggtctactagaccaaatgctttggcctcttcgggtgtcaagaatgtatctcgctcgagcgctttttctatcatccgtttggtattcacacaaaacagattcaggcaaattcatcatcaagaggaatgaacaagaatggaccaagacgaaccaaatcgtttcaagacttcggcttcggattcaccctcgagtgtacagtgctgtcgatatatttgtgtaagtcttgagcgcgttttaagaatctctctggcgcggatggctagatctgaagcttggccttgtgcccccccggatggttcttacaaacgacagacgatagtaacaaagtcaacaagatctgtaatacttgactgatgacgggacaggagatcacgaacgatgaatcatcactcttgcatggggaaggatgtatcgatggccctttgcacctatcggcaggattttaataaatcaaatccaagattaattcaatcgaaaacactgtggatggagaagatgaagagcgagaagaagcacctcctgctagtaacaaggaacccatagaagccgcttggcccgtacaaaagcagtgcacgtccggggagatatgctgttgcaaaagacatagcatatagagttactcaatgtgaatctctcatcggagggatacatgatcagaacgaaggcgggaacagcccagaagattgcgttacctgcatctatatggttgaagaaactggcagttctcaataacagtgccttcaagactgcatcaacgaaagcaacgagttggacgaacggtgtcatatatagccaaacctgaggagaccaccccccctggactggagatatacatccgaataggtgctaccggatcgactgcttcaagatacaaaagcgaagcaacgatgatggtagacatagcgtcatggacctataaatcaaatatacgattgatagatatattccatcttgattcaggttcaatgtctactcccaagagccggatggaatgatgggaaacgacgtacaggcccaacagagattactcgttctttcagcaggcgagagtaaatatcggtttggtagtttccgcctcctctcgtctgattacaatcgttttaattcaaaccatgggtaaaggaggagcgtgagttagggtaccatatatcggtcagcaaagtgtatacatacgtgatcttgaacataaggtacatgggcgtaaccccttttagacatagcgataggcgaaacatttgaggttgatcggatatatcgccccgtcggtaatgatgttgacattgttattgaagaatatggagcaggatcatggcgtagattagtgttggaaagaagtaaacttcttctcgaaggcgatcgagaagggaaagcccaggtagaacatgttgctctacggagtgtgttggaagaagacatggggtttgatgggagatcacttggatcgcaactcgtcatacatcaacatcagtgggcgtcgaatttattcattacttcgtgttacactcagggctcgcgtggtatgaaacacaaatgacaaaggtcattgaaacatccatttatgaggttaacaagacacataaaaagagggtagagagaaatcaatggagctgggaaagtaaacactgttgaagaaagaggataaaagaatgaattatgaaatgcccctagttcgaaagaaagttgcgaaaatcagaatgaaagggtaagttgtatacaggaagagatgatgtcgtcgtcgtaatcattagggaacaaaagggaaggttgtctacacggttatgaactagaggaaagtagacagaggatgtcgcttttgtagaaaggagcagcatcgtctaaccagcagcttgcatcgcgaaccttcgaatatgagggatattgaggtaacctaaagagcaatcaaaaaatgttgctgccagtcagcatccagcatacccttgtaaaccattctaaagattgaatgaaggaacttactgggtacgaaagtttccagatactcgatgtctctcggcgcaggtaattcatacgggcctgcttcttcagtctcagaaggaaggagcaagtgatcacttcgatcgttcgcagagattcgggaagcgacggctcgaagaatctcagagggtattggtgtctaatatcaatgatgtaagatgagattcaatcacagatgaacggcatgcatactccgcaacaacaggcgcttgagttgcagacgatgatgaaagatgagaaaaacttacttcatagtcggcaacatggtactgagtgatgagcttctgaatttgtgtaggcgtcagcatccagcacacatcactgaagaggaaagagtgaatgaaaccgaaacagtatcataggaatcagcatggtgtcacataaatcgcagggggtgatgcagaacgtactaaatgatgtcaatatctgcttgggtacccttcttgagttgaagaagtttggtagcttgcatgagatgctctaactgaagaacaccttcaggcatatcgtgggacttgcacctgacgtcacagaacaaaagtggatccagatattagcttgagttattctcagtatttggcgaatatatcaaacacaccattcttccagacgggtgatgttgtactgtatctgcatggctcgcttccatgagctgaagtttctcctcatcaacaaatcgttgaaagccgtgacaccaatcaatttaaggatctctgcaacaacctgttgagtaacggaatcctccatgtggtatcctttgagcgctttccagattttgttgaggatgttgagaatgtcgtccatgctgaaggcagggccagaacttccttggatcaaccggttgaataatcggccgccaccttcgttggtcatgaaaccggggagagattggctttcaatcaacgcgggaacaaccatctttgtcaacttcttctttgtctccgcaatccaggtgtgatagatgttgtactctagactgtctaagtcgtgtttaaccacttgaacaagtcgctcataatcctcccactcgaatggtcgtccaatcccatcgtcttggcctggtccaattccttggccgatatcgtgttctgccacgcaaacaaaggaaagtagttcatgaacgttcgacagccagaagattccaggaataatggcatcctcgttttggaaactctgttttggaaaaagggtcaagtagatatttaagcaatgacagttagttatgttcaatggttgtcgggttcaatgaagaaaagattgactacacaccatgacgtgctgttggatggtttgcatcacattagctaagaaacgctcactctctggaatcaaaccgaacttccacatctcgttcgtaaccaacccgatgagatgggccgggaagacaacttccttatgcgtcggaatgctctgcaatgtgggaaccggaatcttgagggccttgatgagcccagtaagcacatcttcgtctaggtgctctgcatcttccagcattcgcatgatttgttcattcggatcgtcatatccgattggcatgccactcgaatctttcagccaggacaccgcgtccggcgcgaaaacagcgacagaagcggatcggttttgagcattctgtgccttcctggcgtcgtacatgttttgatcgtcagggtctctagtacgaccagtatcaatggcgagcccagccgagtgtcttctgttgtgagacttagatgggcgctgctccatgggtgcgctgatgtcggtcggcccattctccaatgcacgaagcccgttcgaaagattgggtgatgtgggaggaggagcattccgactgaggacggcaagcgcgttagctcggttgagagattctcgtagaccagcaatctctgatcgaagacttccaagtgtggtggcatcgtctgctgctcgggcggtggcttgttccagaagagcttgtcgttcgtccaacagcttcgtctgagacacaatctgttctccaagagaggcaaccattgcctctcgctccttgatcgtcttaagggtttcgccaaggcgggcgtccgtcgagtcctttgctcgctgtagctcttcgaatcgagcctgggggacggtaggtttctgcagctcggtgtgcagctcggttgcgcgagctgaggcttcctcgtgcttccccgtccagactgcctgggcttcctccaagtctttgatctgagcctgcagttttttcttctctccctctcgcttttggagtgcctgtgtaagctcgaccactttgttctccaatttgtaagaaatctctttgaactttgtagccgatcgagcctcgactttgagcttctggagttctcggcgagccatgcgccttcggatacaagactgcaagtgaatgacgcttcgaatttcctgttcgtaacgtttgcggaggagtctagaaagcaatttgaatgaaaggattaaagtgagaaaatagtatcaaagagaaacgatttctcagaagcaagatagagaaacaagacatacaatcctttgcaaagacgctgaagatttgtggccgagagttgtaggcgctgttccttgtacgcccggcgagactgaaaaccccgcacaactaaagcaagaaagaattaattgaccaatagacgctcgtgcacgcggagatgaagagtgatacgatgagcttaggtgtcagatacataccactctggattttgacagccgcggctttcgattgtctatactgttgtctttgcaagaaccctctaccgactctctggatcttcacagctgcagtctctctcctcaaggtttccacctgtttcctggcctggacacctcgccaccaggcctgaattctcaccgtggacgtcttcagggccttgtatcgattagccgccactcgacgacgaagattcttttgaacaagcgtgaccagcgcattgagtcgctctgcccggagagcttcgaggtaggcaagcatgcctgctcggaagaagattttggtaagaccgacttggtacttgtcttcctccttaatggtatcatcaagaatgagtgagcacacatctttgagctccttctgccagtgctctgagcgaatgagcatatagtacctatttataatggagggaaagaatgtacttcggcagttaacaacgtgacaactttcgacaccagactatacaaaattgaaacctacctctccgcaaaatcatcaaacgcccatcgactagggtatcctgcacaactaattcggatcgtctccaatacaccacacgccctcaattggcctaaaacttgagttgcgtcccactcccaggctgccttcttttcgtttggcttgatgcaccggatgtagtgcacgtttgtcttgctaattgtatccatcaacgagattaacgatcccttgaagattgagccgagcgttggttttcgtccgcctggcttcttcgacaccgttagggcggtctgaggggcagccatagatgcaagcgcaggcgatcgacctgccgaatgcgaggaggataagatcgatgaccgcttattgattgccgaaggtatctcaggagcaacaggagcggcggcgacagctgaagccgacgttggtgggttcagaaccgcgtctaaggcttccttgaggaacgtgtttgttgtgttctgaagaagtgccagatgttcatccggcacagtatccctgttcttctcgatgaatccctcagcctcatattcaacatcgacagcgtaatgtgcgacggtgaaggagcttccgccaaatcgaggttttttgaagatcttcttgttgtccggcacatcgagttgtttgtaaagtttctgaacaaatgaggcgtccgcgccagatggtagtcgagactcttcatctaacagggaaagaattccgagcttgccctcgataacatcgatacaaggctggttgtcggagaagtcgataaatgtccagttgatcttctctcgaacgtattcttcttgctctagcttgaacacgtgagcgttgaactggatgaagataggtaaacgaagtgaagaaagggatcaattggaggtcaaagccactcaatcgaatgagacaataacagactaacctgttgttgaactgcacaagttaaagctcaaacaagtgaagtcatgatctgttctatattcacaagatgaagcagatcaaacagactcacgcttctcattagcataattgatgaagaactgttcaagcgagtttttcttgaagtgttcaaagccgtctgataaatataccaaaaagagattcacatcagttcaggctcatccctgtctcctacactaccctggaaaatcagtctcgatgtgagaaactgacatatatctaatactccgatgaacttctcggccaccagggccgccgtacctccctctcccatcaggctctcgttgaccaccgcgacgagatattcccagatgcaagcatacacaaacttggcaaccgaatccctgacaacagttgcacctggtccggagagtgagctaacaatcttttcactccgggtaaccaattgctttttgaccgtccactttctaaattcgtccttgggcacaccgagtaatgtcgtggcaaacgcgagtgaggtatcgtcgtctgaaatcatcgcatccgttcgagattgagtaatctgaatgtttcccaaatggagtagtgcagcgaggagtcggaagatctgccattgtttctcgacagagacaccgacggtagagagtgctttctgagtaattccaaactctacagcgtcgtccactccaggaatcactgcagatttagatccgccttgggagagatagttaaacttatgtgggtctatatcaagcccaagatctttgcgctctttagcgggcgcacccgcacaaagctggtaaaagatgtggtaatttcgctcagattcaggttggtatacaattcgagatctctcaagtaggtaggttcggatccgagctcccacgatttcctgatctttgtcaaacaagatctaagatgcaaacaggttcaaattcaaatcaggccgtatgtcacgtgatagtttgatagatacagaagagaatggtttacgaacttccatgtattttccgaatctcgaactgttgtcatttctggtggttttggcatttccaaaagcctccatgattgggttcgtcgcaagcatttgtctctcaacctcggacatgccagcatcctcggcactgggacttgagttagtcgtagccttctgcctctgtcgacgaaccggccgtgttggatcgtctactgaagcaaagtatcgaagaatatacttggcggatacggttttacctgctccactgtttgttgatgtattactcagatcatcagaattggtttttggtttgccagtgacacgttctcgaagcaaccggataagtaacaagagaggacagacctttctccgctgacaacgatggtctggtcggccgtacctccaacttctccaccagcagtctgccctcgtctcatgcaatctaacgcctcttcagctatggcaaacctgaagtatggcaaccgagcaacgatacaaacattgagtcaaccgaactacatatgttttttttactgcaaagacctaggcacgaacagatgtggttccagctctccttttcgtcgtccggagtagctttgaatcatgtcctgtccatctaatgagtttcaaattcaagtaagagtatgctcagtatacaaataatctttacaatcaattactagctttgggatgaaaacagagtaaaaaagaacgaacagatttgaagtggatagaagggattgatggcaatcagaacaattctatggttcactcgaatagaaacaatatcaggtctggtacacttgatcctcgaaatcacaaacgctatctgaaagacctacccagagtaagtatatggtaggtgtaagtggtatctagtcgagatcgcgtgtaacactaagtcgaacaaatgagggtagacaccagatcagctcggatctacactatgattcttgcttggctgcccaaagagcaatctggtcggaggccaggaaaacgattctcaccagatggctcgttcagattgctcaagtttgccagatcctcttgattttctaataacggtgggtttctcaatggcggcagaccctcgcttgacaggagggaggcttctgaacttgcgttcaccgttgattcctatgataattcgtgaagttagacgtagacaagatttttcgtcagtttgtaagtcctccgttcgatcagcccataagcgcagaaggcgcataaatgcgtgcatgcccgcatgtcccgagcgaatgaatcaacgagacagtgtcgaattgcgtaccttgcctttctcatcaacgaagctgagaacgatctggccggcctcattagtttctttactagtgacctgtccagaaatccagcctagctccttgtcagggaacctgaggagtcaagcacgaacagagacgggacccgaaaaggttgggggacaagtaaatgtttaatattgagcagcgcaaagactaggtcgtttgacggtcgtggccacgatcaagagctacttgacaacagaacgaaggccaaatcacgcaccatactttggttcctttcgtgtacgacatgagctttgaagttcgaaaggaggacgaagggttgttcggctaaaagtgccctgatggacagaggtaagatggagagagaaaggatgaggtgatgtgaatgagaggagagtgaggagatcgccaggatcggggtcggagagacagagaaagacaaagagagaaagaaagaaggagaaactagtctcaggtaagttcctgaagaactaagagagtgtttgtctgtctgtctgtctgtctttcagacgatggttggggaagaaggaaagagaggaagaaagaggttgatcaggatggcaaacaaggagacaaacagccaaacagcctcgaccttatataaataagggtaatagattgatagctgaaaacacgtcttatatatgagataacacgtaacaacctggtgtaaccgcgtaattcgatcatggactgtcttcttcttttaccgtctgacgattcttccgtgaccctccaacatccattgtatttcgagagcagccaactttgtgagtggtctctctctttcgatgtttctatacgccgattgcccagtttgagaggcgatccagctatcaatgcttgacaaacagatctgggccatcagacatactactcttttgctgagccgaggcttaaagaacaaagggcggctctggtgatgatgagatttccatcttggatcaagttccgcttccttgacaaaaaatccttctcattcatcccttcttgacctcactccctacatcgatctttgtgcactcgtttcatagcagaaatctctatctcttctttgctctattgtctttttccgcacacatacatgttgaccgttccatcccctttgtttttcgtcttctcccctttctttgcctttccttaccccacttaccgcttatccagatatcaatcatcataagtacaatgtccgccaagaccaagaccgagggagagtccaagaagatcactctcgagaccgccgacaaggaagagttcctcgttgacaaagaggtcgccgagcgatcgatcatgttgaagaacatgcttgaaggttcggccatcttctctgctctttgaattttgttcctcgccatcttgcatcttcttttttttttaatgaagagccggaaactttgaacgtaatatgcttatccttggactttactaattacagatgtgggagaatctgatatggccattcctctgccaaatgtcaccgccaatgtgcttaagaaggtacgttatctttccacctttgcttcgtatatcttgaaagcatgtacccatatcagcctttggttccacatcaaatgaatttgcctcttcataggtcctcgagtactgcgagcatcaccgaaatgaccctcttcctactgccacggatgagaatactgacgagaacagaaggcgagtagccgacattcaagactgggatgcaaagtttatctctgtaagtccatcacatcaattctttaagctcgatctttcggatcatcatctgcccgcccagcccgcctccattttcatcatcatcatttttaaaaagcggagcaaagaggaaaactgacttgttgctatgtgtacgttcttttcgttgctcaggttgaccaggaaatgttgttcgagatcatcttggctgctaactaccttgacatcaaaccccttttgttagtcggatcgcatttttctgtctaccaattcttggtcaggagctaatagtgttgtatgcctcgatattctcgccatcgttttgttttcaatcgcctgtagggatgtcggatgcaagactgtggccaacatgatcaagggaaagacacccgatgaggtacggccgtttcctttgcatgatgtgccttcaatcttcagcagccccgcagaatatgttcttatcctcttcgttgtccaaacgaaaaaaaaaaattataacagatccgaaagttattcaacatccagaacgactttactcccgaggaggaggagcaaattaaacgagagaatgagtgggccgaggaccggtagtcgtttggactttctctatgatacctctccttcttttgcactgccttctttccctcatgtgtcccattccgctcgtctactcccttccttcgttatctctgattgtacaacttgaccacttcttacaacctacttctgctacatggtgcgttgcctttctctctctcttcagccactttcaactggccggccacatgagaccatgcgaactaatcagttggtcttgatctcctttcggcgtcatagacgttctgcattcccctcctttccttctctttgtttcgtctcattttcgttgtctaaaccccggtcctttgtttttaactctttccgatcaaaaggtctgtttttctccgtatgtcgctgttgagtagggcaaaattgaaaagttttcgaagagaggagattaggaagagaaatatgtttatgaggagaagtttggaatagaaagccattctctaaaatgcactctgcggcaagaatatgatcaatttgcttcacgtgcgaagatggtgatttggatttgagctccgttggtctcgtccataatcacactgatttaacgatcatctggctcatcagattgaagtgcacccagcatcaagtcaggctctgcaggacgggaaaacaaatggttttgatatattgattcattagcaagtagaaaaatccatccctcttcagatcgaaatcggagccggagccttgacatcctccttgtcctccgtcaccggggtagttgccgactgtttcctgacaaactctcctttcccttccggtccgtcgacccactggaaaacagaatcttccctttcctgttctttcacaccccagaaaactcgttcccttcctcgcttgatttcgtctctgggcaaactctcatcccttcgaagagtgattccgatgtatcgtcggtagttcttcggtcgattcgtatccatgatcggcacggaagatcggggcggccgacggttggcgatgtttggcgaaacttggacattctgcttcttgtaaggaagtgagtagaacttgaggtagccgggcgagagagcaaacaacgtatggtctctacccattccgacctgaaatgtttgcgtgagaaccggaagagagtcagcagaggagaaaacatgtttccgaatatatatatatatatat

SEQ ID NO: 171 - DNA, 28380 bp, Xanthophyllomyces dendrorhous
atatatatatatgagcatatgacaaaagcggcataaaagcagagaaggagaaaggatatcgagcgagaaaacgtacgtgttgaccaggatggaatttagttcctcgttgacgaatgatgatatctcccggctgaacgagctcatctgaagtgtgcccagaccaaagccggatggaaatcaacacgaggaacgaacaaaaccataaatagtcgtcaggagatatggatcttcaaagtttcagatatatgcagaagaagcaggcagacaagaaaaagattgaacgagaacgtacttccgaactttttgacacctagacgttttccaatggatcctcgattattcttggtagatcctccacccttcttagtggcctgccaaagaggagacgtcgaaaaggatcgtaacgatgagttgaactgattgagtggcctaagaagagccgagggagatgcgaaaagagagaacatggtatggtccagaggtgatggatgttcagaaccggataatgaccgtgggtgataaaggcacaagacttttttccttatggactacgaaagaaggtggacgggtagggttatgaaagtatagaaaagtataatggttttttctattcgcttcattacactcatttcataatagatatcacacagcctccatctaattatcgctcccttttctttttcatcatccgcattccagatccacactccacgttccacacaatccacacacacacacacacacacacacacatatactcacatatactcacacatttacctctcattcacttgctactcactcaaagctcgcattcacatggcccccaagggctcgggctcctcgcttcccgctccacttcttcatacttctctggcagcaacaatattcgcatgtgttacttcattttggagtatctatctccatctcaagggatataggcgacctggtcttcaaaggttcgtctaattgtctctagcacggtcatcaaccttcttccgtttgttcttgcaatctttcaataaccgttgttcttctaaatattggtccgatcatttgctgccactcttgcatatgtctatctagactagtcgtccgtatcatgttgatgtgcgtgctcggctgcctatgacgtcgcgtttatcaggataaggggctcacccgcaatcttttcgtcctcgcttttcttccacaaacacttcaggatccccatctatgcaattgcttctctggtatcacttcattcggtcgaggcagctttttggattgatgcagtccgagatctctatgaggtacgcgtcatcggccttgctcctggacagatagaaacgttttctaacaccttttcacaaaatttcctcgcttctgatcttgtccctgttggcctgatgacgctttgatctaaccaggcttttgttatatatactttcttgtgcgcgagcgacaaatctcatgttcatcttgtcgacgtgctcacttgtcttgtgaatggtgtttctctccttccttcagctccttactggtgacctaccttggtggagagcgctcgcttctgatcctcgtccacggccggccgtcaacacctcatccgtggcctgtaggaatgttctatcatgagatggacctctcagatccatataccttcctgggtctcaagcgaggaattcttcgtaagtttcctgttctcaagtcttgaccgtcgacatttcggtcggcgccgcagctctggatttgtctttccgcacgaatctgactgagacgatgttcatctctttgatccgaactagaatacgtttacgtgaaaccattgttggcattggtcacaatggtactcaagtacacggaaaactattcggatggtcaactcgggttcaacacgggatatacatatgtttcgattgtatacaatctaagtatctgtctgtctctctagtaagtctgtttcttgatgaaaatgagcgatttagtcagatgcgtattgcttacggctgttgtcgaatgttgtagctgcttagcaatgttctgggtatctattcatcatgagtgagtaaggtcttgattgtatacgtgtaaacgctagctaacaaggcttgatgtgaacagtgttcaaccctttcggcctactcccaaattcctttgtgtcaaagggattctatttttctcgttctggcaaggtatcggagtctctatcctcgtcgcttcgggcgcaatccaacatcttggcccatacacagatcatgaggtacctttctcgacaactgtcttcttctgcatccacgatgagacttcatactgatccatgttttcggtcaaatcatcaaagcatatgtctcttgcgcttggagacgtgttgatctgcctggaaatgccaatcttcgcaatcgcacacacctatgcattttgccggctgagcgactatggtcagtatcatcttgtctcttcttactctttgatttcccatatatcctcttgaaggtggcgttgccttcttcgtttttctcactttgtctacgattcaaatttacccaaccagttgatccgtccctgcattatgttgctcgattgccgttcatcctcgccttgagagatagtgtaggagttttggacctcgtttcagacttcagagcaacttggggtggcaaaggaatgacatatcgatcatttgagcctgttgagggtggattacacaccctcggcagagctagagagaggcgaatcagagctggtttaagatatcaaggtggagggaaaagtggtcagttcgttttcccctctctctttcgctaccgaagtagctgctgatgagctgctttatgacgatatatctagggaaaaaatactggctacctgttcctaaagaagaaggtatactaggtttctctcaaccaaattatggtgctttaggcacgacctcacctacaggccatcactctcacggcattccgaccaagggagtatacaacaaggcgactggtcatggcccccattctttaggctttcggtcacctcctcatcctcccgcctcatcttctactcagggagattactttgctcgaagtcgacaagatggttccgcttcacacggaagacattccccgatagaggatgactctgacgatgactctgtagtctcactttcgttttcctccatcgcatcctcgccttcgggaactccttctgaaggaatccaaggtcagcgtcaacgtcaaggatcagaggaggagtcgcaagaggcgctctatgcggaggcaagaggttacctccatggcgactggagttatcgtgtgatcgatgtgagtaaagaggatgctagaagacggatgagggaagaagaagataatgtcctggccggatttggtaggcggggagaaggaagaagacaaggggaacgatggggtcgaggtttaaccaggggtgtcaatgacaaggacaaaaacaaatcatcagaaagaaaaatctatggcgcttttggtggcggtgatgagagactaggtgcgtgccatgtgatgctttcttttcatccccttttttgttccgaatgctgaggttgacttttgacgcccgtatcgcttcgcatatgatggccctcacgtttgtttccatcagcgacagacatctatgccccgcttcctccgtctaggtctccgtccgatctgccaatgacctcatctgctgctcctatccgacacggtcaaagtggtcctcaagcttctcactcaacggaaacaagcgagtctccaccatccccgacgtttctcccagaggaccatcccgtacggattctttggactaagcagaagggtaaagctaaggaagttgcatcccatttattggaggctgcccatcagatcgtaccagcaacggaactcgagttcacccctgcggttgaacggactgaaccatcctggttgaaacttcccataggtggcggtggcggaggctcgcgctctgcatcaccaaccaacgagaaaccattaccgagcgacgctattgatcttgtagttgaggccgaggtagattcgtcagaagaagaaagttggaacaaggagcggaagagggaggcgaaggagtcgcttagacaggctgggtgggttgatagggagagagaacagggtaagatcgtcatggagagcgaacaaagtgatggtagagtagaggccgagtacgtttacctcttttctatcttttgtcgtctttaatcaaatatatatcatctgctactgtaaatctgaccgagttatgcacctgtatttggaaacccaccagaacgacaacggagccaccgcttcttcatatatcccctccgacgtcaccaccaatgtttggcggtgacgcaccgatcaatcatgacatctccccttcaaatctcctccctcatcaaacctcacccactcgaaaatcattccgatcaggtaactcggacgctggatctccatggacagacgagcgaggttcggaaaacggctcgggccatgttaggcagggcacagatgatgagcggaacccatgggcttagccagtagcatgtgtacatatgtgtatggccttgtaggaatataaacggattatcagtcattccttgtgttggcgatatactttttacttgattcgcgcatatcatcattttagcatgcgtcttgttcgatatctctgtcctctatactctttctctcttctttctgcttcttgcattcagctggtagtcataggcgtgggtgatgtgcatcggatgaagattacgtaattcatatataccttaggtatcttttcttttcgaaggctgcaatgaaaaaagagagaacggttttttttacttctccttcactcgaaaacctcgttcttcactctcttcaccttacttacttctcacttgtctataatcatcatggatcaggccaaacttgctcgacttcaggctgctgtcaagatcggttcgttcttcattctccttattatatctttactagaattcagacaaaaattagaggaaagcggatcgtaattgcaggagagcgttcggggtgattgatagcttggttcaagaaggtgatggtatttatatcagtagtcatcccaagaagattcaagatgaagctcttgacgtttgtatcctagtgctttgaaaaatagagagcataagatcaggataaatgaaggcgaatgtgcatcagatcgcatcataaacttcatccccatcactccgaccatcttcctgttctatggccttctctgcctcatcaccaaaccccatcgttgttccaatcaagaattgaaggagattattcatgctctgttcactaatcagtgtctctttcattctaatatccatttatccttctgtgaatcaatttgctttctgctgggctgcgcctgtcatttccggtacgctttaataggaggaaagggtacgccccgacgaaaggttatcaagaagtctgcttcttcttcccaggccgatgatgtcaagctccacaacgctttgaagaagcttcaggttgccaccatcggacccgttgatgaggtgagtttcgcttctatgcatttagtcaaccggttaggttatatcgacaagctagagactcacctgttcttttcgtctataatgcgatgcaggtcaacatgttccagggtgaggttttagacctaacgttttgaaagtagaatacagatcaagttgcttaatgatttgttccgggtttatgatctccttgtttcttacagaggacggaaaggtccttcacttccagactcctcagggtgcgtttgctattttttttcttctttttcttcttttttcttcaacgaacaccgtttgttctcgattgtttcgtatgctgattctagctctgaatatcacactctactatcgatagttcacgctgctcttccttccaacaccaccgtcgtgtacggtgtgggtaagcccaaggagatcactgagcttctccccaacattctttcccagctcggacctgagagcttgcgaaagttggccgacagctatcagcagatcatggagcagaggaagcagatggagggggctgatggttcgtcccttgtattctcatcacccacattggaagaagcaagaagtaaagagaaagagagaagctaaacagtccgacgtgtttaactatagccgagaaggccgaggatgagggtgtcccctcccaggtcgagtctttcgaggttgaggacgaggctaacaagctcgacgagcttagtacgttctatccttttccatatatccctttttaatcttctcagactttgatctgagcggtggtagggcaaactttggataaacaagctgattttattcgacctgaaaccaattttcacccaaatctttcgatagactaagcgccaacttctcacagattcctctgcttgtctaacatggagaggagatcttgataaattggaaattgatgcttaaaaaaaagggaaaagaacaatgaagtcgaacgaagttggcgaaaagaagtgaaaatctggacgagtgtacctagtgcaaaaagcatggtgagagttgcctcaaccgacggtggttgatatatggcccttttggacttgggtgccctcagaccacgaaccaccacatctccataagtcatggggttggtatgtgccagcctcaacctcagtggctagcgtagcagcagcggtgtcagataccagcattcttgctccttcgttctcctcctggtgaaggtcaaggtgcagcatgttgcgtgacgcgttcacatctctgttccaccaagtctgaaagcaagcatagagcgcagagaataaagagaaaacaatgagttcttgacactatcctaagacacacattacacatccaacagacatccaacacaggtgacttactcgacagatgcttcgacactccttgatcgcccacgctttgttccttccagagaactcgccatggcacttggagcacaccctcgacgtccgatactcccggactttgtggacctgaagcgacggaaaggccttcagcttggcatacagcatctgacaggaccaggagtatgcccacgagaagtcgacgagaaggcgccgtcgccgaaggccaggaaggtgcgtggacgtcctactgacaagggagatgccagccttggtccggaagtacaggcgcattatcgacgacagatctgggataggagctccatctgtgcacagtgccaatacgtgcaaattcatcaatccggatgcgtcgaatgttatctttcctagccgagcaactgcagactcgatcgggttggcaaatgttcgacggggtgtatggagccgaaaatgatcttaaccatttgtgacaccaaagggtgaagatccgcgctgactcgtcggaccctctgatgtcacggacggtaaagatcggtttcagctcatactcaccgttaatcctttgtcggcccaatcgagtctacagttgcgcagctgagaacatattgactgaggcctgagccgtcctcttacgcttcatatcgaacacaagaggagcggcattcctcaaggcaactgataagtgttctcatatgaaggggtgttctgatatggaagagcgctcaaatcatctcgagttcgttgtgtctcataagctgttgggattgatgtctgcttctttgcatgaaatcccctttgatcggttcggctggccgtcggtcatggtgaacgacctggtaaaggctttaccgtccacagacaaagacatgaattacagaggtatagcatgacagagaaatataaagacaaaaatacagacaaagaccaagacgaagaaacaaagagacaaagagacaaagagacaaagacaaagagacagagaatatatgcttgatcgagccaagtgtagctaatctcagcggtattcacccagacatccggtgtcagttatacaacatgaatttcagtgtagccgggtcgaccaacgctcttgcgatcgttctcaatctctaatgtatataggcttagctcgacgcacacttgaacacttggtttgatagattttgttctttctgagtcgaattcgctagctcgaatataccgagtgttgtagattaagataaaccagacattcatagaagaaagaaggcatagccgacactatagatcagaatctaaatcttccgaagtaagaccagatataagaaggattcaacggagacaaacgtcggtcaagtctcctgccgagcctcactcaaaaattccccaactttttcctccttctccgacggattctctgcagcgcgctgcaagaatccgtcaagttcttcttcttcttgtttgaacgcagtagcagggttcgtcggtaaggtgtcccggttcgaagaccggatcggtcgagcggcttggaagagagcaatttcattagagagcagagaagccaggtccgcctggagagcagatagtgcttctgggatcgtgagtgatcttaatgcacatgcgtggcgagaaagttcaaaccataaaatgtaagcaaatgtttttctgttctttcaggcgagaggatgccacgcatatagagagggcatgaaacgaacgactggagatgaacgtagagcctatatgaagcgaatgtgaagatcaaagacgacatcaccaggcccgtcaaggtcatcataaataaaattgtcggaacgaaaaaaagagctgggtggcgcaaggtacaatatcatgatggaccagtcatcagatcaggtttagtttctcaaaacatcctcgaagtattttcctgtcaaagagggaagagacttacatcctacgaaaatcgaacccagcacgactgaagagacgatcatcatcgatcctacaatcactgtcatcgctatggttgccacgaatgatctatacatcgacacagggagaggatgtacaagaaatcaaatcagatcaaattggtagttcttcatcattgtgatcatcggctttgtcgacgatgaacttgaggaacgaaacacgaaggacttattggacacacttacaagaaagtgattatcgggacaaaagacaaaatgaggaacaatacgagcgccgtctgcattcaccaaccgatccatcgaaattgatgagccaaagaagagaagacgtcccttctatcagctcggacctgatgcaggaacaaatgtactcagaaaaggcaaaggaacgaacggccgagacagggtaagtctttccaaatccaactcctctctccttagtaggtacccaaatgcttctttctgctctgtaatattaaagcaatccagaaaagaacaaggacgaaaagaggaacgtggagtggtcagattgacgttaagttagatagggcgaaccatgatcactgactggtgggcttttgactgggcgatcttgatagaggacccaattctttcttgaatgatggacggaatggatgtcattgtttttggcttctgattccttccctacttctgtctctctcgggatgatgcgagaaagagaaaggattgaagaagacaacaaagtcaagatcgagaaggacacgagcacagacaaaacgcacctgcttacgtcaccatgcacatcgaacatttcgaggcgacatttaaaacaaaaatcatggtgagagtgacctcaaccgacggtggttgatatatggcccttttggacttgggtgccctcagaccacgaaccaccacatctccataagtcatggggttggtatgtgccagcctcaacctcagtggctatcgcactagcggcagctatgtcagataccagcactactgatgagtgttgtgatatgggaaattgctctcatcaccccaacttctttgggttttctcagctgctgatgttaattgctccttctttgcaggaacctggtttggtcggttcgatttgctgtcggtcattgcggataaactaaagaaggactcgaatgacggctctgttgttcatagacagaggcgcgaacagacaaagaaatcattagacaaacatgtacatcctttcacgaccatggttacatagtcagccttcatcaggcatgcccaaaatccggctggagctcgatcttatttttgtcccagcctgccatcccatgcttaccaagcccaagccagaagcgatctcctctgctcacccctctgaggacaccattgatttccgccttcttatcagcctttcctcgggcttccagagcgggatcccaccagccgaacgtcgatcggaacataacataggacaggacggacactgccgacgcgatcaatttgaaaaataataccaagggtgtgaggaagggaagaataaggttggtaatgccctgagaatgataattagacgaaagagcgcgtcaggtcagattctatttctagtcccctttcttctttttaattttcttctatttttattttcatttggcaagggtgaccaaatgaacagaacgaaatcgccacaaacctctggctggtagaaatcagtctgagacgaaatataatataatttggaagtctctgatgtgattccttgctctagtgtaagacgaacgactaggctgtgaaggggtctctctgttgagcaaatatattcctacgaatgcaggagctgatcgacaaaaggaaacggtcttcacctggctggcgcgggcttccagggaaacacaaacacatggaatacttgagtgagttcgacataggctgtgcccgacggtttgtcccacactaaggggcaatgagtctatggtcagtcgctgttgtgagaagtcatggctaaattgaagagtaaacaacggagagacacaaaccgacattcccgacatcggccttgatgaacggactgaggattcgataccagccgtaaactccgattatcaaatccctcgagttgtgcccactcttgacccggcaaagcggatgattaaacgacgcgtcgggcgtaaagactgaccggatggaattctgttgacgcgtaggggaggatgaatgggtgagcgcatggatgagatccggcaaatcttcggcagggtctgagacggtgacggcgaaggacgaagaacggtgggaaagagagaaaatcaaccgggcaacgggttccgaagatgagacagagatggttcattagttccgagagcacacctcaactcatacttgaatttctcaccttgcattagataatgtggatgatctacaaggcaggagaaaaatattagagaaggactgaaagatctgagaatagaaaacaactggattgctggaggcgaatgattgaatggtcggatgagagaaaggggcaggtgagaatgtggatgacgtcggaggagtccgacagcagttacaataatggactagtctgttttatttcttttgtctacctcatcgtcgcttccctgttcagctcgttgtctcttttcttcgttctttctgtttactaacccacttgacgttgttctcttgattcattatgtatttgtttcaggcagcttaatgacaaagatataaaactaacattactgatttcctgccaagaagactaaagaagtgaaatctgtaactcataatctaccccttctttcttaccatcgtccctttcatcatattattgctcgtcgtcagttggacgagcaacctttcttcggatcaacaagtctcatcaagtctcgggaatgatcaggctgagatcgaaccttgcccgtttcggttctcgttttccttcttcctaggtcctcgtttgatcgtataaaggacagagttgatgggatgcgttcggtttctttttacctttttcttcatcaaacctcctccgctttttcgctttttcgcttgttctcgtgcttctcatcgtgcctttcgctctccttctcgcgctttgctttctcttttgaccactctctcacagaattcatccgaccacactccttaagaagacactctttgctctcgttcattacaaactctttttctgaaccttcaccatcaccttcatcttcgtcatgctttcattgacttcaacatttatcaacctgacgctcgtcctgtcggctatcacgcccgctttggccacttggaataacaatggaaattggggtacatactatggcggcggtatctgcggagaaggtttttggaacgatgcttccttcaagtgagtttagttgctgtaacatatacatgatcaagccggctagcttcttattttggcgtttatctgtctcttgcgccctgttctctactctacagacgctgcacgccatatactccgccttctggtcagaactgtggcgataacaattggtgtgagttcatcattttattcctctacctcttccaaggactagcttgactcattatatctcatcacattcaactgaatagggtggggaggtggagagtaagcataatccatcctctgagcaagcattcttgatcctgatcaatctcttgttcatgtttgactcttgctttcattgactaccagcgcctgtggaagtaaaaacagatgtgtccccataaccgttccttcttctgtcgcacctccgcctgacagaaggaatcatctttgcccgtacgtatttctctttattactccgtctcatacgcttcaggatgctcaccagttctgcattcatgtttgacctgcttagtttcggatggacctggcgatcatggaatggcatcaaagtgttggttttttaaatttaatttaatcaaactatcgatctcagttctatcggtacagacacttatgtagactcaaacacctcatatcagctgctctcctcggtctcctgataccccgtcttgcggcggaaaaccaacttgtgctgatacccactcatggcatcgggaaacatcctgctgtgtccccaagacgagtcgatgggcccgggctttctctccagtaagtgttgaatgtcatttagctttgtctgatgggtctgtaaactaaagactctgacatacctattcctgcttctatgatgcccaaagactgctgccggtgaaaagaatgatgaactttgccctagtatgtctttgtgtctcgtatacgattgataagcaccgcattgatagatattgacaacgaactgcattttcttcacctactttagaccacctgacttcgtgccccatcgctggagcgtctaaagacgcatacgaatgcctcgacattcaggccgagtgagttttgtccttcgcatgctatagtcatcactatttgctcatcttcttgattgcttacgtctttcttctcgcctagacttgagtcatgtggaggttgcgtgtccatgggacaaggacaggatgtatgtattttattgattcattctagatgccgacagaattaacggctcaagtttgctggctacgcttccaatctcactagtgcacgaccgctattccccacgccaaatcagtcggatgcgaacaaggaaaatgcaaaggtaagtccagattaggagaagtcaataaagaaagaaatacgacatccgtcttcgtttgtttacttgagtttaatcggttattgcagtctactcatgcctgagcgggttctccttgtccaatggagagtgtgtctaaacatatctgtcagctgttggccgctattccctcttccctttccctttcccaatctccgattgctcgcttcgctccttaaatatacctgtttatggttgacactgaactgttgatatccatatacccttccttctttggacactagctgtttattgctttcatctctgttttttttacttaattctctgctttttgcttcgctatccgtatcttgtttcgcacattaccgcgctctccttttgtgatttatactgctttgacttttgatatatcattgtcctgctttgttctatcatatgcttccgcttatggacctgtgatctatttcgcccaaatcttctctatgtcacttagatatagctcataaccccgctcgattctatgcacgttctttttcagtgacatctctcttgatttcttggtttcttaaagacaaggctcattcctttggatcaatctgtgtaggatcgaattcgtcttgctacaaaaaagaaacaacagtttgttgcttacataattacagccagtgcgctatctcaaaacacgcaccacgcttaccagaatcacttacactcaccacaccacaactcactctatcttgaccctatgtcttcatccatctacgcttccgctccgttgaaagcatcaaaacgaaaccgagtgctgaacccggcagcaaacggcccttctggctcgagtcctcattcgggtggacctgccggccaatccagctcaccccatcatcaccaccagggtcgagcggacctgacggaggatcaacgacaagaaatcaaagaggctttcgacctgtttgatactgacaaggatggagcggtggactatcatgaattaaaagtggctatgcgcgccttgggatttgatttcaagaaagcggaggttctgagaatcttgcaggaggctgatagggctggagagggtatcatgcgatttgacgcgttcgagaagacaagtacgcgtttcctttcttctcgtttgggtttcgttcattcttctgttgtccggatgagcttctgagaggatggttagacgagaaaacatgagaggttgatgttatccaatggtaaaatcgagttcatccggctaacattttcctttctgcttttctctcttcagtgacggcacttctgctggccagagatccaaaggaagagattcatagagcattcaaattattcgatgacgacaacacaggcaagatttcgattcgaaacttgcgtcgggtggcaaaggagctaggcgaaggattagatgaggacgagttgtacgttcttctgttcttgttcttgttcttgtttttgccctttgttgtttctcgttcgtctttctgttccgcgcagaaaggatccatggatcaatctgacaagatgtttcgtgatcttggggtttccaacagacaagctatgatcgaagaatttgatttggaccaggacggagagatctcgttgcaagagtttatggccatcatgatggacgaggattaaatgaagattgatttgacctaatgtatctcatagtatacacctttcctatctttttgtgttatcatcagccatcatcgttccatacggtatagacatttcaccttccgatcaaacctctgaactataagaacgcttgatcgagtcggttggcagatacatgggttttgaatgatgtttatgttgcggatgatgagcagaacgaggtaaagaagaagagcagaaaataagaaacaaatctaaacaacaatcataatagtcaacttctttttcccccctagagttgatctgtcccatacgaccgtcatcccagcatactttgcaatcgattctcctctcctttcttctatcaacatcttgcctgttggtcttctcttctctgtcccgaatgccattagatcaggcctcccagcaggtcgtttcagcccttcaggctctccagtcgtcgactgatcgacaaagtcaacttcaggctaatgactggctcacctcatttcagcattccgtacgtctccttttcgctcgctccttcttttctggacaagccttgcctacatcttttctgccaactgtttcttctttcttcatctcaacctgacgtcttggcatttgttgtctgttggatatcattcctttgtcgatccttcaacggcccacgcctttgaggaccttgcagaaagatgcctggcaagtctgccacacgttgctcttctcggacgaagcgggtctagatgtcaagatgtttgccggtcagactttccgagcaaaggtaaagttgtttcagatcaatgtatattctatccagctagcctctaatgtgtcatattcggttctcgtgtttttttcttcttctttctctatcctttcctcttctttgaacttcatctctaggtcatctatgacatttccgaacttgatccgtcgtccactgctggccttcgaacttctcttctcaccgcgcttcgaacattctccgtcccgggatcccgtccggtgctcgtacaagtctgcttagctcttgcagatctggcagtacagatgatggagtgggagaatgttgtcagtggattgatcggagagctagggaaggacgttcagatggtgcccgccttattggagtttttgagagtcctcccagaggaggccggaaacccaaagatctcgataactgtcagtgtatcttcttcttttgcgcgtgagatatgaaccatcatgtggggtttgagctcagtatgggtgttttgtatttctgaaacgatgcatcgtatataatagagtgaggaaatgagtcagcgatgctcttatatactgagttcgagctcgcaagagactttacagctgctttccatgtacatcgaagcaccaggtgagtcacattctctgttatatatctctatgaccttcatttcgttcggatctctcaagttgtctcgttttgattttctttcactaggtgtggatgctaagactcagagcgcggtctttgaggtcctccgaagttggctagtagctggagagctcatggcttccgacatcactcagacccctctgttctctttcgcgtttcaagcgctcaactcgcccgccttgttcgatactgcggtcgaagttctagttgacttgatccacgaaacacaggaaatcgacgacaacttcacatccatccaacaaattgttcctcaggttatttctctcctcccacgattagacgagccatcgactcaggaagatccagaggtcatgcgcggtttctgtcgaatctttgtcgaagcgggagagacttatcgacctttgatcttgcaacatccagagaccttctttcctcttgttcgtgcaatcgcgacatgcgccgcctcgtcagaactagaaatcgtcaagatcacgttcaacttttggtacagactgtcccaatccttaggcaagcgtctatcggacgagttttctagaccgttcctcgagatctacagcggcctggtcgaggtcatcatcaaccaccttcacttcccacttgatccagacgagatgaacgctcaagaaagagacgaattccgttcgttcagacacactatgggagataccttgaaagactgttgccacgtccttggttctacggcttgtctcaaaagaagttgcgagatgattcaggctggattggaagcggcggccgcgaacccgtcatcttctaatacgacatggcaggcgatcgaagctccgttgttctcgctcagatcaatgggtgcagaggtggacccaacggacaacgaggccgtgccagttattatgggactgttgccttctctcccgaaccatccgaaagtcagatatgcggccatcttggtcatcggaaggtataccgagtggatcgactgccacccagaacatttgccgttcatgttgcagtacgtgagctctgggtttgaagatgcagataaagaggttgcagctgctgcagctcagtcgatgcgatacatgtgcaaggattgtaaacaggtcagtttgaacattcttcgttttataatttcttgtggtacagatctatctgatccgagtcttccctctgttgtatgatctgttgttcgatggttccatctctcgaaacagcacctcatcccatttttgcctcagcttcattccttcctcacaaccgtcggcccttcattgtctcaggaggacgtgattcaagtaactgaggccgttgccttcgtgctatctgagatgccagtggaagattcagcgaccgctttgggaactttcactatgcctctaatccaacagattcacgacgtcactcagagatcatctgtaggcaaagatgatctctacgccttggctggtgagttttctctctttccttctctgtagaagcgttcttaacgatgttgatctgctttttgcttgtggtatacagtgctcttggaacagctcgaaacgttcttgatggtccttcgtacatatggttcttcgctacctgctagttgtcattcgaccccagccgaagtctgggctatcctcgacgccttgctagtccggtttggatcggaattaatcgtgtctgaacgagtctgcgcgctacttcgtaggggaatcacctttttcggtcccgcagctcgagatatcgtaccggctatgctgaaccgaatgtctagttctttcgaatcaagtctcagaccaggttatctctggatcacgagcaagttgggaagcgcgttcatcttggaacctgggggaggtgtagatgaagaaatcgctgctgggttcatcgctgcttgggagaaggagacggaggtactggtgagatatttggagcagagtgtggtaacggagattcctgatggtaggcttcaacgattatctctttcttgttgttgatattgagctctcgttattgatgcccgagtgtcttgccttcctttcaaaaagtcatggacgacttcgtccatctcttactagaaatctcacctgccgtctcttcccagatctttacctctcgaatgttccccccgtcgttccatctcgcacttcaggcactcaccctacctgctcctcagatccttcactccactctcgagtactttgaggcccttctctcccatccagccattcaacctttgtcctcaagcacctctgcatctggccaatcgactccaacaggaacattcgacccatctaacccatcagctgcctcccaggccctctcttccaccttggctgatcaaggcccccgacttttagatgtcactcttaacggtcttgtcaccggttttccggaagatgcagtccacctgattgttgctgcgcttagagtcatggctgggttgttcccagaaaaacttattgagtgtctaccggctgttgttgagagattaccggcttccggtgtgccgtctgctgagaagcagacctttttgacaaagattggatcgtaagtctttctccactcgctttcgtcatttttctccgctttgttccacatcaatcttatatacgtgctaacttatgccttgtgctttgtctttccgtcatatcagtgctttatccactccaaatcctgatctggtgaaaccagccgtgctcggtttataccgtgcatctagacgaagtcgagaacgcctacgttcccacggtcgaatttctggagatcaagatgctgcttaggacgaagaagaaacgctgtttttacttcctggcttttcctttgttctctagatggattaatcagataatataacatcttctcttaaaatatcgaaaataaatttcttctgcttaagctcaagcttccggctcaacgcgttcggtttgatggttcacatgataagttgtacaggtccaaattgacatcgcgtcctaagaaagaagaataagacgaaaaaatctgatgcatatttcatacgagtgtatcaactacaagaagcccttcaagacctagatcttattcagtcctcctcttcgtcactctcgacgatcctgatctttcttatcaatcttcttcccacgggcttctccctcttctcgtcttcactatccttctcgtcctcttcatcttcttcctcattctcagcatttttgtcgtcttgctccaaactcgactcctttgcatcctcttcctcttcctcctcacttgaggctgtccgtcttgaccttgtccgctcagatactcggcctcgcctcttgctcccttttttggaatgggatcgatgtatcttctccgcctcttcttcctcttcttcctcctcttcttcttcctcttcttcgtcgtcctcttccctatccgaatcggagtcttcttcagaatcttcatccgcttcagaatcaatatacggacccgatcttgctcgtctgtcgtccaagctcagatcttcttcctcttcaccttcgtcatcatcaccatcaagagatgaatcttcactgtcgtcgcttaacggtcgctcttcgtcttcgtctttgtctcggtcgtcagaggcagtatcgtcgccgagggtttgcagagctcgatctcttcgatcgatagaccggttgatgtttcgagtgagtcgttccttgtgccaccacctggcttgtttaggatgtctggtcgatatgtgacaggagaaagtttagcttgaaaacgaagaagaacgaaaacaggggtgagaggactgactcgcgcaaacattgtcgaatgaacctcgagccatccacgtcatcttcctcgaggtcgatatctcgaatcctaaatcgaatttcatgaggttccccaggacgtcgactatctgtcacaagagcagagatatacttcccgtcgatcgtcaaggagaatctctggagcatcatgattggagatgaaaagaagggagatgagattatttagagaaaaaacagggaaccgcaggctataggactaacttctatcatcgatgaggtagctcctagatctttcaactttcgatccacttctgcctcgtgtcgatcctgattcatgcagaaccccatcaaagtatgttaaacatcttccgcgctcgtgtgtctcgaaacaagacagaagaatgaacgatcaacacataccaggccgccctccccagcttcttcatcaaactcctcttcgtccccgctctcggtctcgtacgcatccaaatctgtgccatcctcttcatctccatcatcattgtcatctgcgtcatcgccttcgagtctatctcggcgagatcgtcttcgtcgaccatcagcttgaacctcgggtaagtcaagggaatccatagatccaacagagtctccgtcaacgcttctatcggaagatcggtctgcttctggattgaggtattgtctagcacagtttgtctgtataataggttcaagtgttattctatcaatgtcactttttttttggttttgtattagactgtgaaaggatgaacgagagaaaaggaagggggggagataaacgaacgcaaacaccatcaaggacttcactcgcacaacctttacatctccagcatccatccgatgaatcccaaatcggtagtccccacccttcgcctgccaatgcaccttcgaataacgcgccccacccgcctactccatctgtatctaattctgatgcctttgctaagcttgcgctcgtaacagcggatgtggttgatggacccagtgtctcgtctggcccgataagaacgggtgctagaatcgggatcagatgctggaggaggtagatgggagtaggtggagcggtgacgcgcgttcgacattgagggcaagacaggattttgggaggtggttgatcgaaaggaaggtttgtcgattggggcggtggagaggtaggcgcaggagtaaggaaccatgctcgaaggctaaaacaggagatgcgaaggagaagaaatcagaatggcaaggacaaaataacggtaggagtacgaaagggatgatagaccattggaaacaggctgcatgaccgcaaggtgaaatcctgtaagaaagcaattcagaaggacaaggactttcaattacattattatgaaaccatataatctagaaccaaaagagactcttacaaatatggtcggtccatcaagttcaagcaaatcccacaggtgaaagcctgtttgatagtattcattgtctccttatgagcggtaatctcctgttaatgtatagtaagaatgatagaaataagcaaaaccactcgttgatatgaaatcctatacaaggatgcgtcttagactcgaaataaggattttcgatgagaacagggtcgagaacatacttgatctttactcttgagatctttctccagatttaccacattcttcattatctctgcctcccttcgctgctgattttctgcagccttcattctcgccgctctctctctcaattcggagcgaatatccagtccggaactctgttttggctgatctatggaaggcaaggcagaagtggtcgaatttgagagatcggcaggtggcggaagtgacgaaggagcagaaggtacagcaggttggggagtaggctgagttgggaccgattcctcctttttaagctcttgggtctcaaccgcttctctctttttctcctcagtctgtttctgcaacgcccggcgcagggcttttcgttgttttttagtgagattggaagaactagcctgatcggttgctgatgtactcgcttgggtatgatctggagctgctgaagagaccgtggaggctggttgaacactcttttggtctgtatcttcttctggatcgtatcagatcaacaaggtcaatcttaagatggttctatgcgattctacagagatcagattcggacgaacttggaattgctttgagaccatcggttgcttcttgaactgtttccgaggccagtgatgttgacgcattcagatctttcgctagttttctcttcttcttcttgtgttttttgggtttcggctcatgcttcgactcgtcgtggttctctggttgattgtccagatagtatgcaggaagcagaaaacaggcggtcagattgatggttgaatagttaactggcaagccatgggacgtacccttttgtatcatcttttcgctatctttagtcgttcctttgctgccggagtcttttccttcgccgaggagagattgcaaccctgatcccttgtcttcatcattgtcggtgtcatcttcatcattactctcctccgagctggattcttctaaacgagctctttttggcgcgactcctcccgctccacctccgctgcctcctgttctgctaaagagcggtttgataggctggacctgagtgacggctacagcccgacctgttgacagtaacgaccttggtgtagagctagaggctgcggtaacagtggcagagacgggtgaagaggatgccgatgcttggcgggcattgaaggcaagaggccgtctgcgttgtgactgggcagaagaagatgatgacggacaagatgctgtagtgggaatacccacaggaacgggaatatggtctgacatgaggtatcaagtcaagctagggccaacgataaatgtcaaggtctgtggcagcagatgtagttggctaacagaatggattcgatcagaagaacctggctctgaccactataaagctctttctcttgatctcttgccggatccccctctctcttcgatcttttatctgtgcgctctgtactgtatcatacccgtcctcgctcctttccctgccatcttttctcaactatcttgtcctcgtctcgatcagctaacgacatatggatccatcttctgggcctcctctcgaaggattgagcagaaaatcttatgagctaatgacgcgtctctggtgacgcgacgcgacgcgacggggcacgtgccgtaagattaagctcgtatcacgtgactcaattctgtaaccaaccctgttcttcatctttccatctttctttgtgtgctctgttctccgttctcaccctcgttcttcaccttcttctctcacaactcattctctcatcatggacaaggcaaagatcgctcgacttcaggcagccgtcaagattggtgcgttggtctcgttgatttctgtgtttttccttttcttttctttcagtcatgagctctcttgttgggagaatgagtgcaatctctctttaacccttgtggaaactgctcggctgacttcctgctcacgtcaactgtataccccaactcttcaggcggaaagggagctcctaagcgaaaggtcatcaagacctcttctgcctcttctcactctaacgatgtcaagcttcacgccgcgttgaagaagctcaatgtcgctcctatcccaactgtcgaagaggtatgctccttttgctcgtctcaaaaaggcttctgtctgcgccttcgtctgagtcgtcctcagagacggtaaactctgttgcctctcgggatgatagatgcggatgttctcgtgagaacatatactaactctaggtcgattcaacaggtcaacatgttccaagaggacggacaggttctccacttttctgctccccagggtacgccctcatattttcctcttgagctttctttgtatgatatctgcttgtcctttctttttgctcatacggctgacccatcttgttggttgtctcttgttactgtagttcatgccgctttggggtccaatgttaccgccatctacggtggacagcccaaggttaaggatcttgctgagcttgttcccggaattctcagccagctcggccccgaatcggttagctcttgatttccctcttctttatatctttcatctcctcgttcgtttggctagctctttggttgagccttttttttcttcttccttttgtttggtacaacagcttgcctcgctgaggaagcttgctgaggcttaccagcagatggagtctcagcagcaggctaccggttcgtttccgtttctcacttgacacccgaagtggataggatttgtgtgttgaaacatgacgtcttttctctatctgaatgttttccaggcgctggaaaggctcctgagggagatgatgaggatgatgttcctgtgagttctatgcgtctgctttctcttcttttgatcgtcttcatctgaggaatttactgacttttctttttggttcttcatgaataataggagttggtcgataactttgacgaggctggagagaaggaggaaggaagcaagctcgatgagcttagtacgtccctcttgatccttttcgtcctatatgtttttttttcctccttgagtgatgttcaccttaccgagatagtgaaacgatcgataatctaacccttttggaaaaaaattctctcttcccccactgcctttgaatccgtcagactaaacgttttatgggatccgatccatcctgctatcgctaaaactgcaacatgagactcctcatttccgactatagtgtgatcaatcatatgacccctctaatccccaagccaaaactcggaccgaatcgttcttcctcttctccttcctctcctttttttcttgtttgttgatgctacccctttcgttctgtctttatgccgtttgtctcgtgttggttgacatgagatggacccttgacatttcttcttcttcttcctttttttttcttcttttttccttgctttcattggcctagccatgtcgtcttcgttccctttccttcctctcgttctcttgtttcgcgttcgtgtgcgatgaatcttggaatatggaacatattttgagaaaaagaaaaagaaagagaaagagaaaaagaacccctcctctccccctcccaactcgagtgtcgatcgcaaagcaagcgagaaagatcattcgggcgccgacacaagatagcaagcaggcaagcaagaaagagaagagaagagagaaaagaaaagaaaagaaaagaaacgcctcccgaggtccgagtcgggcggtttttttcttctcctcgggacgtgagcaaaaaagagagagggggggaggttgaacacatgagattccggataacgggcgatctgtgtcgagcctggtctggagcctgatcttgtatcctgcgtccggtgtgcgcgtttgacaccgtcccgtccgtttgtccgtttctctctgtctggtttgttggttctctggtctcttttgcctcgtcccttgtcgcttgactcttcttgactgaatccatttatagaagagagatataaaagatagcaggcctgacgttaaagggagaaaaagaaggaaaggaagggaaaacaactataaccaaagagcaacggaacaaggaaacagaaagatgaatctttggagagggacgtcaggagaaaagatgagaacggagattgaaagaagagagggaaaaaaaagaaaagaaaaaaaaggagatcaagcggaaaataggaaacatcatacaaaatggaaggccgagacaaggagaggacgaaaagagcagaatgatgcaaactaagcaaagagaaatccgaagagaaggaacgaaagaggtttggaggtaaaagtgagagagtattatggaagactatatatgtaagaaggaagaatgatgcaagcgttgcaaaggatggtatgaatcagacgtgcgaatgaagagagacagaacgagaggagaacgataatgggtggtgagaataaagggacgagagatgaacgtatcaatttttggtatgcaaacgccctgaagaacatccaaccccggatcggggtagattctctctgtctggatgaggacagtgtaagtccaagaaaggcactgaaagagaaaaggctgacagacgggcggtctagtctgaatgagatctatgaggtaaggcgagacgaggtgtggaaagaaaagtgcaaagacagaggaagaaaagaacaagcaacgagcaagaaagatgatccgctcttcttttttttttttagaacatccatccccaaatcttctggatgatcgacgtcggttctgggtgcttctcttgttcgaccctgtccatttcgtcgagttctcttcggccggtctcaaagtccatctccctgagaagagtgagaaggaaatgagaaagaagtcagtgctattcgtttcggctttgttttgtctcgctcattcgcgccaaattggaaattagaagaaactcactccaacgagaccatctttgtcatcctgagccagcggaagcttcccgtggtcctctcgccaccccaaagcttccaggggccgtagaagagtacgtatacaaggatacagacgtaggctgcaaagaactttgaggcggtaaagttgttaccgacaaagataccaaagccgttgaagatgatgacgagggacaggaagatggtaccgatccaactggcgtacggctggaacggagccttgtatggcaagtcgtccctgttgagtccctgtttcttcatgccgtagtagaacctgaggtaggtgatgaacaacgtccaccagacgagcaacccactcatcgaggacaggttgaatagccagtcgaacgctttagccgctccgccagagccgacgccgaggaaggcgaggaaaccaaatagacctgtgaccaacacagaccaatagggcattccatcctttgtgcactttctgaagaacctcggggccttgccctccaaggcgagcgcgtagagggttctgctggaagcgtagatatcagagttaccggccgaccaggctgcgatgaggagcacggcgttgatgacggagggaagacctttgatcccggcgttcaagatggcgataacgaagggcgaagcggagacgtcgtcggagccgttgagcaaccgggagtcggtgtacgggacgaggagaccgatgataaggatggcaaggacgtaaaagatgaggagtcgccagaagacccgcttgattgcctttggtacgttcttcctcgggttctccgtctcacccacggcgaccacgacgatctctgagccgaggaaagaaaacgcggcctgaacaaagacgttccagaatgcgaggaatcgaccccaggagccaccgacgacggtgtcgcccgaggtgtactggttgaacggtcctgggtttttccagtatcggaagccaatgtacccatcgctttcgggtccggctccacagttgatgcaaattcccaggatactggtgagcgtgaagaaggggtcggaaggaaaagaagagaagagacagatcaatccaggtggccagggatacacgcgcgcatactggccgcacggataccggcgaaaagagaagaagagaaagctggacactcacatcaaaccgacgacggcgatgattttcatggccgaaaagatgaactccatctcaccatacgctcggacgcccaacaagttgacgaccatcatggcgacgaacaggggagcgatccaagcagagacgttgatggttgcgttccagtactgaatgatgatactggccgcgacgagttctgtgggaagggtgataccgtacgagaaccaatagttccatccgagggtgaaacccatggcgggatcgaggaatcggctgtagaacgggcagaagatgggacgtgtaagacggggtgtgaaatggaaatgaagacagagagagagaggaaacttgcgttgcatagtgggtcaatcctccagagtcggggaacaaggtggccatttcacctagagcgatcatgagggtgtcttttttttaaagagggggagagagatggtcatatgatatgacgagtcagcaaggcaatgtccatggatgagaagagggaggcggaaaggcttacagatgacggctcccatctgagaggaaaggcgaggggaaagggataggatacatctggcgttagtctattggatttgtggatgcgatggaggtgggcgtgggtgggtgggta

SEQ ID NO: 172 - DNA, 537 bp, Xanthophyllomyces dendrorhous
gtgggtagtgtgacgggatgactcactgtgatgtaggcgagtaaacatccgacctgtttcagggggagagatagaagtacagaagcagagacaacgaaaggtaaacatcaagagacgatcaggtgagatgatgagaaaaggaaatcaaacgaaaaggaaagatgtttcccgactgaccggaccaccagactggagggctgaaccggctccgacgaagagaccggttcctatcgaaccaccgagcgcaatcatcgctctgttggcccgaggagagaaaagatgggaggagacagacggcagtgagtcacaagatggaacgggccggagaggaggaggagaagagacagagagacagagagaggagagagaacacaagacgtacagatgcctggctttcaactttcgttggacggttagctcaccggtgaccgagtgggacccgcctgaaggagaagaaagaagggatgagaatgagaacgagacaaacgtttacggatcagcctaatccgaggtggagccaaaaggaaaaaaaaaaaa

SEQ ID NO: 173 - DNA, 1227 bp, Xanthophyllomyces dendrorhous
gattgagagtaggattgcgtgggaagggagggagggaggagaacaagaacaagaacaagaacgaacggagcaagaaaggtgaaggaagaaagagctgtctatctgtctatctatctgtcgagcgagtggatgactgactgtgtgtgtgtgtgtgtgtgtgtgtgtgtgtgtctatctgtctgttctgaatggatggacgtgcgaacgaacgagcgagcgagagaacaaaaagtgcaaagaccaaagattcgtccggcgaaaaagatgagagacggattcagggcggaatgcaaatcgaaatggaaatgaaaaaaaattaaacaaatcaacatttcgtttccctcgcccccggagtcagcctagcggtcgatcaggcaccagcgcagacagacaggtgccctgaaccgtcagtgaatcgcccagccgccctgtggcgccgtgggacccgggagcgccggcgaccgtatgagcgcaggccgggagtgactcgtttgaattcaccggctcatcgtccctgcgccactcattcagggccacggccaccgacaccgacaccacacatcgttcaaacactgatttgtatacgccaatctatagctctgcttgagacccactttttcccgggagagggagggagaagagagaaagggagcaagcgcgcaggacgccagtaggccagaaagccagaaagccaggatacagactctcgatcagtaccaaaaaagaaagaaaaaagcatccttgatttcacacgatttcgattgatttgatcaattgatttccgtttccttctcttttgctaatccatttttcagcgtttttccaatacacagctcacaatgacctcactctgccaccccgtgtgtccccggccgaggttggagctagcttgggaaactacatctgatttgccaatttgtaaataaaatagaattcaaccagctagacgagggaaaggaaggaaacgatttggaatagattgagaatagaattcttcaacatcggttatctgtttgaaacccttccgtccatttatccattcatccgtccatccacccgcccatccgtcccatctttcgcctcccttcggtcgagtcccagccagccgaggaggcgtaaggccgggctggtcagctgccagagtttattcgtaggttctaaatgtctcgcagatctgtgcgtggacttatcgcacgtacaatctatccatacacacacacacacaca

SEQ ID NO: 174 - DNA, 6260 bp, Xanthophyllomyces dendrorhous
acacacacacacacacacatctacctacaggatcacgtgtcggttgatggaccggtccttttctcgcatggaaagaggaaacgttggacgtcgatcgcccatcgcgcatcgcttccgtccatcttgtcctcccttgtcttccttcgcagtcctctctgtggtcctttttccatggtgatcccttcctcttggttcactttaaggtctatccttttcttttgtcctcgttctctttttctctttgtttttctttttcttctccctctatcttcttggagaaaaacaaggaaacgtgaaaaacatcggcgtgagcatagaacagacgggagtacagcttccagtgctcccaataaacaagaacgacattcagcaaagggaaactatctcaaaggaataaggagaccgacagagcaacagaaaaggtggaagaaaagaggagagcaaagttttcaggctgtgtgatagtgtatgcgtgcaacgatggatttgaacatgaacattggtagaatttaaataaacaaaaggggaaaagagaaagaaaaaagaacgtttgatctgctacatctcatctcatctcgtctcgtctcaatcctattcccccttcctctgctaatctcgagacaccggtctaaagggggaaaaaatgtgtgtttgggtatcatcaccatctccttctgcttcctcttctctttgtctttccttttttttcccctctctccctcactcctcatcctatctccttcgtgtccctcgcttaggcaagaccggcctgcttcatagccttgagcatgagctctccaatcttggcaggcgaggcagcgacgatggcaccggctctctcaagagcctcaaccttgtcgctagcggctccctttccaccagagatgatcgcacctggatccaaggaaagaaagaaagaaagaaggtaatacagagaaaagtgtagaccagatcagcatcaagggtatctcaacaaacgaagcaaccctgtccaagcactcaccggcgtgacccattcgtcgaccggggggagcggttcgaccggcgatgaaaccgacgaccggcttagggtgagccctggtcttgttgtacttctccaaaaactcggccgcatcctcctccatcgaacctccgatctcaccgatgatcacaataccctccgttcgggggtcgtccaacaagatcctcaacgcatccacgtgggtcgttcccgggaaaggatctcctccgattccgatcaccaacgactgaccaagaccgacggccgtggtctgatgaacagcctcgtagttgagcgttccagatcgagacacaattccgatctttccaggggtgtggatgtgtccaggcatgatacccatcttgcatcctcggggatcgatgataccagggcagttcggtccgaccattcgggacttgctctggctcttcaaagcctccatcactcggatctcgtccaactgggggattccctcggtgatcgcaacgatcaaaccgacctcggcctcgatggcctcgatgatggcatcagcagccgagggaggaggcacgtagatcacagtagcatcaggcttcgagtcggatacagcctgtccaagtcccgataacccatttgaatggcaagcaaggaaaaatatgagtgagacgaaaagaaagaagtaagaacactacactcaattcaacacacgcccaagccaacaaggtagtaatagacgaacctccttgacagtaccgtacacgggcaaacccagatgggtcgttccagccttcttggggttcactccaccgaccatcttggttccgtacttgatggcctgatcggcgtggaaagtaccctgtttgtttgttcgttcgttttcgtggtcgtacatatgtgcgttgaagaaaaggcaaaaacaaagaagacgaagaagaaggaagaaaaaaaaaagaccccaagagaagccaataagaaaccgaggccgttcagatcagtatttggaaagatctctctctcactccaacaaggagggaaaattcggttacgaacggtctttccagtgaaaccctgaacgagaactttggtatcagcgttgatgagaaggtttttcaacgtgtcctcgtaggccagagtaggcttcgaggtagagaaagcccttcggacagcggctgccaaaagaaagagagaaccaaaaaggaacgtgcaggtcaaacgtcagtcagatgtgaaacatcagggcacaaaccatcacctaaggaaggaccggccgataaagagcttggcacgagcgacaatcaaaccaaagatacatacgctgtcgagcaaggatcttgaaggactgcatagccaaagatgaaaaggggaacgacgagagatttgggatggaggattgggtgtgagagagaggatgagaagaggaaatgaaaggaaaaaaaaaagaaaaaaaaaaaggcttaggcaagaaaaaatgggcgaacgcggcagtggaagagacgcacagtgggggagaaggaggggagaggttgacccgtaagaatgcataagccgagtgacgccgagaaagtccgatgacctatagatgattgtctatctgatataacccgcaccttaatgcagcaaagctacctaaggctacctctgttagggttatacctatagatctctgtccgaacaggcttcaagaaaaagtctcaacatacacgctcagagagaacacacagggaacgacaccatccgtctgtcgtttagttctcctttgaggattggaggatcgttctgttcgcttagccgacggctgtatacaccctgtttgtttgtcggtaagtgttgctctctttgattgaccaccacagcagaagcccgaacgaaatagcctgacttccggccaatctgtgttctacttctttctagagaataaaagatctagtaccttcacataaacccttcgaggatcggcacactttcgtttcatacccaatccgattcccttgtcgaccgttgtaggaccaacagagacttcctcgcccgtaaatatcacatcaggtcggtccatcgttcataccttcactctatctttctttcccttctcttcatcgatggcgtgtgtcatccatgagggtgaatgatgttcttggtttcctcgtctctttcggtaaaacacagtgtgtatccatgaaatgctgattcagacttctgtttcccttctcttctctcttcttcctctttctcctcttctttctgttctcgcactctagctgttgaccaagcgcatatacccttcacttgaccaacccatccccgttcgctttagacccagctatgtgagtccatccattcggcatcgtcattatcaccaccatccattgtcttttctcaattgtaggttggagaccaaactaggtcctgacatcaaatgtgatattctcttgtcgacctctttctatcagttgttccatcatctccatctgcaacgagttgaactaggattcccacattcgtgctttctcatctcaacttgaaagttgtcgacaagtaagtctgagctttttttcttttcttcttcatcgtcccccgccgcaccttcctccttcctccttcctcctttctcctttcctcttcttgtcaagcatccaagtcggattgaatccgactgcatcgcgcaaggtagataccatatggatgcatgtttgagaacaaagagacgagacgatcagcgatttgtaaaaagatgcacgagtggcgatctgttctttttcttcccttcccacccgccccttttgttcgcaaaccatcttctcctacaacctgatcttttccgtgcagaacaggacagaacccaggaagagcgcatacagtccaccggttaacatctgtcttttctctgcttggacccacatctttagctcaacctcgtgttttccctcaggaggaagaccagaatagatccaaaagctaacgagaaagcaagaaaaggaaggaaagaaaaaaaggccatgagttgggaacgttcctcctcccgatatccgtcccagacgtccctcccccttccttcggtttcctcaaagtcatctaccgccaccgcctcgtcctcgatgaacaacaattctcaatccgccttctatccaacctcgtcctcctgggaaagctctaaacgtcgaccatcctcacctccacacaactcctctgccgcaacatcgtcaggtagatctgcgatgggagtcgcatccatagggaaggaagaccccggatgggatgctttcagacggtcatcttctcggtctacatcctctagctccaccgctctgcctcctcttaggtcacacgcaagagactccctttcatctacacactcgtcatcaaccacgacagcagattcttcctacagaaactctacggtcgatagatggaaccttcctacagggagcacatatgcctctctgccacctccgacgtccgcgtcttcatcctcatctgctgctcctgcttcctccagaagttatggcggcggatggggtggcgcaggaacgaacacggcagtgggatccctccctcgatccggatcagacaggacgagcagtactagccgaaagtgggagtcagggtccaaatctcaattgcttccctctaggtcttcaggttcaacagcttcgatcccggcttcgacaaccgacgatgctctagggtctggttcaacgtcctcctgggagagaagacgagatcgactgggagaccagatgaccggaggacaggctccttatgggtcaaacacacattccagtaagagtcgagtaggagcaaactggggatgggatgacaggtaactcatttatatacacgcagcctactcgttccatctgtttggcagtttgacagacagtcgtgctgatgtttggcgtcctctttccttcttcctttcacacagaaactattcatcagaccatacctctgcagtggctccccctcctactgtttcatctcgagcaagatcccggtctccttccagatcgccacctccgccacaccatactcagttcaacagccgacatccctcttcctccaccgcatcgtatcagcctgcttcacgtcgggctgcctatccggccgtctcgtcatcgtcgtcgtccactcatgcccaccatcccccgtctcaccagcgatactcccccggaagaaaacaacatgctccatccagaaggtcgccatctcctgaatacaacacatactatgaccgacgaagagggagggaaccccgagcggaacctagaggaaagaaggagaagaagttctacccgagccacgagccagagaggaagatagacagatcgagaacaaagtcggcttcgaggtctagatcgagctcaaggtcatctatacattcttcaagatcaagatcgaggtcgaggtcggcgtctaggatgacgaagcaaaagccttcaaacagaggagccgacgacggagtcggagccaagacttcacagaggagatggtctgtcttttctgacaacaagtccgggatgtcctcccctcggggccgttcagaatctccgcctatgtctctagaaatggagcgtgcctgggctgccaaggacagagaacgacagcgaagagagcaggatccagaccgatcgtttgggaaacgagaccgatcggcctcgccgtctcttactgcaagccaagcgatcatcggttcggaagttcctcctggtccgggagagagaactcatgggtgggcggcctccgggtttggaggcgtcaactcgattccttcggcaccagccaacaaaaaaggcaagtgggaccgtggttcgcccgcgccaggtcctccgtcgggtcctcgatcaagagcgggaaaccagaccgggtcgtcaagcggattctttcctcctagtggacccgctgcgtctcgaacctccaactctgcttcgtctcctgctcctgctccccatactaccacccatgtttttggaccaccacccaaagtacctctctccgctgcggagaaacgggcacaattctcgaccggacctggttctttgttgtcttccagtcctgggaccgctttcaaagatccttatcaacggacgtacgagccttctccccttcaggctcatctactctcgagcgcaaacgagaaggacgctgtaccagcaggaccgaaggtccaccgaccgatctatccgcctgctccatctagattgagaccgagatcacctgaagagaaggaacctgtgtcgacgttcaggacgttggctccgccgccaccgccaccgccaccgccgcc

SEQ ID NO: 175 - DNA, 17700 bp, Xanthophyllomyces dendrorhous
gccaccgccaccgccgccaccatcacttgctgcttccagtgaggcaattcctgctgcacacgctcagaccgccgatagaggtgttgcttctgctcttgaccgtcatacggtcggaacaggggttgtgcagcccattcggtttggactgtccgctcagctggcgacgccaggcgagaaactgggaggaccaacagcgagggtcagcaagtttttctcgttggacgacgacaccgagaaggacatggtcaatcaagccggcgaacggaacaaagatagcaggaacggaagtaagccgaagggtagcgagagggatctggagaacgaaagagagatcgaaagagagaagagagaggagaagaggaagaaagacgcaatggagagggaggtcgatcgattcagcgagagtctggccgatcgagactcgaggctaccaagagagcgcgaacgagagggagaccggaaccgggaccgagatcacaaccgacctcgtgaggactacagagatcgagaaagggagttcagacgggaagggttccattccggtcgaccccatcgctctcaacgcaagtacgatgatcgaacagaacctggtctgatcccagcccgatatcgggaaccggagcaagagaaatctggtcgaccaaagaaacgagaacctagcgcagatccatttggaagggctcctagagcgtacaggtctcctagtccggatatggagcaaatatggaggaggaagaagccagaatcgacagttccagagagcgagatttcgagccacggtgaacgagacaagatggaagtggaccagccggccgagacggacgatcgacgagatccttctaccgccgctgcctcggaggtaccgtcggtcgtgtctactcggtcgacgtcacctgtcggatcttaccctgcctatccttcggcccagacccagcctgcttcagtctctgagccaagccatgtatcatcttcttcgctgactggtaaaccaagtcacgatgatcactcagctccagcccctgccgctcctgccaccccctttgtgaacggatctcagattccccctacgaccgaaacataccaaaagattgctcaagtcggagagggtacgtacggtaaggtgtacaaagctcgaaacaacgagacaggtttatatgtcgctctcaagcgaatccgaatggagggtgaaaaagagggcttcccggtcactgcgatgagagagatcaagttactgcaaagtttgaatcatccgaacgtcgttcggttgtttgagatgatggtctctcaaggtgtgtttctgccttttcttttgtgtatgtgcgtacgtttgctcacccaatctgtttatccatttgtttgtttgcggcacatgcagggtcttgtcatatggtgttcgagtatatggaccacgacctgactggtgtcctttctcagtcccaatacgtattttctccggccaacttgaaatcactctgccatcagatgatctctggtctctcccaccttcactttaaaggtgttctccaccgggacatgaagggctcaaacatcttaatcaacagcttgggcgaactcaagttggctgactttggactggcgaggttctatcataagcgtcgaaggagcgattataccaacagagtcatcacactttggtacagaccgatcgaactgttattgggagcgacagagtacggggctgaggtggacatgtggagtgcagggtaagtctcgaactgagtttggcgacaagatcgtgctctctcctctctgatttcatcgattgttttctcgataagagtgactgatccaatcttttaaatcatctcttcgcctctttaggtgcatcatgctagagatctttactcgtaaaactacgtttcccggtaagtcttttcctcctcctttctttctttcttcttctttgtgtacatatgaacctcatttcttattgatccgggaatgtccatcatccatcatccgctctcttgtttttaggtgccgatgagatcagccaactggaaaagatttattctctctgtggaactcctaacgaggaagaatggccagggctgacggacctgccatggtacgagttactaaataaggatgtcccacctgtcaggtcgaggttgagagagatctttgagccgctcttgtcaccgggagcgatgcggttagcagaaggcctactggaatatgaccctgttaagcggacgacagcagccgaggctctccagatggactacttcacaaccgaggagcctccgatgcagatgcctttccagtacgttgcctgcctcttacgatcgttaacgactgttatctaaatctccatacttgtgtgcgttgcgtggtgtatctgactctgtctgactctgtgattcatccgatcttttccttgtaaaaacaaaacagtctggcagaagtaggtggcgagttccatgagctcgaggcgaagcgagaccgaggtaatattcccctcttcaatcaaactgaacaaaaaaagagaaagagaaaagcgccgatgactgacggaagtggttgcgttttgtctacgctcttcgataactttagccaagaaacgagcgaaaggtcgagctgagggggatcatcgatctggtacttgaaggatcgaacaagaaaagacttatctatcaatcgtaattaatgatgtgtgtgtgtatatgtatttatatgaaaggataagaacagaaaagaactttttcttcgtagcttttcttctcagaaccatcatctctttacaaggcagaagatcttttctctatctctatatatatacacacatacgcagagggaagagccaagatcaaacgggggggagagtgatagaaagatagatcgaccatgtgtctctccattttctcgcgcgccaacaaatcgggattctgaaggaaacttcaagctcatgtctatccaggacccgttcgctcgacgagttagatgtacatatgactagccgcgccttccgctttcttccctccgccagccttccaaccggccgaccgccttccgctcgctttcccgagaccggacccgtcccagccgagccggtcgccaaacagctggtccagcaggctggctaggtcacccaggagccgtaacgttggtctgggagccggtaggatgaacagatgcgtcggaggactcgacagagggatgagcgagaggaagggagccgagggggagaggatatggttaggtggggagaatgggacgatcgatttctggtgaatttgttttgttcggaaggtaagagagaaagttgaagagagtttcgtcagtcgttatgatcatcattcgtgaatgagcaataacagtgcaagacacttaaagaagaaataaagacccacaggaagagaaggagtcgggctggtcgacagatatctgataggatgatcgtcagtgttcgattcggtcggatctgatgaagcccagatcggtgtggtatagctcgatgccaaatattggtctataacgataactctgaatgaagggttcgcaagacgagatgagggtgagatttgtgtgagaaacttcagagatgaaccgcgcaagaagaagaaggagaagaaggcaacgagaagactaactgtgaaggagaaagcgtctgtagaacggccagtgtcaacggcgtaggaacagatagaggaaggctggactcgatgaacagtacaaccaagtccggtgagagctgataaagtggtgcgatctagatcgttggaaagcacaagacggaccgaccacctcgcatggggttgagtatcgactcaagagcgagagcgagagagcgaaagaaaggcagatagaagactaacggcttcgtctcctcttttgacgattccatcgggtttccttccaggtttgatgtacccatcaccgaacaccccggcttcgttgcccaccaagaccaacagaccggctcccccttcacctgaccagtcaacgttgatctcaacagatctggccgagaacgaggccgaagctcgatgggattgatatgcgcttgcaggtggaaggtcttcgtcctctgattcatgaaagcccggttttaaatcagtgtttcaaaagaaagaaaaagaagtagaaagtgaaaagagacagagatcataggaaagccacgagtcaagtcggtcagattaacgaaaagaagccgaggactgatgacgtgaaacctgatgatctcttaccggaatccgactcgagggcgtaccgtgggggtgcgtggttgagcgagttggggtctgtgaatgggtccatgggtgcaagttgtgtatgtgagagtgcagtgggctatatgtaggatggatacaagatggtgatcttagagatcgcctttctttgtctcgctggaggtgttttgttctttcctggtcggcacagcctgaccgaccagcgaccatcaagctgaatggtcgatccaactcctaacgctatccgttcagcgttcgtttcattcaaatgtagctttcgatatgtcttattgtttcagcctggagggctctctttttccgtgttgtgtatagcgactttacagtcttgctttcgccctgcatttgctgtattcaacccggcatcatccgttgtcaattgcagagcgtggagtgtggcgtgaggagtgtaggctttgtggtcttcctaactccctgtctccttctctttctatccttctatttctgtctgggagtgaatgaacatgcatggagagcaccggaacgggtaacaaagaaacggcaaaaaaccacgttgatcgagggctttaaccggactttccggcgggctgctcgttcctacaagagacaaaaatcgagttttgggacaagtcagcagggtttcaaacgagggcagaagtctaccagcaaagaaaaaaagaataggaaaagagacccacatctttcgctttcctccgggggcgagggtgacgttgacgaatctgtttggagaaaagaaggtcgaaccgaaaggtagatggcgaaggatgagaaacaggcgagcagagaagaaaaatcgggtgggtgaatgggacaaaaaggatgccgagcgaggatgatacagatcgaggtcagctcgagtccagacttgacgttcctatctccagtacagatcgaacgactggacggtacgtcacagactctcaacatggccagagatagcacaaagaacagagaataaagaaggacgaaccgtcggttgtaaagaagtctcttcttggcccgacccttgggggtcttgggcttctcctgcttctcaacctgtcagaaattttcccgatccccacacaatcacattcacgcattccatcaatgttccaaccgattcacacccgtttgtcacacagtcaacgtccaccgtttcaacccaggatcgaaccaaatcgtttaaattccaattcgagattacaaataaaagaaaagaaaaggcatcagaaacctgtggcaaaacgaagggcctgatccggccgtttctttttcctgattccaaccagacgacgacgacaaccacagagaaggaaaaattcgctggaggacataccttggggcactgagacttgaccttaccggctcgggcgagagatccgtgaactgatgagtttagaagagaagaaaaaaaagatagaacaatccgtcagcatgtttgtcccaatgtttgtcctatggtttttcaagttttccttctctctctctctttgtctttcatgtaccatcaaacggttggtctacagagcgacgaacgagaacgttacgaaccttttcccattcttgatgatgctggttgactacaaggtggtactagttaactacagagagtagaaaggggaaaaagaagctctttcttgctacactaacagggtggggggaaaaaatgaagctcgcacgggcctcgaacttacccttgtgaaagggactcacgaggcccgtgcggccggtcggtgcgcttcggcagtatttgaaaagcagtagatatcttatgtagttgtcttaggtaagcaaggcacgcgactttccatacagaacctcaatatttcatcgctttggctgctggagagcaatctcggtcgatggtggtcgatacgtagcctttgtgaggttgagtgtctttcaaccataggcaaccaggtccatggaccatggacttagtttgtgttaggcgcgtgagctgtacaggtgattgggtagctatagggtgtgcaacagatgcagggaagagcgcagagtcagaagttcagggtttttcagataggatcgtcgagaacagaagcgcaagggaacagaagtgatagatcacaatgaatgaggacaagaataataaaactgttaacaaaggatccaggttcacgagactatgccatggatgagaaaggatgcccatgttgtgtatgactctcaaactacagaggtactgagcaaaggcagtatgcccacgatacaacccacaccgaacagccacaaggaagaagagatcactggatgtgttaggagcgcatgcgctgtgtgactatgagttgtggcagaggatctgtgagtccctggttacagacgtgtaacgccatagttacatccaaatacctataagaagtcgccctgcctccgacagggaaaccctttttttcttcaactgttcagcaacacgtaataaccctgctcgccggcttccctttcaacgggggagaactcaatggtggcgtcgggtcgctagtggatgcgagaaggagaccaacgttcatcatcaccaaatcgacgactttcttcttgaagaacgaacgccgaggcggtaaagaatgttgggatatctcttgaattatccaagtttgtttcgagtgtgggacatatgatgtgcacttatagatgagatgaaaaagataggaaagaagagagaacatggcatcaaggacaacctcatatgggagagctctcgagggcacagatgagtcagaaacagaagatgagcatcgacaggaacgagcgttgacaggaaaggaacaggaacagcggtcgacagtggagagttgacgatgttcggcttcctgatttcagcatgttctctctgcctcacgaacagcgctggttctctctctgtccatcgcatcttgggttgtcgcattctctgtcccttcgtctgtctgttgctttgtctgatgatctccttgactactcatgactgtctctatgtcacgctactcgtttgcctctttggtgcttactttcagacttggtggaacagagatgtgaacgcgtcacgcaacatgctgcaccttgaccttcaccaggaggagaacgaaggagcaagaatgctggtatctgacaccgctgctgctacgctagccactgaggttgaggctggcacataccaaccccatgacttatggagatgtggtggttcgtggtctgagggcacccaagtccaaaagggccatatatcaaccactattggttgaggtcactctcaccatgcgttttgcagactgaccctagggaacagacgcgtcccgtataaaacccaatttttttcttctcccccgtccggtatcccttcaacacacatcgatcgtcattgtgagtatttcgagtcgcccaagctcatctcatctcatctctatccagtccctaccccctcttaaaatgatgatcaactttagatgacgagtcggaatgaaaaaccctggccggacgactcccactatggccgccaaaccgctctctttccgttttggccggagagcaccttggtggtcgggaggaacatggccggaggcaaggagacgacaacatactatgcttttggctaagcgattcctgaatctaccccccttcgatcaatatcttcaacttcactatctgctcctgtatactcttactgacccttatcgtttgtcttctcttctatcgatcccaaaagtgaaagaccatggcagaccacgatgatgattcttggtcggattcttctgtctcatcgacagagtcccgtttggctacgacaaacaccatgctcggtttcccagatgggccaatcgacactgaagctgaccttgacgatccgcagacttctcatattggcgggcagccttcctttctgtcttcactcaccacattcccttctacccacacttctctctgtctgacgtgtgaacgaccgatggaactcctcgttcaggtctatgctcccctggagcatagtctggacgaccgaatcgtctatgtctttggctgctcccgtagtggttgccagggaccggacgggaaggggaggttcgtccctttccttcgtaggtcgttctcttttcttgactttcgcctcacgggctcacctgtacaatacatacatgtcttgcatcaactatcatatgtcatttcccctcaaaccgttcgcccgtatgaatacaccgaaaacaaaatgaagcgtgcggtcgtacacatctcggaagcgcaatgagaaatacgccagcgctcaagaaagacgagctgccaaaaaggcggccgcaaaaacgactgcgacagctgcccctcctgtagccaatgccaaggcatccaatcctttcgccgtgagtgttccccaagccatgggaagaacgtactaatgcgctgtgttcttgtactaattaatccctcctgtaacggacaaagaacgctggtctgggagttggctcagccacctctgccttcaatccattcaacccgttcagcgtgacgccctcgactgtgacaccagcctctccctttgggaatccgttcgctagttctcctaccgcaccaaatccgttcgcacctacgtctgcgcctgtttcgaccgagactcctccgttgcttccgcaagcaacctcggcgtcacatgagaccgtcttgacggatggagttcaccggctggatatcaagcctgatgagacatccgagaccggaaagacagagttagacctaggtttgtcttcatctttcttgtttgtttgtttgcttgttcgtttctattcgtgctaaggttgttgaagcaaagaaaaaaaactgataactaattatatttatccctgtgtgtatatgtatgtgcagcttggaaaaaaaccccgttctatccggcacagtatttagcgacccaacccgaacgactgtcgaaacccaagatctcggccgctcaaaaagctagtgagcgtgctcgtgccgaagcagccgccgctgccgccgctgctgtcaccaccacaacagccgaagataccggtctggaaacccctagaggaaaaggcaaagggaaaggaaaagaaccgaccgacgagagagacggatggggggagggaacagatgtcaacggattggatgatgtgttagataggtttctgaacagattgagtatcgagcctgagcaggtcattcggtacgacttgcatgcccatccacttttctactcttccctctcccctttctacacccttctccatcctccctcctccaccaccgcatctgttccggccaactcatccggagtacctcctactcctgcatttcccaaacgaacaggaaggacatacgatccttcaaacgtcccccgttgcaagacgtgcaagaaatcaaggtcgttcgaacttcaactcgttcccggtttgttgaacaccctaaaaccagaatctattttcgatcctctctctagtcctagccctacccaatccaacgacccatccctagatgcgcccgtacccacaacgacgacgacaacgacaactcgggacacccagacggagaagattcgacaagatctcctccagaccgttctctcaaaaactgaatccaccaagtcgctcaagacggggatggagtggggctcggtctgcgtgtttagctgtacgaccgacggatgtggtggagactgggccgaggagtgggtcggtgtcgaatgggaggagtaagagtctcctcttcccttccctcctctccctctcatggagggttgattcctatgttttcttcttcaaccatgctcttcttcttttccctcttgtttctttgctgctctctttctctctccttcatgtatcgtgggtttgatctttcgactcggcgcagagggagagcgcggcaaggctaggtcggagtaagtgatagttatataacaccgttattcatattagaaataaaacgaaaaacaacgacaccaccacctcctccaccattctcgctcattcgctcaggccactgaaacgggtgaatgattctttataaacaagtgaacagaggatatggtgttcatacgcgtacacatatagtccaagacagtcgggtttgagagaaacaacaaagaaatgacagagagagagagaggaagaagaagaagaagaagttaggcttcctaaagtaactctgtatatagtatatagtatatagtacctacagtataacatagagaccaaagcacgaacgatcaaacgaataaagaaacagacgacgcgcaagcaagtagacaaagggaaaaagtttcgcacaaataaacatacagtctatcaattaacaagaggggtagcaaggagaagaaaaaaaagcgggccagacttgggtttctgttaagcacagtattgttgtagtttatacaaagcacagttcagaagaaaagattttgaaaagaaaaaaagaaaaagcagaagtagtacaagagccaaaccaagcccacctctctggccatgggaaaccaagaaaaagacaatctcagaacctattgttccctgtcggcaaagacaccatcattgtcaatctctttctcggctttccctccccagagacattcaacccagactttctgtcggcctccttcttcgattcccacgcggcgttcatatgagtcggacagaaccgtttgtgagcaatctcgtaatgttcttgcatcgacgccatacaaggtgggccgtccgggtctgcgttcaaacaaggcaagtcgacaagagaaaaaacaaagagaaccgatgcaacgggataaggaaacgtaagaagataatcttaaaaaggaacaaggagcaaagaacaaaacaaaacgcacggtcacaccgaagacaagatggatgcaacttcacttggcttgttgatgatccttctttcacctcaacgaccgcacaatccccctcgataggtttcccacagctggccagtgcgcacaacgacccgctgttggatacatcacccgagagagagaagaattgaccgagtcaagtacagacgtttaagcaaagatgacatgtcatgaaagacggaggaggtagagacttacttctctcgatggtaacaccattcgcaaaatggccgagcatcaaacacccagaatgtctgtccgtcgaacggccggtcgcatccatagcacgtgaagcatgcccgatggtatttgccctaagacgacacacagccatggttaatttcagaaaacgctgacttgatgagacacatgctagagcagcgcgagaaactacgtactttgagttgaccatcagcagaggagatcgcctggctctcgataggaagggcacatcgtcggcacttcaatgtcacacaataacccatcataagctttccaaccttttgtgttgaattctactctcaaagtgccagaaaatcaaaacataaccaaccttgggcaagtacatcatcttccaatccctctcacacaataccccgccttcttctttcatcctgacaaacttgacgtctccacctacggcacatccacaattcttgcacgcctttctcttcgtctgcgcgttctttcctttgggcagatccggtcgactgagtcgatgttgcttccctccgtctgctgtcggagtcggatgtaagggggaggattctgtcgatgcaggtgtaaaagtgatggaaagtcgaagaggagtggacagatcagtctgaacatggaggggagagatcgaactggaggattggtccgacggtgatattgacgatgacgatggcttttgtcgagagagacccgagtttcctccgtcaaacgcaatagcactttctttgtcttcgtcgtcgtcttcctcgtaaagctcctcggctccttcctcatatgtcccagctgagtcatacccacccaaactactttcctcatcgttctcactctcgcgcccgtgaccgctctcgctatcgacttcacttgatagccccgatacaccgaggacctcaggtcctctgagtttatgagagcccttgacctggccagagcctgttttcgaagcagcattgacgtctttctgaatagcatcgagtaaaccagatcggaaagatgcggagcttgatgagcgagacattcgagcccagggtaagatagaaccagagtcttcgtccgagccgtattcatcctcgtcccgttcgtcgatatcgtcgtcatcgtcgtcatcgtcgtctctcccgtagaaaggtacatcggcttcgatgcgcggtagtgagaatgagggcttggaggatgccgaagaagcagaagcagaagaaaacgaagcagaatggtccggtctgtgtgctttgtcttgaaaagggaggtgtgtatgattagatttcgatggaacatgttggtgggaagatggcaccaccggatgacgatccgagtctgatcgaaccgacgaagatgatgtcgaacagagcgaggtccatggagaagaggcagaggatgatgctgacgagagggaagagacggaaggcgaagaactggccaggtgctgctcaggatgatggtgaggagagggcgatgtctgaggctgaggaactggataggtcggagatggtggttgacctagtttgtacgacccaatcgagttaatatggagaaaggagaaagcgaataaaaggaaagagcgcatcagaaacaagaacgaacctgctgctcgtcgccttgcttcctcagccgcttgatgttgtgcgacaacgaatgttcttcttcccacacctgcgcgcccggctcctcctccaacttcggtagtccttaaacctaaccgcctcatcacctcatcggctgattcccctccccctgagggagagggcaacgaaggtcggcattgccaggaactattagtgggcgagggaagcgaagaaggatttgagataggggaatcagattgattgggagtgaaagagagaggcggaggagcaggcgaacgtatcgatcgttgttgctgttgctgctgttgttgatgttgttgctgaggttgccgctgctgcagttgctgttgttgattttgacgctgatttggatgctgaggttgaggtggccgataaggagattgtctcgatggagattcagcggctacgagctcgctcttcaccggactggttgaataggatgcagcaagcaaaggtctctgtatcggtacgtttgttctaggcaggcttgactctgcctttgacgctggctgtcgtctcgtcgtgtttggtacagtcgggttcttgatacctgaaggagaggcaagggcgagggaacatacatgatctcctagttcatggaacggtacgggtgtctgacagttggagcactacagatgaaaccagaatcaaatacaagaaaaaattggatcagtttctacgggtctcttcgtgtacatatgttttgaaaaaagggcggtacgttgacgctgggaaggacctgggacgctcgctctcctcccggatggcccgagcggggaataaccaacggcattcggaccgggcgtgtaattaaatcttaaatggaagaggtagatgtaagaaggaaaacgtccttgctaaagagagtgggtgctcaaatgtctgttggaaagaaaaaaagagaagaaacaaagagagtgattgaataaaggtgtggcctgatggacgagaaggtgaacgaccggagggagaggtcgcagaatgaagcgtgcaggtatattccattcatttcgtcatctctcaggggctcaaacatccagagtcttgagcagccagcatgtttcatcatctaaagatcaaggcttcttgtacgttcatgtgcgcttgtgtcaagagaggtttggtgtagttggttctagttcaaagaagaggaaagcgtacggaaacagtggcttcgtcgcgtgcttccaataaacaacagttctctcgtgtgtagaggaggaaagggaaagctattcatttacataagggaacccagaatactcttcttcggttttcccacttttcgtccacttgccatcctcgccttgaccgcttgcttgactgccttggactgccctcgttttccgccttcttcctcactcgaactgctgtcctcatcttcctcgtcgtcgtcatcgtcatcgctcgattcgctctctgggtctagcgctacgccactctgtttaccgatgggcgtgctccttgcgctacctgagatccaacctccaattcgccccaacacacccgactctcttcccgctgctttcgcccgggcggtttctgaaccagccactgcgaattcagccttggaccgctgggacaggtccgacaatcctggagctcttcgttgggatgaactcggaagagcgactggctgagaaggcggagggagaggaatcgaagggtacagagaaggagtggccgaggtggtcgctgagatgctaggtcgaggctgagaggcacggttgcgtgaataaggaagcgaagtctgtggactatttgacggagtcggctaccatgtcggatgtcacatattaacgttagtcgtccttctgccagctgccaaaacagtcaaagacccgaaaggaaaaaaactaaccttggagacagaggcagacttatcctcggtgggtctggccgacttggcaggcgtctcttgtaccttgagggtctcatccactgtgtcttggacctttccgtcgacaacggtgaccggttcttcttccgcttgttttaagtccgagttacctaaactctcccttcctaccgaccgctggttctcaatctgcttagcacccgcccggagaatcgctaaatccgcatgagcttcctctttcgccctctcttcctcctcctttttcttcttcttctccagatagtttagcagcatctttgataacggctttcccttcttccgcgcgttctcgatcgcgatctcgtgctttgctgcaacttcttcggctttcaccctggcggctgctgctttctcagccaccaactcggctcgccggttcctgatctgctcagccttcgtaagcgtccgaggggtagcgctcggcgtgttgacagccgacgacgaaggaggaagggaaggagcgaatctggattgaatggacgaaggtggctcagattccggataatcgccttcgctgacttggttttcaacctcgacttcttctctcctggcgattagactggatgaagatgaggtctttcgagacacgtcgccaccaatcggacgaccccgagtcgatgcacgcaaaataggtggctctctgtcgacatcgtcgtcctcgtccttatcctcctcttccttctcctcctcctccttctctggctcttggttgcctgacccgattgcttgagagtcattactgttaccgtcgactctgtccaactcgcctgcttcgtccaatgctcggttgagcgtgctgaacgtcaacggcggttgggacgcgtcgagttcttccagatctcctaatgattttcgaggttttggtgtagtttcaacagccggagcgtcggtgacagtggaaacctgaacagggggttcctcccacgtaggttcaggagatgactcgttcgaccgtacagaaggagatgagattaaaacccgaggtgggtcgttcaccctcccgctgacgactagaaccgagccggattcactatcgagcccttggtcggaccaactctcgatcgtctcactttgaacacgtttttgagctccattttgtagatcagccggttcttccacaataggatccgcctcctcttcctcctcttctccttctccattaccctgcctctcttcggtttcagcatcaggatctttgacaccagggggcaagataccttcatcatcctcgctttctgagaacgctccgctctttcttcctcgaccctggctcaacattgacgctcgtttctttttcggaggactatctgtagcatccgagtagtggaccacatcatcatcatcatcctcgctatcatcatcctcctcgtcatcatcgctatcgatggcggggcggaggggagcaccagagaaccgaggaggaggaagggcgtgcttgagtccatttggaagactagagcttggtgccaacacgttcttctcttgctcttccttcttcccactcttctctttctccttttcctcactctcctcttcgtcatcggaagaatcatcggaagaggactcggaagtggatccttctccatcatcctcgatgtaaacatccgaatgaggttgtttctcgggagacgagggagctacaggtccagctggtgacgagagaggggtcatagatcgggcttttaggggagtccgttgttgattaggagtaggagggttgataggagacacggggacgggagccggtagattggaaggttgtttaggtgtgggaggctaatcatgggtgcaacataacgacagagttagccaaaaagcgcatggattgtactcgtgattacgaacgatcaagaacttgcaagtttcccttttgtgttgtgagcaggcgtcaaagtagcaggagcctcgttttcacttgactgtttacatttcggcaccccacgtttcagagtgggagagcgagagagaagtaattagatccagaaccagaacgagaacaactattgataagcgtcggaactgtgtcccatttttgggtaagaagatactacatgggttaagctaagtgacgaacctcatcaacttccttctccttcccaaactcataactagaaggcaatcccaattctaccgagtttgcagcaggcgagagtgcattctgagactgtgttgatgcttgtttctttggagacgaaatcggttttccaaccgtactcttcctcttctccttcttctctttttcaggctctttttccttctcctgatctttctcagaagttgtaacagcgtcgcttgtcacagaagccagagaagaagacgggaagtccaactccaaagccagaggagtggctcccatcgactttctcctagcaacagctgctgccaacgtaggaggcagccatttctcagcttcccaagacttgtcattttcaccctccgtcactttctccttatctgagatagagataggctgagtggaaggtgcaggaagagattttcgagacttgggaaggtaaatagggggtgcaagggaaggaagttgaggagctttctgcgcaggtgtaggcgtaggcatgtgctttgatacagaagccgaggatggagcaggggctgaggccggagttgatgaagggggtgcaggagcgatgatggctgaagtagcagaagcgacaggagagacagcaggaacaggagtagaaacaggagggacggtcgaagtctttcgtcgtttcgccggtttctcagatgtcgtagctgccttactgggagtcttagatcctacttctttccctgtgcccttctgagaggcagcaggggtaggagtttttgtagtggtaggagcctcggcgggagtatgtgtcttagcagtgtccacagcggccggggcaggggtgggggtcagagtaggggccggggcagaggcagaca

SEQ ID NO: 176 - DNA, 18106 bp, Xanthophyllomyces dendrorhous
cggggcagaggcagacacagacggtgtgggttcaggctcaaactcgagcataggacctttggctgccgattgagaagatgtgttccgctttctcgaagtttttagaacaggcggggcactcgctggagctgccaaaccaggaccggcgctgttactagagagaacggacgtagacggggcaaccggcgttcgaggagctggggtcggagcaaactgtgttttcttcttagcggatggttgcttaggcgaggccacctctgttgttccagaggcattagtgttattggacgaagaggacagattgaggacaggttttgggagagcggaaagcaaggtagtcgactgggaagctggtcgaatagttttgttggcagacgacgaagtaggagggggaggaagcgcgcgaggagtgagcgtctgaaaggaaccagcgagtgttgatacagacgcgggcgcattgcccggttggaaggaaatggtaataggagcatggggatcggacgcccggtatctgaatacatcaaaatcctcctctgtgagttagaacaagcagatgagagtcagccgaaagtagacgcgtacacctgagaagaaaagttttccaagcgctccatgccggatcattcatgtactctctatgagaacaagagcaaggagacaaagaaagattgataggaacagagggaaaaaaagacacgaaccgtcgtccaggtcgatagtcttgactccgtccctgccacccctacccggctcatatctcaactgagcgagctcgatgtccaaaccctccgggtacttcatctttttcctgacgattgtcttcatttgttccagcgtgaggctctctatgaatatccgaatgcggttataacggaggattatacgagagaaagacataagaaaatagaaagaggatgagcgagatattcatcccgacgcgtgtccttatcgcattcgaacaaatcatgaggtgagtgcaacgacgggaacgagcgcaccttggaatattctctcgaatatctttccttcaggtccaacatatgtgatgatcgatggatctctcatcttcttagcacgcttggcgggtggaggagcattgagatcggtggccgtagcggcggcaacgacggcagcgttgggattggcagtggtgacattaggaggagcacttgaaggaggagcggtatgaacggaaagctcgtcctggttagcttgcgccttacgcttccgggatcctccaccggcagccttacgggaggacattctggagagagaaaaggtgtagagacgtgaaaggatgagtgaaccaggtgagggatggatagaagaggaaaagaagaaaaaaaagaagaaaaaagaggcgggtagaacaaaataacgataaaaataatgaggccaagcgcagtctcgtccgattacgaaatctttggacagtttgtagtgtcctattagacctgttttgtagtctagaactcaatgcttccacctcggcttgaagcaaccttactccttgcaacatactatacccaatgcgatagccgaaggaggaaagtcatgaatatgtgcacacagccatgtcaaaagatggatatagtggaggaatcgatcttttcgatctaacaaatttccatttcgccatgatagtccatcaggccttgtatatgtatattcagaatcgcctgttatgtgtagctatcgataaaggaattgttgtcggtttgggtgattagagaaaagtcgaaatatgatctgttggctgcaactgtatcacatatgttcgtgatagatcagtagatccaacaaattctagatatgacatttcactgagtcgtctgagcccactgactgactgtataaaggtcaccaagaacacaaatataagtttgggcaacgtttcagacacagctgttcatctaatcttcttcaacaggtaagacgatagcagctcatatcctgaaaactcctcctcatcttttgattgttccgcataccatatccactagaaggcactggcgctgagcaagacatacaaatcggcgcgaagagctggtaagcttggtcgatggtggccaaagacagataggcaccgaggaacatgtgtacagctcattacggaccgtggtaacataggatttcatgtccttatagactacggacaatcaggcgtcgagtattactagatgtatggctaagatatgagatgcataacaccaataaatgaaaggcagatggaagccgattgactcgcaaacagtctgggcagcatctatcgacagtacacctgccatcctgcgcttactttccatcagaagatatagccgaggtatttccccagcctatctgccccatatttaatcttcttacacccagatctctgttagtaaacgaataaccagaagctactggtgtagactagaatgatggcttattgagtgatctgaattaaaagaactaggaagcttgcttcaacccttagcaagcaaggagaagtatatatgagtattatgtgagtattatgtgagtatcatgtgagtattatgtgagtattatcgaatgtttatcgcaatgaagatctgatctggctcgcaggtttgttagagaagatgaacccgtctcgttgccgtagcaggtcaatcagatgtattagatagtttgagaagatacatgttagtcaaggcaagattaatgaaagcgttcagtctatcactctcttcctcttagacttctcctctttttctttctcttctaagtctacttccttttctccgtttctctgcctctccttttcttctcctctcttactctctctctctctcttttctgtatgaatgaaagactgtaagatgcgcgcgctgtctctgatctcaaaatgtgggtctaaggatcacgatcgttacagtgtaaccagcccggccctagtcttcagccaattttggttacaccgtcaaattggcctggaactcttgggaaaaaacttcacaggcagaagatacattcaaacacatacacacacacgcttcatctcggtaaggaaacaccctctatagagtagaagatcgtgagcatagacaatggagatgagaagcatcaaggtgtcccaatgatgaccatcagcactgggcactgaagtcatctgatagataaagctcaacccgtcttagcaggacgagggcggacgtagaaaccccgtgactgagggacaccttccgctgtagacctcttcttcgtctttgcttgctctttgtgctagttgatgttgatccttgcaagtacttggaggctgacgattgattcttttcgtgttttcttagatcttggagaattttcactagagttgttttcacgtctcgcagaattttaatttctcccaacggattgtatgtgcatatacttccctcagatttcagagacaacatttgaggccatcatcacaggacgtcaacaggaagagatgagaagggtttccaatgatgaccatcagcactgggcactgaagtcatctgatagataaagctcaacccgtcttagcaggacgagggcggacgtagaaaacccgtgactgaggaacccttctcatctccgtactgctactctgatgatggcagtcttgaggattcatcgtgaatcatgtttaacggatcaaccaactgacaatatagttctgttacttcagataaacaaaatgtccggtagtatacacgccgaggcatcgacctcaacactgccttcaacgctcaacacgatcaagacgtccttaacacaagtgaacgctgctctctcgcctattcttaaatcgtcagtttctttctttcctttcctcacttgcgatcgacccttctgacctcaactttggaccgcgtatctagccttcgctctgatccgtcctcgttcaatctctcaaacggactttctctgttatcgcttcgaccgaatcttctcctttcatacatccacctctacactctcctcctcggctcttctctttcaccttctactgctccgttaccgtcatcatcatcgacaccatcgtctacttcatccgtcctcgactcgttcaacgcaccgagaagccggacgggccagccgagcgagcgagacctgattgagcaactggtgctaatccgggaagtcatggagcgagtcagaggaatggagggtaaagtcggaaaacaagtcgatcgtctcgtcaagggcgcagaggagaaggaggtcgatctagcaaacggtacgcttttgatctcgatcttctcttaacttttcatcaatacctataactaaaccagtgcttctcttctttttctttctctctcccctctgatgcagaccctatgtcattccgacctaacccatcggccttggtgaaaccgaatcagtcatcgacgactgaatcggcttcatccccatccggcgaaaccaacggaacctccacttcgggcgtttatcgaccgcctcgacttgctgccgtgccataccttcctcctacctcaaaatcttccaaaacgaaccgagccgaatctgggtctgccggcaagacgtcaagcctgttgaccgactatgcgttgtcgaccgtgtcccatctacctcatcaagaaactgtctccggtctaccctcactttcttcgtctgctcgagctagtcgtgcgaaccgatcgctcgctcaagaacagaccgagtttgaggaaggtgccttcactaggttgacgttgaagaaatcagaactgaagagaagagaaagagaggaaagagacgatgcgcttggacttggtggaggtagaaacggagggaccggttgggaggacgtattgggtggtctcggtggtgggagatatgattccggaggggatagagaaaagggaggggcctgggagaggagaaagagaggaccggatgaaggggagagcagagccgggccggcaaagaacaagaagggtagattcgagactagggtcggaagtaagaagggaaagaattgatcctcctctctggtgtcttctttccttctcgatatccctatcatagtctttgagaacacgactacaatcatgaatatatatgtgcataaaattatttgaaagcctttccctctttcctaaaaaatgaaatgaaataacgaaaaggcttcaaccaactctgacactcctcctgaaccacctccgtcggcgaaacgacccaggttcgaaatctctctctacaaccatggtctctccgtgcatcgcgtgtggtgcgagcgggatttggttaggtgagatatattgccatccatctttcataacatatgaatttacgtatgtgtttttgaagagactttgtgtcagcgtgtactacttgtgatttagagataaaggaaatcagcaaggtagagaggtagaaaagggacgaaccggaatcaacctcgccgtctgcccagatacctaccctgtcaatgaaccaggtttcaccagggatccatatccagcctgatccttgtttgatgctcagtgacgtcaaattcaagtgtctatttgatattcggtgttcagtaattgaggtagaagaggagaaagcaagaggaatactcagagcagaagaggatagtcaagatgagaaatggaacagacaactcactcgcctgatccaacttgaccacctatagatctactcccttccttctcggaccaaccatcttccgtccactctctcccttcccctcctgctccaccgcttgctccaggcgttccgtcagtcccagctgtaccaccacccgagacatgagaagtagactcttttccgcttggtcgaatccatcgttggttttcccacacgctaagctcgcatactggtttgtcgcgaagtgagagtgggatcttgtcgttcagaagactcagatggagagcatggagttgagaggctaagataggtgggatgggaagcggtagaaccgataactccccaggagatctagggtgaggaaaatcaagcgcaagaagaaaaatccgtcagaagaccaataccggtagcggagactaaaaagaaaggccttacatcaaaccaaagagcaatgggccccaacctaagggcaacagaatcgcccaggccggtacaaatttccctccgaacgcaactccaacgagagcaaggacgttgaaggcgatcagagtatagtgtaatgggtgtattggtgaaaagacctgttgagccacattaatggcaaaatcgtacatatcggaactgccagcggaagatagacgagaggtataagtaatcggtaacgtggacgatagaaactaacaaaaaagaggaacgggaagaacggacaaggagcccatgagattctgaattccttggagattttggtaataggtcgtagtgagaccagtctcgattggcgctttcctcgcctgaggaatctcgtgtgaaaactggagaagagtggtaatcatcgaaggaaacgaaaggaaacaactggtcagcagctcgtttgtatgatgacaacgccggaaatgtcaacagcgacctacgtctgaaaagtcgccagatagccgagatcctgcttttgaatcccgactgaggccaaccgagctagcttgtattgatccgcttcttccgtgtaacatttggaaggagttccttcgagccgatggggacgaagtggtcctggtggaggtttcaatctctgtagatccagagcgggagggagaggactgtaactctgggtttaaagattggtcatcgatatgaggggcaaggagaaacgagattgtgcccagtagaggtagcatcagaatcagatgagggtgaaaggcttcacaagaattccagtagagcaggatcagtaagagatttatgcgcttgcaacaggacggcgatcatgattgacgtacagatcaacccccagccgatcatccaacctacactccattcttttcgtctccagaagacaacttcctctacaaaatcctgggtgtcaaaaagccatcccactttaaggacaaactttcgaaagttgccggttgtactcgttagattgagatcctcgcgtttgctgctagggccgggccagatgttcgggtctgagtgatggtgatgatgatcagttttcttcttatttgactttgggatcccaggtacaactgcggatagcagtaaatcactgatctgagtagtgtatgactgaggaagggaggatccagcaggtcgagcggcggcagcaggaaacgatgattccggtaacacagtcaacgtaggttctattgtagtcgctgtatgaaaccgatcagaaggatgagccgtctgtttcaaggaggatacaaagaactggacatctactggcttggctgcaagcggtatcgggtgggatggatgtagagccatcggactcatctgtagagtacgatatgagatgtatgtgtatatgtgtatatgtgtgtgtatgtcgtctgctcagaactcataaggttactgaaggtgattgaaataaccggttgacgtattctgagtcacgtgattttcacgtgactcgaggcggtgcattttacctggccgccagcgatcatcttgctatcatcatcatcatcatcacctatataccttcgacttggttgatctcccactagtcggcccagacatgcttccacaccctctttctcctcttacagtccttcttttatcaaccgctctcacatctcgcctggcctcaggatctctaacaccgattgacccgttcgctcatccgaaatatgcgattcagttcttgaacgatctgccattggaaaaacaggtggcagagagctggattgagagaggaagagctcctggtggttggagagggtttttgaacgagaatgatcctgttggaagagattcgaccgtgccagctttgattcaggacaagaagcaagaagatgagggaggagaactagaaatacgtcgttcgaaccaagagggtggcaccaaggatgaagagaagatcatggaggatgaggatgggagtcatacacttcagtcagttatgctttggccgggtccaagatcatacgtctgcttgatacctcctccttcaccggaacctaaagaaagagaaaagccgttagtgacgcctggaatgaatccagagttacctgctcagcttttaagtcatttagaaggaacttgcctctatgtacgctttgtttcaactctttctaactttcctaaagctctatctgtgtgacaagaatgcttgtgtcgaattgctttctcaccttttggcttatctgatgggattaatttggtatgatagcaccgacaaggctggttcacttattcttactgtcacggttctgaagttcgtcagtttagggaggccgctcgggcgtggcctccgctttctgaaggatgggtacctaaggaagatcctcaggtatgttgacagagatatgaaaactgttcggattccgatactaatttaaacttcattcgactgcactcgtgcgatactagtatgatgcctacgttcttggtgtatgtctctcgtgtcattttgcatctcttctctaatttgccgtatcattctaaaaacccttgactcttctctcgcttcactttaatcctacacttgtttcgtccaatctgaacctgggtacaacagacagctaaacatgacctgcaaatagagagcaacaaccctggattttcactcggtatgggcgttggcgctcgatacctgaccgctcgatggggtggcgggacagtatgtgaccgaaccaaggtcgatagagagatcgagatccaggtaaaatcatatttccctcaagtttccaagattttctgtcgtgaatcttatctataggcgaaatcattgatcagaaaagctcggttgaccaaatatagtttcactgctcgatgactggtactgatggaatttcactgatcaaggaagtctcgacgtgagtacaagaagcacgggctttctctccatgccgtgtcaggcgcacgagttcacttactctctgttcatccacttttcaacaaacaaaacttcagttgctcttatattctggtgattgatacgcccagactatgtaacgtcccgggtttctcgtcggcacatttatcagaacccccgacaaacatcacgtgtagagagattgtgccggatggatctatcccaaacgcagagattgagggaatgactgtaagacctttccctggttctctagttctcagttttcttagttattcaattcctaaatatcctgtgggaccctatgtatttgctcgatagaaaccgtcgtcggacaagacaccgttaccttcatgggcgatgatcgggccaccacctgttccgaaagggaatagaccacccaccggacagcaaaagaccagagactcttcccaacctcagcttcggcccaaagcgcgttcaaaatcaacatcgccaccaaaatcaaaaccggaatcgaaaccgaacccggtgtcaggcgcaggagctatgaaacccgacccggaagctaaccaagacaccccgccttattctagcgcggaaaccaactctgaggagggtccggaatcggaaaccaaatctcctccacaggtatacatacttatggaagcggaagtagcggatggtgaagagaatggcggagcagatgacgagaacgggcatggaggcgagattgctcggttgttgaaggctctcaagaatggacaagcggacggccggtacgtcggtctgttgtccgaccctgtgcgcactgacggtgatagcgttagcgaagaagaacagcaagaaggagaaggagaagtaaatcaggaagaagaagaggaagtatggcagattgtagtactgaaagacgaaaatggggatgatctgatattggaggtacctgtcgaaggaaacgatgatgacagcagcggttgggcgagagacgagttatagatctccttctggagagcggtagttgttcgagacatattgggatatagtgttttcctcattgatgttctctgatatatgtcgctcaaaaacgaaccaggctgatagtttgggaaaaaagaaacaagaaatgacattcattgatagcctgcgtcacccaaaagaactctactagtacatctctcaactccttagcccccgaacacctatcgagcctgattcatccaccaaacttcatcatcattgtcgttcctagagcgtataggacttcgttgctaggcaacaagccatggttgtccctagcgaacgcaatactcaggtcttcccaagatcttgggttttcagggttaaatgtcgaccacgataatgaagccaacgcgcttggttggttcctaacattgggcgtcatggtcgggttaaaagaggtcaaagggtatattggtgtttgtatcgaggctggagttggagtggggactgatgttgaggtcggtaccggggcagccggggcaggatggctcggaggttgatcgaatcgtgacttgcgttttttcgaagccggaggcactgtcgacggatcgtccgaaggaggaggtttagttgaattggaagttgagtcaccgacggactgagaatttaggtttaaattagatggtagtgaagaaaccgtaggcacgactggtccgttcgatatgggataaacattggccgatggtggtggtggtggcggtggtagttgggatgaaacgttcgagttactcggaatcgggccggaaggatacatgttcggacgatatccaaaacctcctcttccaccttgcatacctcccctacttccctcgttgtatccaggaccattcattcctcctctccctctatatcctcctctcccaccaccactaccaccccgtccacgtgaattcccacccgagcctccaggacgccatctgttctcgtttatgccattgttgacagtagaaccgatataactttgatgatcactcggtccttgatccgcttcaaactgagggccgttgaatgtgttatcgaattgactattttgaactggaaacatctgattttgcacttgattatagttgtaattatagttggcttgatgtagcatagggttaattgggcccggaacaggtggagcgtaagtcggaaacgagttcgatgagtgaattgggacgttcaaatctgggttgaaggttgggtaaactgaagatgacatggtcggtgggaaaggaggcatagtaggaggacctgataggacactcgaagttggatccgccgacgcgttgtgttgtatctgagtcgagactgagttttgaatctcatgagaagggataacggttgctgaggattcgattcgcacgacaggagaaggatttgaaggggtttcaagtgttgcggaaaccagcgcatctgatgaaggtgcagaagcgctacccaagagtatttccaaatgaatggatgacaatgagtcagcccgaaaacatgttctctaggtataaacgatttcatctttgcaagatcctgagaaaactcacggggaaggactagaactcgtgaatttttgaaggagcgtcaacaaagatgccggcacgccaactggaggaggtgtcggcgccgatgttgatattgctgctatatcggagggtggttcgataaccccaccagaagaacgaataggcaaagggatggttgacgtttttaagggtgttgatgttggtaagaagtacccttgtgaaggaagagtcagagaaggtggagaagatgtaggagttgtagtcgatcttgaaacatctttcctgcctatgattcacacgcagcagccaagcaacaagaagacgagatggaaactcgaagggcatcagtgatctaaatcgacccgaaatattatgctgacaatgagcattagggttcctcacttgtactaggagtagaactccttgaaaccttcaagggatcctccgaactattctgtctaacgacctcttcgacgatcaccgtcggagccggggtggcagcttcgaccaggacttgtaatcgatggatgacctcctttgaaaatgttgatcctttttgccagatatcgagaattttttttgttttttcctacagagaacgagttgtcgtttgtccaacggaagcgacagatgtatttcatgcgcatacatatgattcgtgtgcgtgtgtgtatgtgtgtgtgtgtgtgtgtgtggatatggtgaaacacgatggacagaggaacagaaagacagaaaaaaacaaagggatgaaaatggaagagaaagaaaatccatgagtataatgtactttcccttcgaccgacaatcacgatccaaatcgaacggcgcttcatctctcgttctaatctgcctagatgagtacaagtatatgcaccacttatcgctctcctcttaagatgagtacaaattgagggatcaaaagccagcgaaggaagacattgtgaacctccaccaatccttcgttctttttcttctctctctcctttaccttttcctcttgctctcctcacgcaagtgaacaccattgaacagagatatcacgcgcgctctttccggtaacaaaacctcacgggacgaacaaaagacggatgaagggaaataaacgacttaccctgccatctggccaatccttcccacccgtatccaacatatctctcaccaacccatccaacacaccctccgccttcaataagaacccagcacaagtacctctctctccatcaatattcgcactgatctttttgtttacttttgacctgcatgctcgagcgatagagtcgaaacagtacaagctatgaatcttggaggctgatcttggttggagtgaacggtgttggttgtatagattggtgattatctgagaatcgtactggaataaagtttttccacaagagaacaacttgtcagctctcccttgcctatagattgtcaagcaagttcttcgaatacacagattggagataaacctacctggatgtcttttatagccatggcagtcaatctttcgatcttaccgccggataactttcgagcttcgacggcctctttgaggaggtcattaaacggctgatcgaaagaagattcagttcgtttgatgtgttcacaggggtagagtgaacggtaagggcatatcaaccaaacggtcggaacgcaggtttttccatacacatcgtgagagaggagcaaaaccactactcgtcagtcaggatcaccaaacaaatcaaccaagatgggagaagaagagaaaaggcacgacagcagatttcaaagtaggaaggagaaagctctagaacaaacctttaaagcttcaatcgataagtcatcctgcatgactctccaattctaacaaatctgacggctgtccgtttgattcagagcctggatgtgcgtattctggtcactgtggacttgtgaggagaggtgagtaaagaggaaagagagagagagaggtgtagtcagaacaagtgatttctcagaacgatggtgtaaagcaattttggggttccataaagaccccatgtttgcccatatggttccccatcttgattgaagtgcccggctgttgtaatcgtgcccattaggccaatttctctctttcgctacaaaacacaggcgttgaatatataatacgtggtcctaaacaaacgaatgattgtcaaaactggactgaacaggacggaaagagcaaagaggatagcaaagtgtaatgtaaaaagaacaaaaaatgacaaaagggaggaatcgataggtggtagtacatattagaagagtctttcttgagacaagtgaaggagaaagaagacacagacatgcctatcagcgacttgagatggcagaagcaaaggaagaaaaggacgaaggagtgtataggggatgatagagaacacaaagaaattgtccctttagatgagatgtagcgcattgcccgtgaatgatataaagaaaggaagaggaaggactattcgaaaagaaagatgaatgaaaagaaaagggtaggccagcatcagagtagattttttaaaaccagttcgataataacgatctcttagtggctgaagccgcagcggtagaagttgtagtggtaacctatatcgacaagaacggaggaagggtaagcgggaaactaaggcaggagaatttgtggaaggggcaagaagagcgaaggacagcggaaggagaaggaggaaacaagacaaggagacatacagcttggtcagagagttgaatagtgggcagcatgtttggcggtcgagcttggaggtagagactagtaaaatgaagtgtttgcggatcgggtttgttagttgttgtcgtcgtcgtcgtcgtcgtcgtcatcatcaatgtacaaacgatatgatagtggtatcatagacgcacccaggcatggcggaaccatcgaatttggccagctcgagcatatagttgttgggcacggtatcaacgatgatatcccaatgcgagtagtaggtctgtagacatcgttcggtcccaatatcagcctattgatcatggcctgtataagattgaacgagtcgagagactcgagaacaaaccttttgctcatacacggtgatgacattcgtcacagccgcacatggatcttggacttgaatcctaccgtctccggcgaacggagttaacgtgagcgatccgttggtgttcaacgtgtacgttccatgttgccaaatgacgaccgtctggatgcaattcggtagcgatgctgaaagccacccgacgagaaatcaagagagcataagcaaaagaagcgtcaacaagggatagaatagtgcagatataaatgtaccgttggagttaaaccggtactgggcttcctcgaaatgtccttcgttatcactggtccattcccaacgaaaacaaagcccaacgatcagcctggaagcataaaaagaaggagagaaagcctcaatcgggtcaatgcacatacaaggagtatgcgattcctgatgtcgcaggatagttgaacgaataagctagagggtttgcgaatccctaaaacgacgagagagaagacaagagagaagaaaaaacaaccctatctcagtattccaaacagacggatgacggccaaggatctgggtttgagaccgagagaactgaagagagaaatgaatcactaacagaaccagtagtgactcctcctgagccggaactccatgtgccgtaaagagcggtcacgttattgcttgctctgaaagagggagaatcgccaaacatcgaccgcacgcgtacagaacaaggatatatatatccaccaggttgttcaaaatccaattgcaacaatcagtcaacagaaacctttccatgagcttctcagaaatatcttcctctttcatgttttccgtatacgtactccagattttgagcatgaacagaagatagagagaggaggaatgaaagcactgtgcctcctatagtgatgggtacactagcaagtctcactgtaaggtttgaacagaagcgaacagatacagactgtttcagtagctgattaagttgacaggaacctcaacaagatgaatgaacgcacttgatcaaacacgatgatggaaaagcagaggggcagagaaagagaataagggtagaggaagtgggatatggaggaagagagagtagagtatagtagaggatcaagaccgatgcaaagaccaatactcacggcattggctgtaaccaccgattatgtaatcataggctgtcaccactgacaactgatgccttgcggctataacgcttattaaaaaaactcatcaaatagtcatggatacagtatttaaggaaacgttggcatagagtagtgaatcgtgtgtacaagaaaaagagagagtaataaccgatcgatttagaagcagcaactaagaggtaatagtgagattgaacgagagagcaaagagttgttagcgattttgcgtgacgcctcgtacaacaaggaaaagttgaatagcacgaacgggatgatgcaaatgtctatcgggtgagtacatgaaatttcaaacgatcaatgctttgtctctcaggaatcctgtggatcgaaaaggaaacagaaagagggaaaaaagggatcaaaattgtagaaacttaccacagtggcaaggcaagattggcaggccacacagatgctattgatagaaaacccgttcagtaagtcatgttggtctcgtatatcttggtacatagaataataaagaaacagaaagaacaaaaacaaacgcacgccagggcaacctcctcggagtcgcatagccgctccgtcctgcttggacccctcttggacattgttcatggctatacacaagatattaggtgtgaacagccccacacagaagcatcagacaccgtcaaagagtggagaagagaaacatatggtaagaataaacggtcatctgtagtatttgagaggtaatggaaccacaagcgtacacatagtcgtctttccaggctgctgttgttgctgctgcacctgttgaaccacagggacgggagggtaagagatctctgcaggggaagaagacatggttgtatgagtgttgtaagtggtgaggaaggatgaggaaggagggggttataaaagagatatcgagcagcaagtattcgttcaagaagcaagctgtacgttgccgcagcgctcaattatggtgtacactgggtctatatctgtcggatagacaacgtcatcggcgcctccttcctaattagggttatttcgaaaacaaaggaggatattgtgtctaccagatgatgactcctgtgctcaaggttctgaccgctcacccttcagttataaattcattatgccaacagggaagcaaacaagtcatccgaaccagaccggttcatcgccggcgttccctaatcttgttgcttttgatctcgattatacacttgttcgtgtttgtctgctcctatgaaacacagagctagtcggagctgatgacaacttcaatgctcgattgggatgaatggataaatctttattctactttcttttaaagtgggagttagtaaatacctatattgatctttcagcgctggagcatactgacaggactggatctggttcgatctgtgtagtctttggatagacacccatgtaaccggaccgtttaaacgaacaggagaagaactcaacaaggtcatcccccggtatgtcttttggctttcttgaacgaatcgatcgacaatgtttttatgatctgaccgttcttgtacatgtgtgggccttgacttcggctaattcaaaggcgaggtgacccgatctcattctatcctgacgttccagagatcctccacaagatcagaaggaacgaggatagctatattgccgcttgctctcggacgtctgctcccgactagttgagtgaatcctgtttgtctgcacatatagagaaatcacgcctagccgatatggaactcaacatctatctctgttccctttctcggttctggtgtgcgacgtgattagcgcgcgagaggttttgggcttgttacttgtaccttccccgagatcgtcaccgaaggatgaacctaaacgggctatcgacttttttgacgggcaagtcgttttgtgttgtatatgagacagcttcttgtcttgactctctatatcttaccactactgtttgtcggccttggtgttgcttgtaggaaggagatttatcctgggtcaaaactgaaacatttcaagaggttgcacgagaagaccggaatcccgtatgaagagatggtatgttctctcctcatcttttttgctttcggaatcttgctatattacgtactcacagacattctgctcccacctcttatccctgttattttttttatttttacaaagctcttctttgatgacgagagtcgaaacaaggaggtcgagagtttaggtgagcggtcgtcttaacaatagctcttctcttctctctctctccctctctccctactagtatcatccatccatctatctgtctagctcactttcgtttgaacacaccaggcgtcacgatgatcctcgtcccgtcgacaggaacgacgatgaaactgtttgacgaaggtctcaagacatggagaaagaaatggaaccggtgagagcggtggcgaggatgagctgtgaccgatgtaaccacgatgtgacgatgagtgttgaacgaagactctatgcacagccacacga

SEQ ID NO: 177 - DNA, 3789 bp, Xanthophyllomyces dendrorhous
ctctattgcagcccactattggcgccgattacggtcttcattaccacttgctattacactttctaccacgtttcctagtccgtccgtctattggcctgtctatttacatcctctatcacaccgtctattacaccctctgtaatcctccactacaactttctcaccgttttcctattggcttgccttcacttttcaagtgaatagtcatgtcgaccaggttagtaatcttgtccatctccttctattctttctattcttctttctcttctcactgtgtctcttatatactcagactgaccaaatggatcaacctttttcttctccctctctttctttctttctttctttcttctcttccgctctctatcgcacttggttcacgtcaactcttcgttgtcgatgtatctatactctccggttgattaaccttcttgctgatccctcgctgattctcattggtcgccgcttttgacggacgatcttttgaatgacctctgctaatctttcgtcgctgtcttgtaaactaatccatgtcaacaccagacttgatcgtctgatctcccttctagagacaggctccacaccacagatcaaatcaaccgtagcaaaacaactgggtgagatcgcaaaacgaagcttcaaaggttccgccctacctgttgtctcagccgtcaagaatgagctggacgagaccgagccagggctaggcgttcgtaatagtcaaactaccaacagccgaggagaccaaactacgcggaacgagctgggagaaggactggagagtgatgcagaatgggcagaggtcatgggcttgattggcagggtttgtctcgatcttccttgtgatctctatcggtctacattcatagatcactaatcgactgacaccctcgtcctcatttcttcgttcgttcgttcgttccttccttccttcaaaaggtcctaccccatcttcgttcaaaatcttatgagacaaggacagcagcagcgttggcactcgagcatatcgcccgatccgttcccacttggtccccaccaacacttctccccgactcgatcgaccctacgaccttacctccccctccatcagctcccacgccattgaaccttccacctctgctgatgcccgcccatccaaaactgttagcgtcttctgggaaggaattcgctgctccgttagtgcccacgacaaaagaagaggttgaagcaagtagagcagaggttctcaaacgactggggatctccgctcccggtggaatggactttgggttcggcgatatcgtcaaggaagagctcgacaaggatccctcggacagatcatccgttccggccaccgaatccgttggagggtcgacgaacgtcaagagtgaacccatcgatgacgctgacatcaagccatctaattctgccgctcactcgacatcttctgagagcacccctcttcaatctcctacaccgaacaatccctcgtctgcaaaagctccttcaaaggctgccttgaagaaggcagaaaaggagaggatggaggaagaagacaagaaaaggaaggcagaagaagaagaagaattcaaaggactcagcgccaggcagatcaacgccttgaagaggaaaagaaaggccggaggaggtgcggccgcgagcactcaggctgctactactccaccggcgagtagcaagtgagtaaaatccttctgtcatattttctattcttcacatgagaagaaaagcaaaagtttctgatacgtgaacacatcggttgctgatcggacgatttttttgttttattttaaaaaaggctcaaactaacaactaatcccaccgaatccaaatccacactaaacccaaattcacgctcatcacctacttcagcctctgcatcaaccaatcctctctccgctcccgtcatcgtagcccctaagccagccccttccgaaggtacgaacaccaccaccggtggttctgtctcgactcctgtcaaacccgagtggggatcgaccctgatcgtctctcgggatagccataaccgagaagcttggcctttctccaaggttgtcgagtttcttggtgtcggcttgttttccgacgcttgggaggtccgtcacggagcggccctagggcttcgagagatcatcaaagtacaagggaaaggaatgggaaaggtcgtagggtaccctccggaactcaacgagcaactgaacgcaaaccagttgctcgtcttgggaaactcgctcctctctctattggcactcgatcggtttggggattataactcggatcaagtcgtcgcgcctgtcagagagacggcctcacaaacgttggcttccaccatggtccatctgggcagagaaggcgtcgaggaggttcacaaagttctcgtcggcatggtcagacaggactggttaggaggtaccggcaaggatggtaaaggaaaaggatatgcctgggaggtcagacatgccggcctattaggactcaagtacgaagtcgcagttagaggagatctgttaggatctcgatcggtagaaggggaagatatcaagaaggagctcgccgagaacgtgagcatcaaggaggagaccgaatggacgggcgagaatagggaaatgatgttgaaaggcgtagtagatgcagccgtccttgggtgagtgtctatcttttcttgtttctcttctaaatctttgtgctcaacgcagcccctgaactaactgatcgaccgattgaatgtttttgaaaccatggcgtttaggcttggagatccggatgatgacgttcgatctgtatcagctggatgtctcttgcctgtggcgacatacctggtggaacatttgccagaagaactggatagggttctgaccgtcctgtgggatgcgcttggcgaggggggggatgagcttggaagtagtacaggtgtaattatgaaccttcttagtacgcaactctctccttcccccttatcatctctgctcatctgagtctagttggtcttctgagctagaagctgatctcttcttttgaggggggttttgtaggtaaactaatcacgttcccccagtgcatcagcgtgatgaaagctggcccacttactctgctcgagttgatcccacgattatacccctttttccgacataccatcgccgccgtccgattggctgtacccaacgcgcttcacatctttcttaccgccccggctgtggaatcgttcgaatggattgacgcccgtcttttcagattcctgttccaaaatttgatcgtagaagaacgttcggacatcagagaatctacccttcagacgttcaaagcggccgtccaaaaaattccactccttccaccgatagacgatcaggcattcataggtccattgagcgtggccattcagccttacttgcctgaatggttaaccgttttgatgtctcctcctggagttccactcgacccggccttcttcttgaaagcggacccaccggcgacaggaaagtttggaaagacggccaaaggagcggatactcagtcgttaggctacaatgtggacaagagtgtgatggctcaggatctatcgcttttctcagtggacgacgtgatcagaggtcggttggctgctgctgagggcttggctcttttggttactcatgacgccgccgttcgttttctttctttgtttctttcgttaaatcttatttggtggggattgccgttggtttggctcacaatcttttgctcttgccggggtatctaggctttcgaaccgcactttgcacacttgatggccaactacatgggctcgacctcctc

(The sequence listing continues in the following parts.)

1. An isolated nucleic acid comprising a variant of a nucleotide sequence set forth in:
SEQ ID NO: 14894 (corresponding to CDS accession CDZ98521 of X. dendrorhous CBS 6938);
SEQ ID NO: 16402 (corresponding to CDS accession CED83134 of X. dendrorhous CBS 6938);
SEQ ID NO: 13437 (corresponding to CDS accession CED80058 of X. dendrorhous CBS 6938);
SEQ ID NO: 13605 (corresponding to CDS accession CED80056 of X. dendrorhous CBS 6938);
SEQ ID NO: 15263 (corresponding to CDS accession CDZ96150 of X. dendrorhous CBS 6938);
SEQ ID NO: 15929 (corresponding to CDS accession CDZ96151 of X. dendrorhous CBS 6938);
SEQ ID NO: 17082 (corresponding to CDS accession CDZ96152 of X. dendrorhous CBS 6938);
SEQ ID NO: 12953 (corresponding to CDS accession CDZ96153 of X. dendrorhous CBS 6938);
SEQ ID NO: 13445 (corresponding to CDS accession CED80060 of X. dendrorhous CBS 6938);
SEQ ID NO: 13989 (corresponding to CDS accession CED80061 of X. dendrorhous CBS 6938);
SEQ ID NO: 17215 (corresponding to CDS accession CED83656 of X. dendrorhous CBS 6938);
SEQ ID NO:17373 (corresponding to CDS accession CED83814 of X. dendrorhous CBS 6938);
SEQ ID NO: 18649 (corresponding to CDS accession CDZ96789 of X. dendrorhous CBS 6938);
SEQ ID NO: 19046 (corresponding to CDS accession CDZ97186 of X. dendrorhous CBS 6938);
SEQ ID NO: 13853 (corresponding to CDS accession CDZ98193 of X. dendrorhous CBS 6938);
SEQ ID NO: 14841 (corresponding to CDS accession CDZ98468 of X. dendrorhous CBS 6938);
SEQ ID NO: 15265 (corresponding to CDS accession CDZ96332 of X. dendrorhous CBS 6938);
SEQ ID NO: 17534 (corresponding to CDS accession CED83975 of X. dendrorhous CBS 6938);
SEQ ID NO: 15177 (corresponding to CDS accession CDZ98804 of X. dendrorhous CBS 6938);
SEQ ID NO: 13440 (corresponding to CDS accession CDZ96154 of X. dendrorhous CBS 6938); or
SEQ ID NO:15928 (corresponding to CDS accession CDZ96333 of X. dendrorhous CBS 6938),
wherein the variant is at least 80% identical to the nucleotide sequence, or a fragment of the isolated nucleic acid.

2-23. (canceled)

24. An isolated protein encoded by the isolated nucleic acid of claim 1, or a fragment or derivative thereof.

25. The isolated protein of claim 24, wherein the protein is of a protein classification selected from ferredoxin/adrenodoxin reductase; cytochrome; ATP synthase; NADH dehydrogenase; fatty acid desaturase; Acyl-CoA-oxidase; pantothenate kinase; polyphosphate multikinase; G protein-coupled receptor; and succinate dehydrogenase.

26. The isolated protein of claim 24, wherein the protein is selected from ferredoxin/adrenodoxin reductase; mitochondrial cytochrome b2; cytochrome b; cytochrome c oxidase subunit 1; ATP synthase subunit 6; NADH dehydrogenase subunit 4; cytochrome c oxidase subunit 2; cytochrome c oxidase subunit 3; NADH dehydrogenase subunit 2; NADH dehydrogenase subunit 5; NADH dehydrogenase subunit 6; cytochrome c oxidase subunit 3; delta 9 fatty acid desaturase; Acyl-CoA-oxidase; pantothenate kinase PanK; geranylgeranyl pyrophosphate synthase; fumarate reductase; sucrose transporter; inositol polyphosphate multikinase, ARGR transcription regulatory complex component; G protein-coupled receptor, rhodopsin-like; succinate dehydrogenase; and ATP synthase subunit mitochondrial.

27. A method of modifying a nucleic acid including a step of changing one or more nucleotides of the nucleic acid to produce the isolated nucleic acid of any one of claim 1.

28. (canceled)

29. A genetic vector or construct comprising the isolated nucleic acid of any one of claim 1.

30. (canceled)

31. The vector or construct of claim 29, wherein the vector or construct is adapted for protein expression in yeast.

32. (canceled)

33. The vector or construct of claim 29, wherein the vector or construct is adapted for gene silencing in yeast.

34. (canceled)

35. The vector or construct of claim 29, wherein the vector or construct is adapted for genome editing in yeast.

36. An isolated cell comprising the nucleic acid of claim 1.

37-42. (canceled)

43. The isolated cell of claim 36, wherein the cell is a yeast cell.

44. The isolated cell of claim 43, wherein the cell is a Xanthophyllomyces cell or a Xanthophyllomyces dendrorhous cell.

45. An isolated yeast strain comprising the cell claim 43.

46-47. (canceled)

48. A method of producing astaxanthin including a step of expressing the isolated nucleic acid of claim 1 in vitro or in vivo, to thereby produce the astaxanthin.

49. A method of producing astaxanthin including a step of performing metabolism with the isolated cell of claim 36, to thereby produce the astaxanthin.

50. The method of claim 49, wherein the step of performing metabolism is or includes a step of performing fermentation with the isolated cell.

51. The method of claim 50, including a step of combining the cell or organism with a nitrogen source metabolite, such as malt extract.

52. (canceled)

53. The method of claim 50, including a step of combining the cell with a carbon source metabolite, such as molasses.

54-62. (canceled)

63. The isolated nucleic acid of claim 1, wherein the variant nucleotide sequence affects amino acid sequence or expression of an encoded protein or protein fragment.

64. An isolated cell, wherein the isolated cell has been mutagenised or genetically modified to alter expression of a protein encoded by:
SEQ ID NO: 14894 (corresponding to CDS accession CDZ98521 of X. dendrorhous CBS 6938);
SEQ ID NO: 16402 (corresponding to CDS accession CED83134 of X. dendrorhous CBS 6938);
SEQ ID NO: 13437 (corresponding to CDS accession CED80058 of X. dendrorhous CBS 6938);
SEQ ID NO: 13605 (corresponding to CDS accession CED80056 of X. dendrorhous CBS 6938);
SEQ ID NO: 15263 (corresponding to CDS accession CDZ96150 of X. dendrorhous CBS 6938);
SEQ ID NO: 15929 (corresponding to CDS accession CDZ96151 of X. dendrorhous CBS 6938);
SEQ ID NO: 17082 (corresponding to CDS accession CDZ96152 of X. dendrorhous CBS 6938);
SEQ ID NO: 12953 (corresponding to CDS accession CDZ96153 of X. dendrorhous CBS 6938);
SEQ ID NO: 13445 (corresponding to CDS accession CED80060 of X. dendrorhous CBS 6938);
SEQ ID NO: 13989 (corresponding to CDS accession CED80061 of X. dendrorhous CBS 6938);
SEQ ID NO: 17215 (corresponding to CDS accession CED83656 of X. dendrorhous CBS 6938);
SEQ ID NO:17373 (corresponding to CDS accession CED83814 of X. dendrorhous CBS 6938);
SEQ ID NO: 18649 (corresponding to CDS accession CDZ96789 of X. dendrorhous CBS 6938);
SEQ ID NO: 19046 (corresponding to CDS accession CDZ97186 of X. dendrorhous CBS 6938);
SEQ ID NO: 13853 (corresponding to CDS accession CDZ98193 of X. dendrorhous CBS 6938);
SEQ ID NO: 14841 (corresponding to CDS accession CDZ98468 of X. dendrorhous CBS 6938);
SEQ ID NO: 15265 (corresponding to CDS accession CDZ96332 of X. dendrorhous CBS 6938);
SEQ ID NO: 17534 (corresponding to CDS accession CED83975 of X. dendrorhous CBS 6938);
SEQ ID NO: 15177 (corresponding to CDS accession CDZ98804 of X. dendrorhous CBS 6938);
SEQ ID NO: 13440 (corresponding to CDS accession CDZ96154 of X. dendrorhous CBS 6938); or
SEQ ID NO:15928 (corresponding to CDS accession CDZ96333 of X. dendrorhous CBS 6938),
or to alter expression of a protein fragment or derivative of the protein.
